United States Patent Application Publication US 2020/0354739 A1 - sequence listing, part 2

SEQ ID NO: 2 - DNA, 2515428 bp, Glycine tomentella (residues 1,257,715-2,515,428 of 2,515,428)
  misc_feature (2518)..(2998): n is a, c, g, or t
  misc_feature (36286)..(36599): n is a, c, g, or t
  misc_feature (36872)..(36881): n is a, c, g, or t
  misc_feature (65098)..(65189): n is a, c, g, or t
  misc_feature (91979)..(92044): n is a, c, g, or t
  misc_feature (103399)..(103465): n is a, c, g, or t
  misc_feature (108489)..(108498): n is a, c, g, or t
  misc_feature (109073)..(109082): n is a, c, g, or t
  misc_feature (110439)..(110448): n is a, c, g, or t
  misc_feature (114969)..(115015): n is a, c, g, or t
  misc_feature (117523)..(117532): n is a, c, g, or t
  misc_feature (119983)..(120104): n is a, c, g, or t
  misc_feature (147407)..(147539): n is a, c, g, or t
  misc_feature (148147)..(148147): n is a, c, g, or t
  misc_feature (148448)..(148543): n is a, c, g, or t
  misc_feature (151690)..(151746): n is a, c, g, or t
  misc_feature (152026)..(152272): n is a, c, g, or t
  misc_feature (155219)..(155271): n is a, c, g, or t
  misc_feature (160392)..(160454): n is a, c, g, or t
  misc_feature (171648)..(171859): n is a, c, g, or t
  misc_feature (177208)..(177279): n is a, c, g, or t
  misc_feature (178199)..(178208): n is a, c, g, or t
  misc_feature (191490)..(191619): n is a, c, g, or t
  misc_feature (194974)..(194974): n is a, c, g, or t
  misc_feature (196069)..(196069): n is a, c, g, or t
  misc_feature (196368)..(196600): n is a, c, g, or t
  misc_feature (208015)..(208015): n is a, c, g, or t
  misc_feature (212728)..(212812): n is a, c, g, or t
  misc_feature (213179)..(213270): n is a, c, g, or t
  misc_feature (233294)..(233303): n is a, c, g, or t
  misc_feature (252827)..(252827): n is a, c, g, or t
  misc_feature (259658)..(259791): n is a, c, g, or t
  misc_feature (262066)..(262133): n is a, c, g, or t
  misc_feature (262439)..(262704): n is a, c, g, or t
  misc_feature (269209)..(269218): n is a, c, g, or t
  misc_feature (270030)..(270039): n is a, c, g, or t
  misc_feature (270849)..(270858): n is a, c, g, or t
  misc_feature (271823)..(271844): n is a, c, g, or t
  misc_feature (277888)..(277935): n is a, c, g, or t
  misc_feature (278275)..(278284): n is a, c, g, or t
  misc_feature (278614)..(278630): n is a, c, g, or t
  misc_feature (283365)..(283365): n is a, c, g, or t
  misc_feature (292154)..(292154): n is a, c, g, or t
  misc_feature (294898)..(295033): n is a, c, g, or t
  misc_feature (303145)..(303509): n is a, c, g, or t
  misc_feature (327149)..(327149): n is a, c, g, or t
  misc_feature (345182)..(345191): n is a, c, g, or t
  misc_feature (345689)..(345698): n is a, c, g, or t
  misc_feature (347234)..(347243): n is a, c, g, or t
  misc_feature (354646)..(354974): n is a, c, g, or t
  misc_feature (355279)..(355288): n is a, c, g, or t
  misc_feature (366049)..(366049): n is a, c, g, or t
  misc_feature (387264)..(396263): n is a, c, g, or t
  misc_feature (401298)..(401307): n is a, c, g, or t
  misc_feature (404653)..(404702): n is a, c, g, or t
  misc_feature (411793)..(411845): n is a, c, g, or t
  misc_feature (414129)..(414129): n is a, c, g, or t
  misc_feature (424879)..(425053): n is a, c, g, or t
  misc_feature (436381)..(436381): n is a, c, g, or t
  misc_feature (438890)..(439012): n is a, c, g, or t
  misc_feature (445443)..(445813): n is a, c, g, or t
  misc_feature (446434)..(446520): n is a, c, g, or t
  misc_feature (448528)..(448528): n is a, c, g, or t
  misc_feature (449746)..(449755): n is a, c, g, or t
  misc_feature (451579)..(451618): n is a, c, g, or t
  misc_feature (451827)..(453537): n is a, c, g, or t
  misc_feature (453971)..(454045): n is a, c, g, or t
  misc_feature (454682)..(454729): n is a, c, g, or t
  misc_feature (454995)..(455028): n is a, c, g, or t
  misc_feature (458579)..(458801): n is a, c, g, or t
  misc_feature (471895)..(471896): n is a, c, g, or t
  misc_feature (473644)..(473695): n is a, c, g, or t
  misc_feature (475540)..(475549): n is a, c, g, or t
  misc_feature (476056)..(476297): n is a, c, g, or t
  misc_feature (476716)..(481095): n is a, c, g, or t
  misc_feature (483544)..(483583): n is a, c, g, or t
  misc_feature (494682)..(497556): n is a, c, g, or t
  misc_feature (500976)..(501680): n is a, c, g, or t
  misc_feature (509293)..(509775): n is a, c, g, or t
  misc_feature (510125)..(510134): n is a, c, g, or t
  misc_feature (511429)..(511438): n is a, c, g, or t
  misc_feature (512071)..(512080): n is a, c, g, or t
  misc_feature (520829)..(520829): n is a, c, g, or t
  misc_feature (535872)..(535872): n is a, c, g, or t
  misc_feature (548634)..(548716): n is a, c, g, or t
  misc_feature (550234)..(550445): n is a, c, g, or t
  misc_feature (556363)..(556825): n is a, c, g, or t
  misc_feature (561399)..(561399): n is a, c, g, or t
  misc_feature (563228)..(563396): n is a, c, g, or t
  misc_feature (569719)..(569972): n is a, c, g, or t
  misc_feature (571088)..(571199): n is a, c, g, or t
  misc_feature (571558)..(571610): n is a, c, g, or t
  misc_feature (574171)..(574171): n is a, c, g, or t
  misc_feature (582944)..(582946): n is a, c, g, or t
  misc_feature (584002)..(584056): n is a, c, g, or t
  misc_feature (595096)..(595105): n is a, c, g, or t
  misc_feature (598699)..(598791): n is a, c, g, or t
  misc_feature (599080)..(599089): n is a, c, g, or t
  misc_feature (601036)..(601036): n is a, c, g, or t
  misc_feature (603263)..(603301): n is a, c, g, or t
  misc_feature (605068)..(605725): n is a, c, g, or t
  misc_feature (612683)..(612791): n is a, c, g, or t
  misc_feature (613113)..(613122): n is a, c, g, or t
  misc_feature (624207)..(624794): n is a, c, g, or t
  misc_feature (627447)..(636305): n is a, c, g, or t
  misc_feature (637524)..(637692): n is a, c, g, or t
  misc_feature (643932)..(644116): n is a, c, g, or t
  misc_feature (646255)..(646264): n is a, c, g, or t
  misc_feature (655076)..(655353): n is a, c, g, or t
  misc_feature (655764)..(655773): n is a, c, g, or t
  misc_feature (664924)..(665368): n is a, c, g, or t
  misc_feature (665811)..(665897): n is a, c, g, or t
  misc_feature (684898)..(684955): n is a, c, g, or t
  misc_feature (686088)..(686097): n is a, c, g, or t
  misc_feature (686785)..(686794): n is a, c, g, or t
  misc_feature (687013)..(687452): n is a, c, g, or t
  misc_feature (696202)..(696211): n is a, c, g, or t
  misc_feature (697137)..(697146): n is a, c, g, or t
  misc_feature (697505)..(697530): n is a, c, g, or t
  misc_feature (698828)..(699334): n is a, c, g, or t
  misc_feature (700134)..(700134): n is a, c, g, or t
  misc_feature (701663)..(701779): n is a, c, g, or t
  misc_feature (705994)..(706003): n is a, c, g, or t
  misc_feature (706275)..(706284): n is a, c, g, or t
  misc_feature (706554)..(706740): n is a, c, g, or t
  misc_feature (739616)..(739625): n is a, c, g, or t
  misc_feature (739984)..(739993): n is a, c, g, or t
  misc_feature (740772)..(740781): n is a, c, g, or t
  misc_feature (747267)..(747725): n is a, c, g, or t
  misc_feature (748024)..(748033): n is a, c, g, or t
  misc_feature (751823)..(751832): n is a, c, g, or t
  misc_feature (752158)..(752167): n is a, c, g, or t
  misc_feature (754755)..(755332): n is a, c, g, or t
  misc_feature (761790)..(761799): n is a, c, g, or t
  misc_feature (770075)..(773141): n is a, c, g, or t
  misc_feature (781173)..(781238): n is a, c, g, or t
  misc_feature (788556)..(788556): n is a, c, g, or t
  misc_feature (798961)..(799024): n is a, c, g, or t
  misc_feature (799264)..(799264): n is a, c, g, or t
  misc_feature (803059)..(803645): n is a, c, g, or t
  misc_feature (806342)..(806500): n is a, c, g, or t
  misc_feature (807057)..(807057): n is a, c, g, or t
  misc_feature (809594)..(810292): n is a, c, g, or t
  misc_feature (810583)..(810645): n is a, c, g, or t
  misc_feature (819075)..(819099): n is a, c, g, or t
  misc_feature (819525)..(819534): n is a, c, g, or t
  misc_feature (823746)..(823746): n is a, c, g, or t
  misc_feature (831993)..(831993): n is a, c, g, or t
  misc_feature (839444)..(840159): n is a, c, g, or t
  misc_feature (860764)..(860764): n is a, c, g, or t
  misc_feature (874264)..(874670): n is a, c, g, or t
  misc_feature (874982)..(874991): n is a, c, g, or t
  misc_feature (875486)..(875495): n is a, c, g, or t
  misc_feature (880231)..(880231): n is a, c, g, or t
  misc_feature (892030)..(892205): n is a, c, g, or t
  misc_feature (900420)..(900439): n is a, c, g, or t
  misc_feature (905126)..(905135): n is a, c, g, or t
  misc_feature (917837)..(917857): n is a, c, g, or t
  misc_feature (918415)..(918483): n is a, c, g, or t
  misc_feature (919195)..(919698): n is a, c, g, or t
  misc_feature (929819)..(931166): n is a, c, g, or t
  misc_feature (936309)..(936309): n is a, c, g, or t
  misc_feature (937617)..(937679): n is a, c, g, or t
  misc_feature (938166)..(938202): n is a, c, g, or t
  misc_feature (948999)..(948999): n is a, c, g, or t
  misc_feature (955232)..(955301): n is a, c, g, or t
  misc_feature (957017)..(957452): n is a, c, g, or t
  misc_feature (957755)..(957764): n is a, c, g, or t
  misc_feature (963372)..(964799): n is a, c, g, or t
  misc_feature (975972)..(975972): n is a, c, g, or t
  misc_feature (980684)..(980776): n is a, c, g, or t
  misc_feature (984316)..(984467): n is a, c, g, or t
  misc_feature (984667)..(985013): n is a, c, g, or t
  misc_feature (985138)..(985404): n is a, c, g, or t
  misc_feature (985808)..(985808): n is a, c, g, or t
  misc_feature (1017314)..(1017402): n is a, c, g, or t
  misc_feature (1021845)..(1021845): n is a, c, g, or t
  misc_feature (1037120)..(1037214): n is a, c, g, or t
  misc_feature (1041307)..(1042192): n is a, c, g, or t
  misc_feature (1043052)..(1043061): n is a, c, g, or t
  misc_feature (1061729)..(1062991): n is a, c, g, or t
  misc_feature (1064770)..(1065153): n is a, c, g, or t
  misc_feature (1065481)..(1065490): n is a, c, g, or t
  misc_feature (1068350)..(1068358): n is a, c, g, or t
  misc_feature (1070628)..(1070664): n is a, c, g, or t
  misc_feature (1073221)..(1073383): n is a, c, g, or t
  misc_feature (1073735)..(1073744): n is a, c, g, or t
  misc_feature (1082661)..(1082682): n is a, c, g, or t
  misc_feature (1083652)..(1083936): n is a, c, g, or t
  misc_feature (1084301)..(1084344): n is a, c, g, or t
  misc_feature (1084663)..(1084672): n is a, c, g, or t
  misc_feature (1087587)..(1087596): n is a, c, g, or t
  misc_feature (1088480)..(1088489): n is a, c, g, or t
  misc_feature (1100633)..(1100693): n is a, c, g, or t
  misc_feature (1103210)..(1103222): n is a, c, g, or t
  misc_feature (1103976)..(1104499): n is a, c, g, or t
  misc_feature (1108036)..(1108083): n is a, c, g, or t
  misc_feature (1108391)..(1108391): n is a, c, g, or t
  misc_feature (1121455)..(1121455): n is a, c, g, or t
  misc_feature (1131796)..(1131956): n is a, c, g, or t
  misc_feature (1139540)..(1139850): n is a, c, g, or t
  misc_feature (1141715)..(1141715): n is a, c, g, or t
  misc_feature (1153053)..(1153141): n is a, c, g, or t
  misc_feature (1158773)..(1158797): n is a, c, g, or t
  misc_feature (1159432)..(1159557): n is a, c, g, or t
  misc_feature (1162619)..(1162739): n is a, c, g, or t
  misc_feature (1163190)..(1163199): n is a, c, g, or t
  misc_feature (1166327)..(1166327): n is a, c, g, or t
  misc_feature (1171052)..(1171076): n is a, c, g, or t
  misc_feature (1171386)..(1171412): n is a, c, g, or t
  misc_feature (1188088)..(1188121): n is a, c, g, or t
  misc_feature (1188873)..(1188917): n is a, c, g, or t
  misc_feature (1190220)..(1194815): n is a, c, g, or t
  misc_feature (1195112)..(1195121): n is a, c, g, or t
  misc_feature (1210221)..(1210724): n is a, c, g, or t
  misc_feature (1221116)..(1221723): n is a, c, g, or t
  misc_feature (1246582)..(1246600): n is a, c, g, or t
  misc_feature (1247090)..(1247160): n is a, c, g, or t
  misc_feature (1252322)..(1252399): n is a, c, g, or t
  misc_feature (1255587)..(1255722): n is a, c, g, or t
  misc_feature (1256438)..(1256447): n is a, c, g, or t
  misc_feature (1264054)..(1264141): n is a, c, g, or t
  misc_feature (1264542)..(1264551): n is a, c, g, or t
  misc_feature (1265445)..(1265445): n is a, c, g, or t
  misc_feature (1270155)..(1270164): n is a, c, g, or t
  misc_feature (1270726)..(1270735): n is a, c, g, or t
  misc_feature (1276069)..(1276088): n is a, c, g, or t
  misc_feature (1285115)..(1285115): n is a, c, g, or t
  misc_feature (1292752)..(1292761): n is a, c, g, or t
  misc_feature (1293343)..(1293352): n is a, c, g, or t
  misc_feature (1296972)..(1296981): n is a, c, g, or t
  misc_feature (1297588)..(1297597): n is a, c, g, or t
  misc_feature (1301879)..(1301888): n is a, c, g, or t
  misc_feature (1302658)..(1302667): n is a, c, g, or t
  misc_feature (1315014)..(1315160): n is a, c, g, or t
  misc_feature (1318709)..(1318990): n is a, c, g, or t
  misc_feature (1319334)..(1319757): n is a, c, g, or t
  misc_feature (1321767)..(1321837): n is a, c, g, or t
  misc_feature (1324303)..(1324656): n is a, c, g, or t
  misc_feature (1327754)..(1327769): n is a, c, g, or t
  misc_feature (1348460)..(1348627): n is a, c, g, or t
  misc_feature (1353754)..(1354201): n is a, c, g, or t
  misc_feature (1354501)..(1354543): n is a, c, g, or t
  misc_feature (1361377)..(1370010): n is a, c, g, or t
  misc_feature (1373811)..(1374519): n is a, c, g, or t
  misc_feature (1404036)..(1404553): n is a, c, g, or t
  misc_feature (1408650)..(1408745): n is a, c, g, or t
  misc_feature (1413613)..(1413642): n is a, c, g, or t
  misc_feature (1418003)..(1418003): n is a, c, g, or t
  misc_feature (1422061)..(1422070): n is a, c, g, or t
  misc_feature (1435965)..(1435974): n is a, c, g, or t
  misc_feature (1436939)..(1436939): n is a, c, g, or t
  misc_feature (1442212)..(1442221): n is a, c, g, or t
  misc_feature (1466149)..(1466756): n is a, c, g, or t
  misc_feature (1488168)..(1488729): n is a, c, g, or t
  misc_feature (1489174)..(1489183): n is a, c, g, or t
  misc_feature (1494640)..(1494771): n is a, c, g, or t
  misc_feature (1495169)..(1495178): n is a, c, g, or t
  misc_feature (1496562)..(1497374): n is a, c, g, or t
  misc_feature (1501256)..(1501256): n is a, c, g, or t
  misc_feature (1519233)..(1519331): n is a, c, g, or t
  misc_feature (1530876)..(1531672): n is a, c, g, or t
  misc_feature (1539501)..(1539510): n is a, c, g, or t
  misc_feature (1550168)..(1550188): n is a, c, g, or t
  misc_feature (1559883)..(1559892): n is a, c, g, or t
  misc_feature (1560261)..(1560270): n is a, c, g, or t
  misc_feature (1560602)..(1560695): n is a, c, g, or t
  misc_feature (1568183)..(1568192): n is a, c, g, or t
  misc_feature (1575847)..(1575847): n is a, c, g, or t
  misc_feature (1580103)..(1580103): n is a, c, g, or t
  misc_feature (1581680)..(1581790): n is a, c, g, or t
  misc_feature (1582461)..(1582543): n is a, c, g, or t
  misc_feature (1598249)..(1598481): n is a, c, g, or t
  misc_feature (1615304)..(1615306): n is a, c, g, or t
  misc_feature (1620936)..(1620976): n is a, c, g, or t
  misc_feature (1622376)..(1622440): n is a, c, g, or t
  misc_feature (1623858)..(1626107): n is a, c, g, or t
  misc_feature (1639782)..(1639810): n is a, c, g, or t
  misc_feature (1657914)..(1657978): n is a, c, g, or t
  misc_feature (1658123)..(1658961): n is a, c, g, or t
  misc_feature (1662215)..(1662290): n is a, c, g, or t
  misc_feature (1662660)..(1662669): n is a, c, g, or t
  misc_feature (1666740)..(1666813): n is a, c, g, or t
  misc_feature (1671811)..(1672574): n is a, c, g, or t
  misc_feature (1673048)..(1673065): n is a, c, g, or t
  misc_feature (1674791)..(1674800): n is a, c, g, or t
  misc_feature (1675163)..(1675172): n is a, c, g, or t
  misc_feature (1678279)..(1678404): n is a, c, g, or t
  misc_feature (1678859)..(1678899): n is a, c, g, or t
  misc_feature (1684450)..(1685029): n is a, c, g, or t
  misc_feature (1690393)..(1691192): n is a, c, g, or t
  misc_feature (1698905)..(1698905): n is a, c, g, or t
  misc_feature (1713749)..(1713758): n is a, c, g, or t
  misc_feature (1714429)..(1714438): n is a, c, g, or t
  misc_feature (1721212)..(1721719): n is a, c, g, or t
  misc_feature (1722067)..(1722269): n is a, c, g, or t
  misc_feature (1733874)..(1733908): n is a, c, g, or t
  misc_feature (1743304)..(1743899): n is a, c, g, or t
  misc_feature (1744231)..(1744265): n is a, c, g, or t
  misc_feature (1748110)..(1748890): n is a, c, g, or t
  misc_feature (1759134)..(1759143): n is a, c, g, or t
  misc_feature (1762830)..(1762889): n is a, c, g, or t
  misc_feature (1771366)..(1771373): n is a, c, g, or t
  misc_feature (1775112)..(1775509): n is a, c, g, or t
  misc_feature (1782687)..(1783942): n is a, c, g, or t
  misc_feature (1792376)..(1792451): n is a, c, g, or t
  misc_feature (1802175)..(1802222): n is a, c, g, or t
  misc_feature (1803101)..(1803115): n is a, c, g, or t
  misc_feature (1804607)..(1804627): n is a, c, g, or t
  misc_feature (1807679)..(1807679): n is a, c, g, or t
  misc_feature (1815540)..(1816276): n is a, c, g, or t
  misc_feature (1816730)..(1816739): n is a, c, g, or t
  misc_feature (1831257)..(1831321): n is a, c, g, or t
  misc_feature (1840114)..(1840183): n is a, c, g, or t
  misc_feature (1841183)..(1841192): n is a, c, g, or t
  misc_feature (1853078)..(1853247): n is a, c, g, or t
  misc_feature (1866798)..(1866807): n is a, c, g, or t
  misc_feature (1867100)..(1867109): n is a, c, g, or t
  misc_feature (1867744)..(1867800): n is a, c, g, or t
  misc_feature (1868124)..(1868163): n is a, c, g, or t
  misc_feature (1872772)..(1872781): n is a, c, g, or t
  misc_feature (1876847)..(1877364): n is a, c, g, or t
  misc_feature (1880122)..(1880122): n is a, c, g, or t
  misc_feature (1885134)..(1888261): n is a, c, g, or t
  misc_feature (1908210)..(1908210): n is a, c, g, or t
  misc_feature (1917391)..(1917806): n is a, c, g, or t
  misc_feature (1938336)..(1943444): n is a, c, g, or t
  misc_feature (1943733)..(1943742): n is a, c, g, or t
  misc_feature (1965086)..(1965095): n is a, c, g, or t
  misc_feature (1965460)..(1965469): n is a, c, g, or t
  misc_feature (1972085)..(1972791): n is a, c, g, or t
  misc_feature (1973111)..(1973122): n is a, c, g, or t
  misc_feature (1974857)..(1974935): n is a, c, g, or t
  misc_feature (1975220)..(1976196): n is a, c, g, or t
  misc_feature (1977813)..(1977865): n is a, c, g, or t
  misc_feature (1978144)..(1978215): n is a, c, g, or t
  misc_feature (1988350)..(1988667): n is a, c, g, or t
  misc_feature (1992044)..(1992053): n is a, c, g, or t
  misc_feature (1992564)..(1992575): n is a, c, g, or t
  misc_feature (1993922)..(1993931): n is a, c, g, or t
  misc_feature (1998316)..(2001666): n is a, c, g, or t
  misc_feature (2007006)..(2007034): n is a, c, g, or t
  misc_feature (2022891)..(2022963): n is a, c, g, or t
  misc_feature (2023545)..(2023545): n is a, c, g, or t
  misc_feature (2030200)..(2030333): n is a, c, g, or t
  misc_feature (2033148)..(2033157): n is a, c, g, or t
  misc_feature (2033672)..(2034130): n is a, c, g, or t
  misc_feature (2040204)..(2040649): n is a, c, g, or t
  misc_feature (2040932)..(2040941): n is a, c, g, or t
  misc_feature (2043444)..(2043444): n is a, c, g, or t
  misc_feature (2044607)..(2044616): n is a, c, g, or t
  misc_feature (2044965)..(2044965): n is a, c, g, or t
  misc_feature (2045720)..(2046417): n is a, c, g, or t
  misc_feature (2048728)..(2048737): n is a, c, g, or t
  misc_feature (2054225)..(2054315): n is a, c, g, or t
  misc_feature (2055747)..(2056110): n is a, c, g, or t
  misc_feature (2060336)..(2062932): n is a, c, g, or t
  misc_feature (2064549)..(2068059): n is a, c, g, or t
  misc_feature (2071944)..(2074388): n is a, c, g, or t
  misc_feature (2077276)..(2077285): n is a, c, g, or t
  misc_feature (2077776)..(2077785): n is a, c, g, or t
  misc_feature (2079822)..(2079963): n is a, c, g, or t
  misc_feature (2099994)..(2100087): n is a, c, g, or t
  misc_feature (2101621)..(2101621): n is a, c, g, or t
  misc_feature (2111187)..(2111214): n is a, c, g, or t
  misc_feature (2128572)..(2129569): n is a, c, g, or t
  misc_feature (2129891)..(2129900): n is a, c, g, or t
  misc_feature (2136592)..(2136865): n is a, c, g, or t
  misc_feature (2137405)..(2137414): n is a, c, g, or t
  misc_feature (2142352)..(2142967): n is a, c, g, or t
  misc_feature (2152571)..(2152611): n is a, c, g, or t
  misc_feature (2162035)..(2162044): n is a, c, g, or t
  misc_feature (2162420)..(2162429): n is a, c, g, or t
  misc_feature (2168678)..(2168687): n is a, c, g, or t
  misc_feature (2168965)..(2168974): n is a, c, g, or t
  misc_feature (2170448)..(2170528): n is a, c, g, or t
  misc_feature (2172418)..(2172450): n is a, c, g, or t
  misc_feature (2175858)..(2176004): n is a, c, g, or t
  misc_feature (2176822)..(2178287): n is a, c, g, or t
  misc_feature (2183532)..(2183533): n is a, c, g, or t
  misc_feature (2192827)..(2192836): n is a, c, g, or t
  misc_feature (2193136)..(2193193): n is a, c, g, or t
  misc_feature (2226691)..(2226701): n is a, c, g, or t
  misc_feature (2228677)..(2228844): n is a, c, g, or t
  misc_feature (2230490)..(2230490): n is a, c, g, or t
  misc_feature (2236754)..(2236902): n is a, c, g, or t
  misc_feature (2237173)..(2237182): n is a, c, g, or t
  misc_feature (2242420)..(2242420): n is a, c, g, or t
  misc_feature (2244111)..(2245118): n is a, c, g, or t
  misc_feature (2258246)..(2258284): n is a, c, g, or t
  misc_feature (2262189)..(2262198): n is a, c, g, or t
  misc_feature (2262472)..(2262481): n is a, c, g, or t
  misc_feature (2266513)..(2266701): n is a, c, g, or t
  misc_feature (2272669)..(2272678): n is a, c, g, or t
  misc_feature (2298575)..(2298993): n is a, c, g, or t
  misc_feature (2299347)..(2299359): n is a, c, g, or t
  misc_feature (2307329)..(2307440): n is a, c, g, or t
  misc_feature (2307847)..(2307856): n is a, c, g, or t
  misc_feature (2308269)..(2308278): n is a, c, g, or t
  misc_feature (2323624)..(2324477): n is a, c, g, or t
  misc_feature (2335007)..(2335040): n is a, c, g, or t
  misc_feature (2350282)..(2350318): n is a, c, g, or t
  misc_feature (2369126)..(2369670): n is a, c, g, or t
  misc_feature (2381400)..(2381716): n is a, c, g, or t
  misc_feature (2392901)..(2392930): n is a, c, g, or t
  misc_feature (2402695)..(2402695): n is a, c, g, or t
  misc_feature (2411490)..(2411775): n is a, c, g, or t
  misc_feature (2431281)..(2435739): n is a, c, g, or t
  misc_feature (2445436)..(2449828): n is a, c, g, or t
  misc_feature (2452416)..(2455423): n is a, c, g, or t
  misc_feature (2461739)..(2461937): n is a, c, g, or t
  misc_feature (2466912)..(2466921): n is a, c, g, or t
  misc_feature (2473868)..(2473868): n is a, c, g, or t
  misc_feature (2476490)..(2476490): n is a, c, g, or t
  misc_feature (2486351)..(2489785): n is a, c, g, or t
  misc_feature (2490307)..(2490316): n is a, c, g, or t
  misc_feature (2494031)..(2494157): n is a, c, g, or t
  misc_feature (2496343)..(2497092): n is a, c, g, or t
  misc_feature (2504781)..(2504819): n is a, c, g, or t
  misc_feature (2513626)..(2513666): n is a, c, g, or t
  misc_feature (2514241)..(2514535): n is a, c, g, or t
  misc_feature (2515079)..(2515133): n is a, c, g, or t
ttgttaataaaagaatttaagtgacacactcattaacaaatttttcagctctatatatatttagagacaaaaatgattatttaatcaaaatataatttaatttttctcacattttaatcattacaaacataaaattataataaatacttaaaaaacaaaaaaacaaatataaatttaaacaatataataataaatataatattaattaataaatataatctatttattctccttcaatttctaatttcacattactcttagtaagtgttatctaaagttgaatgtctataaattatttttcttgtgctatttatcattctctagttttgtgttggaatatttgtctcgaatagtccctgctcacaaaagtacaaaattgatggttacatatataatactactataatagtataattaataggtgctcacaatttccagtagttcctgcttgagtatcaaactttgtaatgatacctggatagcaaaatgatgtctgaatttaatcgccaattaaatacaattaaaaaggtgtccctagattttatcaatattaagatgccctatattaattaatcaaccaagcagatttaagacgacgaagaaattttacgtacccagatctttctgctgctccgtcagaactgaatatatctgctaagaggatcacagtccaaatcctacttactaaaataccgcatctgtttaaagaattgtctgagaagttaacattaaaaaaagaaaaaaaaatattgtgcgacatttattttattcgagttaattcttattttgatcctcaaattttgagatatcgtcataaactcataatagttcttgaaattaaaaatggtaaataattttttaaaaattggatcatggagtgtgaaaactaaaggattacaagaggaattataaatgcacatggagtgtgaaaactaaaaatgatatggagataaaaaaaaaaacgtcattttatgtattgaattttttggttcaaaatgttttcaattttttataagattttttcagcaataaataactacatatatgattaacacaaaattaaattattttcctgattgaacttgtttctcgttgatcatgattttaaagcattaaatagtgaacatttaataatatgatgaaatatatgttgagataattagtatcgttatgatggtactcaagacaaaccttccatattttggtcttaaataaataaataaataattactctttaaaaaaataaaaaaataaataaaaattataagttcggtcaaatatttattgtatgtttaaaaataattcaattataaaacatcgttttataaaattctctataaaatatataatcaaatttttagataaattaattccaaaatatatttaatgtgtatttggttgttgttatttaaaaataattattttttatacaatatgaaacattactacagaatattgtcatttattaataagaaaaaatagataaattattatgagtaactccgttaatatatttgttatcaagcaaaattaaactgttagcataaacattttaattttatactaaaattgtcattcaacctaaagttttttctaaactttatcatgatcaactttcataaagcaaaagacccattttgctaaagtttctatattagagttcaccaacacctataattctattcatggaacaaaagcagtccatactatttatttcaacttcttttttttttggaaaattttattttattttataaaaaaattaatgtaatttttttttgttggaaaagcaagttaatgtaaattgtatctcattgtgttagctcatgttattaggcaatacttttttgttaccatattattgttacataatattaataaatttggtgtaattataaatagaaatagagaaaatattagaaaagctcaaaataagtagacagcctttccgttttatcaaagttgttgtaaccgcgtggcacccaaaactcaaaagaaaaggaaacgatcgatactatctgaagacctattctgctattcacgattctattgtataatcgagtgggtagttggttcagccttcaatgcatttttagaggcatattaactaaccacttcatatgctcaataagccattttgaacattgattaatatcaacagccataaggctgatccaaatgataatcgatcactccccttacttggtatttgtattgtcaactactcgtgaacttaacaagaaattaaaaaaattaacattaaaagtatcatcaagatctaaatataattgatagatagttgtaatttctttaaacactttaaaaagtattcgattctttgattgtgtgtataaaaaaaatatattaagagaagtaaaattcactttcactatctttatattttgaatatcttatttccagaaaaaagtaaaactaaccttaagttggtatgattggaactaaatttatattatttaaataaaatctaatgtttgaattttgtcaacatgaaaaaaatagttggaaaaatatgggagtacttttattagtatatatcagtaactaatattaattaaaatatcatcttataagagatgaaaatataaaaggaaattaatgtcttatatatatataaataacaattttataaataaagtaattttgtatttttctcttataacatcataaaaaccaataacataccataagatacaaaaccaattaataatcctaatatcttcaaaactacacaagccccaaagaggttcatttgtcttctatcctgatataagtccaaggtctgtgccttttttcacctctatattttttcccttttatttggaatatctgcatatagtatattcctctttggctaatgtcataactacttaaactatcttctgaacgatcgaccaaatattttaaaaagataattaaaataaataaatgcatttagcttaaaatatttaaagagattagtttttattcatcattattgtaaaaaaaatgataccatcaaatactcaaaaccctcttatatataacttttaaataattattataaaaattaacaaatttattgtacataataatatgtaattagattagtttaaactgtgaaatgtattctaattaaatttgtattcagaacataagaatttaatttgcataaaattttagtgtaatttttttttataatatcaacatcaaattatgttaaatattacttttaaaatagttattataaaaactaaggaaattataatacacggcgatcatatagtataaaaaacattgtatcgagctttaaaaaaacattgtattctaatttggatttaattcaaaatacaaaaatatctaataattaattaagagtgcaattagaaagattggttataagaatataaaactattccgcctccttgtgaacaactttttggttgtgtataaattggagttgtttgccaagtgtttcatttgtagttgagtagacggagcagagtgtccagggcagtttacaaagccaaattttgttccttagttgtttccttgttctctgtcactgatggctgattattcagcagaaactgaatatcgcgaggtagttgtaaatgtaaccaaggacacctccaaaacaacggaatactcagactcctttgtctctgttcctttcttgcagaaggtgtctcctaatcttccttttgtaccccaaaaaccattaaaagtgctcttattacaatttaatagatataatggattgctatctctgctagaatctgctttccttttttgtgtgtgtatatttagtttctttctgaattaatctatttactatattaataagggtggttgagcaggaaatatgatatttcctttagtgttatgtagagttcaagtagcaggtggggtgtcaactttgttgggattccgtatgctattttgagactcctgcatgccacctcttttgattacaaaaaatgtgattcaacagaatgcgtgaattgttgtatatatacttgtcttcgattttcttacagataaaaaaaaattattgaactagaagaattgagagtggaaatgacaatatcatggttttgtttgttgatggatacagttggtagctgaggtggtgggaacatatttcttgatatttgcagggtgtggttcagtggtggtgaataagaacaacgacaacgtggtaacacttcctgggatagcaattgcttgggggctggttgtcacagtgttggtttacactgttggtcacatctctggtgcccatttcaatcctgctgtcaccattgcttttgcttccaccagaaggttccccttgatgcaggtaattgacccttataacctttttcttaacttggttgatctataaataggtaaatgtgcccatttggaatattgtcattttccttcttaaattgttatctccagcaaccccacaaggaagatggatgtctttaaagcccaattatgttagaactgaaattatgagatgccataccatataccaaaaatctaaattatgaaagtaactcctaacttcatgatcgttgccaaaacaaagttgcctctttgcacatgcatataaagctagctaagatatttcatattcacaggaaaaaaaattctactatgaagttgttttaaaattatgtgttcgggcatgtgatttaaattgcaattaattactgttgttaattatgtaggtaccagcttatgtagcagctcaactcataggaagcacacttgcaagtggaactctgaaactattatttatggggaagcatgaccagttttcaggaacactcccaaatgggactaacctgcaagcttttgtgtttgaattcataatcacctttctccttatgtttgtcatatccggggttgccacagataacagagcggtaacgtctctcacattactccctctgcttaaatttgtagatagtagtactttcttatgagatttgggcaccttattgataaagtttgttaaaccagagacaatactaattcatactttatttattaactaaattacactcaatctggttggactcaatgaaaaattttacatgtacgccctttttttctaaacactcatttgacacattcactcaaaggggttagatcatctgttatcaagctgataaataaggtggagagtgtgcacaggggtattcttgagtgagaggtttctgacttgaatcctggtgaaaaaacaaactttggaaatgggatgaataattgatacaagcccttacatgattacctctaagaaagaaaacctgtggacaacatctaaataaaattcatttaacacattttatctctttatttttcttattattacatcacatctctttttacatttattatttctctatttttttttttatctccctataatgggcatatgggttgcaccaaatattaccctaatcaaataattttttttaatccagagacaatatattaatccatagcttacttataatattggaaattataattaaaaaaagtaaataaacgaatttaaacatgatataatatttaatgttgtttagttcatacaataaatatctttttttacggaaaacaaatatcctaaaataatggcctgtagtgttttttttttttctttctaaaggtttcaaaccaatttgactggtttttttgacggtgctttgaaccgttgttttgagtcatgtaaattgaatacttaattggatcgttcatttttttagtgacacgaagaaatggagagaggcatggcaacactgaggttaatggttgacctttcatgatgatatttttgaacataaaaaacttacactcttcttatactaattttaatagtaaaataatgtaaattttttaaaattgttcttacgtaacttcttttctacataatgattcgacaaaaaatgcacaatctaagtcggctaaacgtatatttaggtctaaaatgaaatttaagatgatttttttaaattactttaaatacatttttaaaattagtattatacccatttttatttataagactacctaaattaaaaatgatatttgttcttttttggtttattgcataccctttttttaaaatttttgcctaattttatctcaacaaattaatctgacatattttatcctaactttttagaaacttgagaattttatcttccattattttattcctaacataactacactttttacttccttttttttgacaaattttacacctaatttttgtatttttgacaaattttattccaaatttgggcaaattttacttccaacttttggtttataattcgataannnnnnnnnnnnnnnnnnnnnnnnnnnnnnnnnnnnnnnnnnnnnnnnnnnnnnnnnnnnnnnnnnnnnnnnnnnnnnnnnnnnnnnntttttttttttttttttatattgcattttaagaaatacaataaaatatgtatatataaattgtgtaaaactattttttaaactatcataaaataaaccagtattttaatataattttttatacgtgtttaatatgtataagaaaacatatgcttatttatgtatacctatataaatactacattaataaaattaaatattataataatacttattttcaagtttaatattatattcgtttctttttatataggaaataaattataatgtattttacaaaatgtaacttgtttctataggaacaaaggtaataatataatagagaaaaaatatatactatattaacatatattacaaaaattctattataaaatatatttatttagtttttaatacctatannnnnnnnnnaaatatccctaattaaaaaagagagaaattgtatagataaacattcagaatggagatattaatgaaaatgatattttttgaaaaaaagaatctaaatataagcaaatttaactaacttatatgaaaattaagaaagttgattattttcatttaatttttctaatgacatttaaagaataatctttattttttaaagtgtctttcattagaacttgatattataatcacaattagttgaagaatttttatggaatgctatcattaaatagagtcaaagtagttaaattttacgtatatttaagtctagaaatattgttccttatatttaggtatatagatagtataatttaagataaatttatttttattaactaaattaatcagtttcttttaatgataattgggtcttcaaataggtagtatgatttttttcttcataatttaagatagaaatgtttattaaaataattatagaaacttatatattaacaattagtaatatttttaagaacttatatatttttaaaataattataaaatcacgagacttatgaaatactgcgacttaaagtaagggctattggtgtttgatcctagaataatgccctgtacacaatgtttaggtaccatttttttattttaatatttaattacaggagacggctactttgtgagactagattatggtaggggaaaggcttctcttgtttttcatttctacaatgattacgcattaattacatgcctttatgtactttttttttaatatttcacatagctgcctataatattttgttgcaaaatatatattccaaattaaagttcacacatctgtctattttcatttgaaagtatcatccgcccaatgcattgttgccaagttagaacttgtanacttccaatgtttagcaaattaggctttacatattaaaaaaaaaaaaagaagagaaattggtactacctaatttgtatcgttttgaatcgcttgcaagaatcctagaagtttacgttacgaggcatatctcatgagaatcaataatccatccacgaaatattcttcttagactcctttatttattaacttgagtttaaaattgtgcaggttggtgagttggctgggattgcaattgggtctacaatactgcttaatgtgatgattggagggtaatactaattattaaccaatccaaatcttaattagatgcaaaatcagcattgttggagttgtaggacataatattcttgtgaatggttatcatatttggcaggccagtcacaggagcatcaatgaacccagttagaagcctaggacctgctattgtacacggcgaatacagaggaatatggatatatttggtggcaccggttgtgggggccatagctggagcattggtatacaacaccattaggtacacggacaagccattgcgagaaatcaccaagagtgtctctttcgtcaaaggccatgatagctccaaataatttaagcaaatgcaaatggactaatgttagggaaaaagttacatcaacaccttaacatccattgaatacctagaggaagaaaaacaatataagcataatagggtctataatctcagatatgtttagataaatttctttagaaacacttttaaaagaagaaaataagaagaaaaaaataaaataaattttttcataagcaaaaataagttctcaattagttaatttttagaagttcatcactataacttctctaaaagatgagatgacatctacaaatgagctaataaaaaacttattttagcttatggagaaactcattttattttttcttcttctagaaatacttataaagaaacttatatccaagtagacccccgtaataggaaatataaaaaatgaaaaatattggtgaagtgtttaaaattataggatgtttatatataataactcttaacgttatcctcagctgtggtgtggagagtcaataacttcttccttgtaattgtctttgttacaaataataattagaagaaaaaaaattatgcatgaagttactcaaagaaactacgctatgatttttcatgtccttgttatattaaaggtcatgcacttgaatatcatcaccctctttttcctctttatttcgataaataaaagttgatttttgatatatattgttggtggatcttgaagctttgtggaccaagctagttttatttcttgtatgtgagttatgaggagttgaaggcacaagtttatgggctttgttgattcgggtttgagtttaattttgtactatagtgaaccctttgtaaagggatatgcaattggttaatttggtcaatttttcaaaattttaatttttcataacttttccccacttcatcagcccattgaattatgtgatatatatccactgttgtaaggatttggagcattcgtattcaccttagaaaataaggtgcatgtcatgttaggcagaatccataaagacgtggcattaaataattgactttttgaggtctgtagacggtggatagactcggatactgcgataataatatattaatcacataattacatatttttttaaaatcaaacaaaaaaagttaaggttcggtctgttaagagttttgataagtaaaaataagtacatggtaatccatttatatgtctactatacttgtctagtgattagttacatttataagtcgtttaacagatatgatcaaaattagtagattgttttacactttctcataatttacatattaaataatttttccttttaatttcttaataaatatcctaataacactaattaaaaaaccctatttttgaaagctaaaagcacagtcattttggaatggtggaaatattattattattattagtggctaaactatgcttccccacgtgtatagtcgtcatcgctccaaccgcgtcatcatataaaattataaatagttcacattcgactttagtttatttacttcttcactgtcggaaacagttttcctcgttcatttattagctgttctcttcgtttttctgccgacaatggatgagaattcagcaacaaatggaacccatgaggtggttttagatgtaaacaaggatgtctctagaacaactcatgcttcacgctcttgtgtcaatgtttctttcttgcagaaggtgtgtccttatcttttatttttttttttgtgtgcccaatcatatgagatttgattagatgaaatgtattggtatctctgctagaatcttatattttttattgttgtgaaacgctacagtgcatatagtctctttctgaattaatctattgaccatattgaacttgaaaaaatgagattagaaaagacaatatcatggttttgtatgttggtggatacagttggtagctgaggtggtaggcacgtatttcttgatatttgcagggtgtgcttcagtggtggtgaacaagaacaacaacaacgttgtaacacttcctgggatatcaattgtttggggactggttgtgatggtgctggtttactctgttggtcacatctctggtgcccatttcaatccttctgtcaccattgcttttgcctccaccaaaaggtttcccttgaagcaggtgaaccaaccacaaattttttttttccttcaacattgatttttggttcaagtaggtaggaaaattagaggtcaaattagtttatcatgattgaaagagaaattttgtttatattgtattttcacacaacttaattttaacaaataaataaaagagagataagaagaaaaaacaaagaaatgtgaaataagatggatgatgtaagggagagaattattgagaaaagaatgtgttgtatacttatattgcatgtataaatataatatctcaaattaaaatacttatttgccttgacctttttacactagtttataattggtaaacaaaacgcgtgttgaacataggtagcaagaaaaataatggaattagagaaagccttagtcctctttcactacatccaattgtctcattttatcttgaaattattggcatattcacggtgatataactatcaaccatttagcattgtaggttccagtttatgtggtggctcaggttgttggatccacacttgcaagtgggactctcagactattatttagtggcaaggatgcccagttttctggaacacttccatctgggtccaacctgcaagcttttgtgattgaattcttaataacctttttccttatgtttgtcgtatccggggttgccactgataacagagcggtaaagtttcttattccatcattaaattttgtttttttgtttgtttggttacaattagcttttattttctataaaaaaatttattaacacgtgtctagccaaattggctatggctaatcacctcctaaattctgacataaaaaatggagtacataaattgactagttgtctacatatattcgtagcgttttggatcacttggaagaatgctacaagtttatatcacacgagacatcttatacgaaacaaaaatccatataacatatttgaatatttgtctttcttggacctcaattccatggatttcatttatttattttatttggaaatcttgcagatcggtgagttggccgggattgccgttgggtccactgtgctgttgaatgtgatgtttgcagggtattattatcttacccaaagataattaaatacaagtgtaggcacacacattatgacatttaaaacattacattatttattcaaagatgttacaccttttggaagcaaaatagaggtcaaagtatgatctcatttgcgtgattgaatattattggtgtgtataattgttgaactaaattgacaatacttactacattatgttagttattatgtaactatatcttgttaaacataagatatgcgaattgttgtaaatctatttgtttcttttacgtacgaataaaagaatatattatgtaactaatgacatggtttcatatacgacaggccaatcacaggagcatcaatgaacccagcaagaagcatagggccagcgattgtacacaacgaataccgaggaatatggatatatttagtgtctccaactcttggggctgtggctggcgcatgggtctacaatagtattcgttacacggacaagccactgcgtgagatcaccaagagtgcctctttccttaaaggagtagggcatagtggaagctctacgtgatttaaccaaattatgctagaaattaaggtgtatttatgtctcatttacagaggagtaacttcatttggaaagtagttgtctccaaaatttattactactttatcatgtatcagggtcaaagtagaaggaagaaatcaaaatttctagtatatttgtaacttcattagtatattgttgcaaacacatccacagaaatcaaaatttcatctctttgtttttcactttattaagtttatattcatataatcactggattttaggccccataccttgcacagttttttatttttttatttttttttatatatattgcattttaagaaatacaataaaatatgtatatataaatagtgtaaaactattttttaaactataataaaannnnnnnnnnaaattgttcttacgtaacttcttttctacataatgattcgacaaaaaatgcacaatctaagtccgctaaacgtatatttaggtctaaattgaaatttaagatgattttttaaaattactttaaatacttttttaaaattagtattatacccatttctatttataagactacctaaattaaaaatgatatttgttcttttttggtttattgcatatcctttttttaaatttttggctaattatatctcaacaaattaatctgacatattttatcctaacttttagaaacttgagaattttattctccatcattttactcctaacataattacactttttactcccttttttttgacaaattttacatttaatttttttatttttgacaaattttattccaaatttgggaaaattttacttccaacttttgtgtttatgattggataaatgatgaaagataaaattcataagtttcttaaaatttgaaaataaaatacatcaaattaattttttggataaaattcataagttaaaatgttgggactaaaagaatacaattaagnnnnnnnnnnatatatactatattaacatatattaccaaaattctattataaaatatgtttatgtactttttaatacctataataaaatataagtataaacacccaatttcattcggacaatgaaaaataaaaatgtaaattataagaaaaattcaaacaaaaataaaaacagaaaaaaaagaaacgagtataataataataaataaataaataaaaataaacgaaaatcatcatttttcttgatctaataatatccattataaaaatgttgaatttaaaaattttaaattatataataaaattttagaaaatcattctatgaacatgaataaataaactattaatttcagttttggttaaacacattgtctgattttcttttgaaataaaattaaggatcgttgacaagtaaaaaaagataataacaaagacaagtaaattaatgatatggacatagatttggccaatttacattacaattagaaatgtacatactaatttggaaaggaaatttaataaataatattgggaactgggaaggaaaaaagaattgaagttaggatgcctcactaaacaagatatacatgtcagaaagtgctaggttatattattagacggaaaaaaatctcccattattgtcacgatgccttgggaaagaaactagtctccttaatttggggcctgaagattattttgggtaccggtaacacgagcagcaccactgctttgcctggttcttggaataattataggcaaacaacacactagaacgagtagtgactccattatgaaagccatcattgtgatccatacaaatatgcaaatcttccaatgccatataatcctcttgaataagggaagttctgattcaataaccactgatgaatcataaatttgaggaatgccggcaccaggtgaatattctgctcgctgctcaagtgttacttttaagcatgaagtaggtacatccccttcaacaaaacctctcatcttgacattcagtgtctgggtttctgatatatagccagtgacaagtggtacaatcttgaggaatgtcgtgattaggcggataggctcacttgtgaattttaacatgcaaggttgatttgaactccaaattgttttgccatcagaagacaagaagtctaccctgatctatagagctcaaaacaaagcaacaggaaactatgaactttaattatcatcatactaatagttcagattctttaagcagaatgatacaagtacaagaaaatggcaattttaacagagtgcaaatcatgagaggaaacataatcatggaaattttaacaaaagaagtataattgatctccttctttgcctaataaatctaactatcctcttaaagcactcacaccacaatgataggaaacatagtacatagacaaataaaagaaccattctagttaaaagttttagcttttatgtaaaggccagctaagtgtcttagtcgtgacacttggcgtatattgcataagagggttgtgctgataactctaccctgttgtcatccattaaaatttaacaattagataaaggaaccaggaattaaactctcttagccagttcaattccttccaaatgagtttaatggctgacaaatcgttccaataactgcttgagctacaattgcacggccacagtaaaagctattgaacccctaattcatgatattctagaatcatgttttcatcatttcttctaaccaaactccaacaatactcaaataaagcaaatataaagatattgagagttaaaactagcaccaacttgccactcaaaccctttaaagtcgtacgctagtgagtagtgaccacaaatagcccatccaccatcaaaggtccttatgctaacatagtaacattacatatttacacattaatattagaactagtaaaacatcatgcaagcagttcatgtcattttctggattaaaatgactgagataagtcttaagtacctgaaagatgccaagatttgtgttgtattctgactccggcacaaccaatgaaacagtgacgtgtaccttttggttagcaggtataacccttctacccatccactctctaacagcaatgcccttctcagaatcatgcgcacccccaacaccatcacaagacatcacaggcacaaatgcaacaggactctgcttggtgtaatcaaagttcaaaacctgcctcatctgaaacggctcctccaccaaacacctcaccaaaaacccactcaccacaagtgaagaaaccaaaagaccaaacaaaatgcaacaaatatacattgaccacaagaatccccacccacacctaaatgcaacattccacaaagatttgtgctctttgaaccacccttgagctgaagaaccaatgcacccaaaaacaaaacaccaaactttacccaaaatcaccaccaaaagacctttcccctttctaattgttccaaaagggtccacgaaaaacaaaaaagcgtgtaacataaaccacactgggaatttcattaagacaacgaaaatattgatttgaaacacaattgacctaatcaccaaccccgttacataatcgagcaaattcaaaggggagttactgaattccaccgccgagtcaacggaatcggtgacgccgtcttcgttctcggcggtggttaacgtcgattcctcgttcccctcttcggtggcaacgcttggagatggaatgggaataactttctctcgatttgaatcgcatttctcggggaaattctcgtttccgtttgaagttccgagatttggatcgctccgatggttcgtgacgtttccggtggtcgaatagtcgttggaaccggtattcgtggtctccctaaccggtgagttacggagggttgaacggcggcggattgtgatcgccggaggtggggagggtgggttggggtcggagagaattgaagaagaggcggaagattccagcgatttatcggcggcgccggagcaatggtggaaggggcagtgaggaagcgcgtcgaggaaaacgtcgtcgttttggtcgtttgggcctgaaaacgatgagtccattgaagatgacgtgattggatattgaacttccgaggctggttcattttgaagccacaaaattgagaattttttgctttctcaaaaaggaaagtatattttcgaagaaaaaaaattatattccaaaacaatacacacaagtttgtggtataaaataattacatggtttttcgtcacaaaagttaatttacaacattaaattttcttaaaagaaagaagcatatattcattcatcactttgaaaataaaaaccaataagatatgttattttcatcaccattagcattttttgtaattttttttaggatattttttgtcattctttaaatgataacactttatatttcttttttttgttaggtgaagaatgaacatttagcttgaatatttttctctccttttatgatgattcattgttttagattttgtagtgttattatgatagacgcaaatttttagtgttaattttcatagattgttatcatattttggtctttagaataatattaagacattcaagtattatgagatgtatggtgaataagattttttgcattctcctaaaaaaagttttttgcattaaagagtaaagtttcacatgaaaaaatgatttaaaatactttttatattcgaatttggggatgttgcatgctggaaacattaatcacaccatggttatgtttatagaaatttatgttctcatgcacatgatttacattttgattatcgtaaatcttatgcccctacaaatattttttttttgtctttcccatattattattcaatctttaaatcttagtttaattaatgctcctaaaaatgatcaagcctggtgcacttttagcctctaagctctttgcaatttctttttctttatagccactgtctgcatctctgcacagaatcctttgcattattcttgcataattaatgaagcatcattcaataactcctcgtggattctccttaaaagaactttcatggtcattgttgttctcctccgatccttcacattggttgtttcctccaaccattattagtatatgtttcacctctatatataaagggaacttcagctaacatatgacatccattgtcctcatcatattttgcaataacaataaagtgaactttgataccatattataatttgaaaaaatgatacaaatgatatcattttcgcgtgtccacttatcataaagattaaagcaggggagagaaattttataaatatgaaaatgtgattaatataaaaaatatttgagtttcatatttatttgttcacattatctttctatttattatttttcattacaaaagtttgtcaaattaataacatgagagttcatataatattattacacgttaaaaatatggatatatggtgctataatactaaagagtcctatttaacaaattcagaattgaactaaataaagttgcatgtaatagataacaagtatagtatagatttctgaaacgtacaattttttttttatacattttttacaagtaattccaaaatctgagttgttttttcccctctaaatattgataattcctgttggaatatgagcctaatcaactagagtcaatttaatggtccagagtttggagatatattattatatatatcaatataggaggatcggaatatttctccaacattatgtgatataatatatatatatatatatatatatatatatatatattcctttctgatttcatttaaggagttttgagaaacattttcctactaaataaaagctgatgataactaatgacttttaatttcaatttttctgccccaatttcatcgtacatgtagccctcgaagtattatgacaagaaggtacgtagttgtaaaccaggttaccgctaacacctacttatcaattacaaaggataagcataccaagtgttaattccctagctaattaacacaatgtatcatttcactttcgaattcagcattccttcgatgtaggaatttcagcctaaattaaccaagctagcctccctcgtaaagcctcattcctgcaaaataaacgatgcctaggatggttaattaattcttaattggtttcatctatagatatcattcaatcattttgtttactccccagcaatataatcctattaaagacatcacatgtacaaattcacttttattaattataaattactgttgtcctttggaggaatattgaaatatatataagagataaaagtaatctgttccccatctcatcgaaaataacaaaaggtgaacactaaagccnnnnnnnnnnnnnnnnnnnnatatatatatatatatatatatatatatatatatatatatatatatatacatctcaagacgggtaatataatcatttgcaattcattcatgactattaattaataatattattaaccatatggaagatgtaacaccctaactaattttatttaattaattaattatttgcttattttaaattttattattttattcttttgagggaaaatataaattgagataagaacaagaaaaactaaaattttacaagaaacgtgtattagtacaaaaattcttcgttataaaatttacaaaatatgaagattgatacattagtccatgtctctgatataaacatacaagtacaaatctcttttccaaaatccagcctagtacaatgcttcttcaatatatcgatactactccagccttaagaaatctgaccatcatttccatctaaaaacataaaataaatctagtgagaaataaatttctcagtaggcaaatttaaaccaccaaacatgttagaaggttagtaaataaagcaaatttgattcaacatacactttagcagattagtaaataactcaatatatctgaatgaatgcatgaatgtatgaatgcatggaaatgaatgcaatggccacaggtgcacatggtatctacatatcgtactgtatgtagctacatctcgtactgaatgtagacgctgcgatcgtcttacacaaacatgcatgaatttccatgtattagcacctgatctcttgaagtagcataggcccggttgtcacactcgggtcattcttaaaatcataacataggcccggtgttcacaactcgggtcaatctcataaaatcataggtccgatctttgaaaaccagatcaatctcaataattcataatataagaaatgtattattttccttccataaagtatgttagttaaccttcagtaaaagcataccaactagaatttatttgaaatttttacaaactatgtccggattctgagtttatggtatccgtgttcaggatgtccgggttccggatatatggtgtccgggttccgggtacaaggtgtccgggttccgggtacaaggtgtccaggttccgggtacaaggtgtccaggttccgggtaaaaggtgtccgggttctgggtacaaggtgtccgggtttcgggtacaaggtgtccgggttccgggtacagggtgtccgggttccgggtacaaggtgtccgagttccgggtacaaggtgtccgggttctgagtatatggtgtccgggttctgggtacatggtgtccgggttccgtgtacatggtgtccgggtacaagatgtccgggtacatggtgcccgggtacaaggtgtccgggtacatggtgtcagggttccgggtacatggtgtctgggtacaagatgtccgggtacatggcgtcagggttccgggtacatggtgtccgggttccgggtataaggtgttagggttccgggtacatggtgtccgggtataaggtgtccgggtacatggtgtccgggtatatggtgtcagggttccgggtacaaggtgtccgggtacaagatgtccgggtacagggttccgagtacatggtgtccgggtacatggtgtccgggtacaaggtgttcgggtacatggtgtccgggtacaaggtgtccgggtacatggtgtccgggttctgggtacatggtgtcagggttccgggtacaaggtgtccgggtacaagaattaaaattattaaattcctaaattagagattaaagcctagcctacctgtgaaaattgtaatggattgcttagagaactgccgggattattttaagagaaaaggattttacgtaaaagaaagtgtttgagaaagtttaggaagagagtgaaagctgaaagtgtttgtatgtagattttcggtgcagagagtttgaatcttccaggctatttatagtgcttgatttagttaggattaaaagggatttggttggaaagaaacttagttactagaaaatatctagattttcttatgtaagtcatcattactaatattctcttcataaatggtagatgcaacgtggaaaactactgaagcttgttcctgcttatttattttgcctaatgccatctggaaaggtcataagaaaaatgtgcacaaatatttggatagattaggaaaaaaaattgctacgtggctggaggctttatttcagtttaaaaattttcctttattcttttttaaagcctatcaatcagaaacaaaaatatatttttgtgaatgttacaatatggatatccaagaggatttttctagtgattttggacttagctgaaattttcacgtggtcaaagactcaatttttggatgctaaaatttgtccttaaaaattatattttattattataatttagatcatgaatatttatataattatttgaggattttacatttcatccctcctaaaaaaaattttgccctcaaaatttagtaaatacctgtaaataaatccggatacttcttcctcatctctgactctaattcccaggtaggttcttccaaacgtccttgtccccatgctacttttaccaatgatacagacttatttcttagttgttttatttttctatccaaaattcttgtcgggggtaagctcatagttaaattttcttttaactgtattgattcagattctagaacatgacttgggtcggaaatatatttacgaagttgtgagacatgaaaaacattgtgaaggttggaaagatttggtggtaaggctatttggtaggctattgtacctattcttttcagaatttggaaaggaccaataaaacgaggactcaactttttgaccttcattgctcgtcctattccggtaactggagtaactttgagaaaaacatgttctccttcttgaaattctaaaggttttcttcttttatcagcataatgtttttgcctattctgagctgtcactaatttttctctaatcttcttgatttgctccgtggtttgagttaccaagtctggacccaaaagacttacttccccggattcataccaacataaaggagattgacatttcctaccatacagagcttcaaatggagccattcctatactagtatgataactattattataaacaaactctactaatggcaaatatttctcccaagaaccttgttggtctatcgcacaagctcttaacatgtcttctaaggtttgtattgttctttcagtttgtccatctgtttggggatgataagcagtacttaagcatagcttggtcccaaatgctttttgtaatgcttcccaaaatcgagaagtaaagcgggggtctctatcagaaatcagggtggaaggtacaccatgtaatctaactatttcttgtatgtacaagtgagctaatctttccaatgaataagaaatcctaatgggtataaaatgagctgacttagtgagtctatctacaatgacccagattgagtcatgtccggaaacagttctaggtaatcctaccacaaaatccatctatatacttttccatttccattgaggaatttctaaaggttgtaaggtgccaaaaggtttttgatgttctatttttactttttgacatactaggcatctttctacaaattttgctatatcctttttcatgctaggccaccaaaacattcttcttaaatcttggctcatcttagtaactccaggatgtattgtaaaattacttttgtgagcttcactcaaaattttctctcttaatccatcactttgggtacacatatcctcttttgataagtccacaatccatcattatttacctcaaaatcttgcaattttccttcttggacttgtgttaaaatttgttgaaaatctaaatctctctgctgttctagcctaatgtgttctttgaaatcactagtaatttgtatttgactcaaaatgatacttttagaattaacagaaaatcctaaattaagatttttaaaattttctatcaattccatttccttgatcatcattctagatacatgcagagatttcctacttaatgcatcagctactacatttgcctttcctggatggtattttaactcaaaatcataatccttaagaaattcaacccatcttctctgcctcatattcaactctttttggtcaaaaaggtacttgagactcttatgatctgaaaagacttcaaatcttactccatacaaataatgtctccagatttttagggcaaaaactactgctgctaattctaaatcatgggttggatagttagcttcatggggtcttaactgcctagatgcatatgctaccacatttccattttgcattaacacacagcctaaacctttcttggaagcatcacaatatacttcaaatgtaccatgagggtctggtaatactaatactggagtactagtcaaccttttccttaattctagaaaacttttctcacattctggtgaccatacaaaaggcacgtttttcctagttaagctagtaagaggtaaagctatttgtgaaaatcctttaataaatctcctatagtaaccagctagtcctagaaaactcctaatctcagttactgtggttggtctttcccaattcatgactgtttcaattttactgggatccactgcaattccttctttagaaacaacatgacccaaaaattttacttctttggcccaaaattcacacttagataacttagcatacaatttcctttctctaagggtttgtagtactattctaagatgttcctcatgttctttttctgactttgaataaaccaatatatcatctataaagattattacaaacttatctaaataaggcctaaatattctattcatgaaatccataaaaactgctggagcattagttaatccaaaagacatcactacatactcataatgctcgtatctagttctaaatgcagttttaggaatatcctcattcttaactctaatctgatggtatcctgatctaagatctatttttgaaaataccactgctcctctcaattgatccataagatcatcaatcctaggcaatggatacttattttttatggttatcttattaagctgcctataatctacacaaagtctcattcctccatctttctttttcactaacaaaactggagctccccagggtgaaacactgggtctgatgaatttcttttccaataattcctctaattgctttttcaattcttccaattctaaaggggacatcctataaggtgccatggatattggtccagatccaggaattaagtcaatagagaattctatttccctttctggaggtattcctggtatttcatccggaaacacatctgggtattctcttaccacaggtattttagagagttcatcagttgactcagttacattagctgataaaagaacatacccttgaatttcattgttactagaacaggagataatggagttcacatacagacactgggtttgactgttttctgagatttctgaaggtaaaacaatggttttattcgaacagtctaacaacacatggttagctgcaagccaatccatacccaaaatcacactaaacccagtcaaaggaagacaaatcaaatttacagaaaaagatttatgatcaatttgaaaatcacaattaaaacaaatttgactagtagtaataggtttagttgtaggggtagaaactaagagatcataaggtaattgagacaagggtaattctaattgtacagcagtgtcataagaaataaaagagtgagtagcacctgaatcatataatacagttaaaattttgtctttaattatgcacttaccttcgatgagatattcagattgagaagcctccgctgcattcattgtaaaaacctttctagtatgctgaggacgtgtggtgccttgggaattttcagctctataattattagcataatgtcccatctttccacatctaaaacattgaacattgttgcgattgcgacaatcctttgccaaatgtcctatctttccacatcgggaacaagtaatctgagctatagggcatgacctgtttccatggttcttgtgacatttttcacactccctgcttgaactttgccctgtctgaaatttctgctgctgaaacttattcttaaatttaaatgactggggtcccaatttcttcctaaaattattacttaattctcttttctcagcagacctccttttatactcttctattattctacacttatttattaaggtaccaaactccctaatttctaggggtccaactacctctaacaggtcttctcttaatccgccttcaaactttatacatttccagtgctcatcagggttctgttgatagatagttgagaatttaattaactcttcaaacttagcaatatattcagtcacactacttcttccctgttcaagcctaagaaattcaagttccttagaattcctcactgacacaggaaagtacttatcaaagaatgttgttttaaatacctcccaggtaatttctatttcattacttattagaatttgcttgtggctattccaccaatactcggcattagattgtaacatgtacgtagcataggttactttttgttggtcaaaacaatctaacacagtaaatattttttctatttctttaatctattcttcagccacatatggattaaaggctcccttaaaaactggggggttagattttctaaattcaacaaacttatgatattctgtatcagtctcctacctcccatggtttatttgactagaactattatgattgttgttattttggcttaattgcatcatcatttgggtagctgcggctgcttgttgacttgctgtggttgcctgctcttgcataactgctagcatagcatgaagaatatttgtttcttcttcattgccactagttggtgttgtttcacttggacttcgcgaagccatgaattcctattcacttcacaaaaatattgaggtgatcaggctcaatatagagtaaagtgcgttagaattcaataatcacaaatattaacacacaaacaattagaatcaaacagacaatcaaagcacacagaaaaacatagtcagtccatttccctcaggacctaacaagatgaactgctctgataccaaactgtaacatcctaactaattttatttaattaattaattatttgcttattttaaattttattattttatccttttgagggaaaatataaattgagataagaacaaggaaaactaaaattttacaagaaacgtgtattagtacataaattcttcgttataaaatttacaaaatatgaaggactgatacattagtccatgtctctgatataaacatacaagtacaaatctcttttccaaaattcagcctagtacaatgcttcttcaatatatcgatactactccagccttaagaaatctgaccatcatttccatctaaaaacataaaataaatctagtgagaaataaatttctcagtaggcaaatctaaaccaccaaacacgttagaaggttagtaaataaagcaaatttgattcaacatacactttagcagattagtaaataactcaatatatctgaatgaatgcatgaatgtatgaatgcatggaaatgaatgcaatggccacaggtgcacatggtatctacatatcgtactgtatgtagctacatctcgtactggatgtagacgctgtgatcgtcttacgcaaacatgcatgaatttccatgtattagcacctgatctcttgaagtagcataggcccggttgtcacactcgggtcattcttaaaatcataacataggcccggtgttcacaactcgggtcaatctcataaaatcataggtctgatctttgaaaaccagatcaatctcaataattcataatataagaaatgtattattttccttccataaagtatggtagttaaccttcagtaaaagcataccaactagaatttatttgaaatttttacaaactatgtccggattctgagtttatggtatccgtgttcaggatgtccgggttccggatatatggtgtccgagttccgggtacaaggtgtccgggttccgggtacagggtgtccgggttccgggtacaaggtgtccgggttctgggtacaaggtgtccgggttccgggtacaaggtgttcaggttcccggtacagggtgtccgggttccggatacaaggtgtccgagttccgggtacaaggtgtccgggttctgagtatatggtgtgcgggttccgggtacatggtgttcgggtacatggtgtcagggttccgggtacatggtgtacgggtacaaggtgtccgggtacatggtgtcagggttccgggtacatggtgttcgggtacatggtgtcagggttccgggtacatggtgtccgggtataaggtgtcagggttctgggtacatggtgtccgggtataaggtgtctgggtacatggtgtccgggtacatggtgtcagggttccgggtacaaggtgtccgggtacaagaattaaaattattaaattcctaaattagagattaaagcctatcctacctgtgaaaattgtaatagattgcttagagaactgccaggattattttaagagaaaaggattttacgtaaaagaaagtgtttgagaaaatttaggaagagagtgaaagctgaaagtgtttgtatgtagattttcggtgcagagagtttgaatcttccaggctatttatagtgcttgatttagttaggatgaaaagggatttggttggaaagaaacttagttactagaaaatatctagattttcttatgtaaatcatcattactaatattctcttcataaatggtagatgcaacgtggaaaactactgaagcttgttcctgcttatttattttgcctaatgccatctggaaaggtcataagaaaaatgtgcacaaatatttggatagattaggaaaaaaaattgctacgtggctggaggctttatttcagtttaaaaattttcctttattctntttttaaagcctatcaatcagaaacaaaaatatatttttgtgaatgttacaatatggatatccaagaggatttttctagtgattttggacttagctgaaactttcacgtggttaaagactccatttttggatgctaaaatttgtccttaaaaattatattttattattataatttagatcatgaatatttatataattatttgaggattttacagatgaaacaagctcaatgctgttaactgtaagccattaaccagaaattcacccatcaaactattttcaactaaaacagcatacagttttgatgtaattcaagttgcaaaataacgagtcccagaatgaatacataaataggactgtatgttaagagaaaacagtgggtgcttggttattcaagtattgccaagtcataaaaaaaaaaaaaaaactacttaccccattgtcggaacgttatgcgtaggtaaaggagagtgaaattgtacgcagccttacccttacatatgcaaataagttttttccggattcgaatccatgactaacaagttatcaagtcaccaagatacaattacgtgccaagtcataaataagaaaatcttttaaatgctaacgatcaaaatgcgtgcgataaagataataattcatgctattaatttcatcaaactaatgattaatacttaccaaccaaccaatttggatgctttgttgattactccccttgaaacgctagtcttgcaaatacatagacacttgctttgtgatcaaagtgtttcaccttctcaatatatgtttttcaatctccaaaagcaattagcatagaagcatcaaactctttaaagctcgatcgacatcacatgcatcatcaaatagcataaattgggcttacttctaaatcagtttctcacccggagtttgatccactcgtgaacaagttcttctcttttctcctagctctttgataacgtttactcttgagcacatagtacgcatagtaccaagaacaccaagcattataactcccccaacaacagtaacaaacattgcagcccactcgtgatgcctaccaacaactatatgagacgctgatgtgaatgcaacggtggtgcatatagacgccaaccacatcatcttattgatcaccttcactaccctcatctcagactttgttctccctctcacaagtgtgatttgaaccaccacaacagccagcgaagagaaatgcgcaacagcgttgaagatgaagaagatatctaagggtactgtgcctaccatcactgccaccccactatcatagtctccaccgggaatgctgaaaatggccgcaaacgcaagcgtggcaaagagaaccacaaccacctttatctgttggaatgaaattttagaagtgaagaaaatatttgagaatgagagattagaaatgttttggaggaagagggtacttgtggcttgttccattgtttctggtgagttgtatgatgattcagcttgtgtattttaattttaatgtgggatgactttttgttagatattggattataagatagcatctcaactgcaggtcattttacatatttcagttcccctaagggatattttagtgtatgtaatataaaaacaggctactaggttagttatgacaggacatctttccttagtttttcttgtataactctattagtacttgtaaaaaaattccaatttgaaaattcttagctcctcactaacaatgattagcatgggctgagtactttgagtttgagccaaacttaggtggaggtagtccaaccacagccactcttctatactggtttgtgttctcaacttatctgggactaattactgttttatatttgtatgctcaaatgttcaataaaatgacccctttacctgcaacattagcaattgtatcaactcattatctagtctcattagcttgtgctaactttcagagtcatttagatgttgcaaacacggagctttgtaaaatttgttaatgatttcttgggccctttattttcaacaattgtagatagtaaccttcaacttcacgatggtgctatattttacatggtaatctttattgtttaaacgagtttatatatgcataatgaaaaggaattgcagtaggacagctctcttattctccacaaccatcctttattcatatagacgaataatgagcttgtttgtttaatttttccatttcactggtatgagaaataagcataactgtcctgcccttggaatatggaagaatttatgggatattttttacatgaataatattcaaagggaacgaaatggagttgtgctatcttaaattgttggaactctagaatttttcttacacgctacaatttgttacattgtattattgtatgggacttggaaagtaaacatgcttccctatccattgggcaagtcaattatgaataatggcatggctaagctgagtttctttacctttattctgcattaacactaagcttcttaacatttgaaagttgtagttctaatttaaatattttggcaccgttttcttttatgagataattagatctcatgaattttttttcttttccagattctaaaccttgtacagaccaaaaaaatgtaaggcataagataatcgttggagttggatttggagttacagctctattccttgtcattatcatagttggaatcttttggtggaagggctacttcgaaggaataattaggaaaatcaaaggtaaatatatactatcatgttcttaccattctgaaattagtttacttcatttgcttcttaaagatttccaagttcaacttcccaaaaagtcaatcacttgacttagcgtctaggaactgtgaagttagctaggtgctacaagacgtggtcaggtaagattgaattaatatagtacccattatgatagacctccttagggattaactatgaccaaagtgggtaagaaggttaagataataggtcaaaagcaaagaacttgccttgattttttactatggcctccaaggcatccaagaatatgcatttagaaaagtattcattcttggatccaatagcctttgaggattggagataacgatttatctcttctgtgggtggtgttttatgcgtatgaattatttgcatccacttattgccttttatggtgacaagcatttctatgtatattgacacataacaagcatttgacacataacaagcatttgtactttcctcaaatactcttaaacaatgcagatacgtttaacttactacgtaaaatgaaactggatgttcctctggaacacttattttacggctgacatattgaacaggtactgaaagacaagattgtttaacggggacatttacgttaaaacaaattagagatgccacagaggatttcaatcctgataacaagattggagaagatggttttggtcctgtctacaaggtattagagtgaacggccttttttcttccaagcataaaaattgatgttcctccctagcatttaaaattctaaacaactgttggattgcagggtcaattatctgatggtaaattggtagcagtcgagtaacactcatcaaagtcgcggcagggaaaccataattttttgaatgagataggcaagatatcttgtttgcaacaccctaatcttgtgaaacttcatggattttgcatcgaaggggatcaattgatattggtgtatgagtacatggaaaataatatcctggctagtgctttattcagtgagtttctacccaggagtgcaaactattatgtttgtcttttgccttgtcatttattatatgttttgtaagataaggtgccaagtgttaattacttaattatgataaatcacttggagatctgattaatctgaagaagtttgtttcccgcccttttccatttttctggatacaaaataaggaatgaatgagtgctatagctagttgtttttccttccccttttgtctagacaaattaataccgtggttagatttttatactgttaaacttttcctttttcccatttctatcactttagcagctaggcaatagaattttgaaaccgtgattcatattaattcaaccacaacttctttctgcatcttttataggctcaaaagatcaacttaaacttgattgggcaacaaggcttaggatctgtattggcatagcaaaagttcttgcatttctacacaaagaatcaagactcaagattgttcatcgagatatcaaagctactaaggtattactggatgggaatttaaaccctaaaattaacagattagtatccaaagctactaatctgttaattttgttttacagagggtatatggcaccagaatatgcattatggggttacttgtcttacaaggctaatgtttacagttgtggggttgaggtcttggaatttgttagtgggaagaactataagaattttataccaagtgataattgtgtttgccttttagacaaggtattctactatgcttcaatccctgatacatttttggcgttatgaatcccttttgttttggtagttatccaatgcaaatatccatattttcaccattctaaagaaaggtaacaaaattcccattgcaggcatttcatctgcagcgtgcagaaaatttaatagagctggttgatgaaaggttgcgaacagaggtaaacccaaccgaagcaatagctttgatgaaagtagctctcctatgcaccgctgtaacaccttcacgtaggcctacaatgtctgaggttgtgaacatgcttgaagaaagaatcagcattccaaatgctatccaacaaccaagtgattttagtgaagatttaaggtttaaagccatgagggacattcatcaactaagggaaaatcagtttgagtacaagccgaacaaacaatacaacagaagtccttacacttagctctccctaaacatttggcaatgacctggtgttagttcatgatttcattgttgctgaccatattgcaacatgagatatccttagagcatagctgagatttaatcttttgggataaccaactgtaatgatcaccatttttaggatataacatttttcactccgtctttcagagaatatatttacttctagatccgtataaatttctaattgctcttgaagggtacttttttttaacctgggcatttcattttgagaaattattgtatggttcggtgtagtcccagttaatcttcatatatgacacaatcacaagttttcaatttatgaaaacaaaattggcgtgtcatgtggagattgcttgaactaaaatgatctcggaccatataatttctcatttaagaggtgcatatgaactccttttcactggatatacacagtatttggagaaagaatgtacatacgcacccttgaacttgggtgttatagcaaataacaacttggcgaaagaatgtacatacgcgtcttaataatctttgggagactaaaaacccgtttgttatatctttctcaacttaagaacggcaaattgtgtttctcctttttatcaggtgtgtggtgtgtgggttcactgggttggggagttagtgagaatttcaagttcagtgctatgctcagtatgacaatttttagggtaaaaagtaatagtgggtgaagtaatacacctacgtagtgaagaagtgtctgtaaggaataagaaatcaagtttcaacgctgccagccatcacaattatgagaaaagaaaacttcgagcttgttcggattaatttgtaaactaagccaccttccccctctttgaaaatgatttagttaagactgatgtgtataaaaaacactaaattttaaacctctttattttgaatattctactttggaaaaaaaaatgattattaaaaatttttattctcacattaactccaaatttgattctaatccattataaaggtgctgcaaactcgagtataatcaggtattaaaggatcaggaagagacgcaacacaagcaaaaatgaaaataaccatcataagttgatacaaagaaaccaaacatactttaagaaaatataactaaaaagacaacttaaactactaatggttgcattccataatgatcagcttgggacgtaggacgggataatatagagaataggtaacattcatgaacactttcaataatcactgtaggttccaattcggtcaattatgttagatgttagcaacagtttccttgctctcccttaggactttgacactcctctgcagcttttcacgcttcccagaaattgaaggtgactcctccaataacctctcaatcccaccaccactatattggaaatcgacaatcacacacaaatcgaaaaacagaaaagagaataggaaagagaaatatgacacagtattttaccctggttcacccaatgtaggctacgtccagcttgtctgtactataatctcctcaccgccactcgttacaagtcacttggtttacaagggaaatataaataggattaaaagaaaccctaacagtagctattcatgggccctagcccaaactactaataaaagtaaaatattacaaagaatcagaggcccacaacagtacctagcctctacgggcctggggcgctgccccccggacccccgccggggcggcttccccggacccccgcccgctcacctgggagcgggaccccagttggctttctgctgaccccgccaacaagaagggttgtcatctgactgcgaaagatgagccatatccaacacactaggggataacagatcatgaacaatctccttttccaaatccttgttaacaagattgttaatactcagcataagatgtaaggcaatggtgtcaatcaatcttttctgcactatcttccagtacgaaatcatcctcaccttcaaatcaaatgcttgagtaagcacagatgggtattgcctcaaatgaccaacttcaattttgcccacaccttcaagattcacatgcgatggattattcgaatttttcaaaacttcattcagaaaagcatcttgctgagatattaacttgttgtattcctgcacaaactcaggattacaagcgtaatcagtatgcatctccatttcaatggcctctattacatgcttggtggaacttttcttcttcttagaaataagaacctggcttgcacgcctggtagacatcaaaagctgatagtagttttcagaatgacgcgtgataactgaaatcagcacatcttcaaggtagttccacacattttcaacaaaacctataggcttgttggcaattccattcaccttcccttgcaatatagaaagaaaagcagtgcgaggcaagaaatttggaagaccaatccacttagcctcctccagcacctttatctcttgcataagaaaattcttgcttgtatcactttcagcacaagtgtaaagatcatttgagtaggaatcaagcatatccaccaaccgggcagtacaatgcatgtttttgtcttcggggtactcatcaaattctcctctaagaagaatttttctgagagattcttttgtcaatccaataatatgcataaaagctgtcatggcatcggctactgaagccaagtttgttggcaacttttccaactcagacaaattgttagctagcttctcannnnnnnnnnataataataaattaataatggagggagtataatatcaacaatttttttcataagagatactccctcaatcctaaaagaagagttatcttagattgtttacatatatcaataaaaattaataaataatgaaagacaataataattttacaaaagtaactttaatattaacatttattacatttaaaaactataataacatttagtggtaaaaaataattaatattatattaaaattaaaatacaacacttattttaaaatacttttttccaggaactttagaagatatattctctccaaggttgtattattctatatggatcaaacatagatcctccccacaaacacaacttatattgttaacggaattacatctattccattggattgttgaagttttatctattcctatgttacaacatttataagtttaaggtttcattcttaaataaaactataagactgattttaagagttattccattcttcatctaatcatgtatgtatggtttcttttctatagactattgagcatcttattttacttttttttatataattttttattcttttcaaatactatnnnnnnnnnngtacgaaatcatcctcaccttcaaatcaaatgcttgagtaagcacagatgggtattgcctcaaatgaccaacttcaattttgcccacaccttcaagattcacatgcgatggattattcgaatttttcaaaacttcattcagaaaagcatcttgctgagatattaacttgttgtattcctgcacaaactcaggattacaagcgtaatcagtatgcatctccatttcaatggcctctattacatgcttggtggaacttttcttcttcttagaaataagaacctggcttgcacgcctggtagacatcaaaagctgatagtagttttcagaatgacgcgtgataactgaaatcagcacatcttcaaggtagttccacacattttcaacaaaacctataggcttgttggcaattccattcaccttcccttgcaatatagaaagaaaagcagtgcgaggcaagaaatttggaagaccaatccacttagcctcctccagcacctttatctcttgcataagaaaattcttgcttgtatcactttcagcacaagtgtaaagatcatttgagtaggaatcaagcatatccaccaaccgggcagtacaatgcatgtttttgtcttcggggtactcatcaaattctcctctaagaagaatttttctgagagattcttttgtcaatccaataatatgcataaaagctgtcatggcatcggctactgaagccaagtttgttggcaacttttccaactcagacaaattgttagctagcttctcattgatcttttttactatttctggcaaagttttagatatgctcatagcctgaacctgaaccagtttctgtgctagaactggaacacccacgatagactcgtctattttggaaagaagtggatggaactcaaacagtttctgttcttccactctagcatcctcataagactcatcaccaatgcggtttctcacacaaacataaccaagaccaatgttcacatcatcggcagtaactttttctaacaagccctcaggagacttgtctgcctttgtgaccacagccagtgtcctgaggccagttttgtcaacactctgagacattctaatagactcacaagtagtgaaatcaacactagccgaaagaacattcaggataatactttcttctggcttaatgtactccatgatcatgtctttaatctggtcataaatgttctcaggttgaccatgaaccggaacccgagttataccaggaagatcaaccattgtgagatcaggaacaccattcttcttcaccagcaaagtcaaagggttgttggaaatccctttaccatggcctgcaagctcttctgtggcagcatttatggcatgagaaacatttgcttcatcagtggaaacgattttgccattgaactccaagataagctctggggtttgaagagggtggttttggagcctcatgaccaagggcaccctagtgcaaatgccttggccacgtggcaagctgataccagcaagagattcaagaacacttgatttgccagatgattgatcaccaacaacaacaatggaaggaagctgaattccctcctttgtaatgttaaggcgcctgagattttccatagcatcaagaactggacgtatcctctcattgtaagaggacacaattggtgcaacaatagcaagaggctgaggctgttctgcagatgggtcagtttcacattgagaaacagatggtgcaacaatagccttagtgataggtctccttcctccagccattttcaatcacaatcacaatggtaaaaaatatagagagggagtgagagagggatagtttggtatgcttatgcttatgatgagtgagtgagtaaaatgccagagcttaaatgcatatttatagattaaaaaaaaaaaaacttagaggaaaatgaaaggaaaggacagtttggtttggtatcttgaaagttgaaaacaagcgtgaattgagcttttcatgggaaccgcagttacagagccgttggggtcttccatgtttaggtaattgaaaggtttctcgttaaatgcatgcatggtagtaattgaattgccataaatattagtaatgaaaatttcttacattaattaattcaactcaagtagttttagttaaaccaaaccagaaggggaatatgtactaaaaaaaaactgaagggaatgtagttaaggaaaagggacaattcattttataattcatctaaggaagctataaagttttatttatgagtagttattactattgataacatgcttcggcagtatgtcctctctagtctctcacatactatggcatatgtatggtcgtgacctgtgacctgtgacctgcatgtgacttgtgagaaaatctttgggtattgcttttgttgtcttaaaataaaataaaaattaatggtgctatttaattagtatggaaaatggtgaatatatactttgtttttttatgtatttttttgtgtgagggatttttgtttattttttgatgtatgacaggaaaaggaagggataaagagagaaaatactaatagatgataaaagatgcgatggaaaataaataagttttcatcattgataaaacaaaaatactattacaatttaataataatataaagttctcttagtatttggaattttagacttaagatagaaaaaataatttgtttcattttgttatttttaaagaatttaaaatatttaatataaactctaacgaaataaattataaaggtttagagtaattctattctctataagtatgaaattatgagccagctatttttaggagaagaatttttatttttatgacttttagttttcgattaaatcctagtaaaactaaaattttatagtcctgcattagttattcttctaaaatagtaatttcgtttacaaacaaaagggtgaaaaaaataaaaatgacgaaaatacaattccatacaataaaatcgtatttttttatatttttattttatcattgggtgttactattacgtaaatggaagtaaaaaaataaaacacaatgttattatgtaagtgtgcatgacaatcatatttttgttgtgtttttttcttttttttatccgatttacataattgaaacacatttttgtttgttttgtttccattcaagagttggaaatacagctaaaaggcccccacttcgctagtgccaataggcaatactctgtagaatatgcaaaggcccatgattttcattcttctactgggccaacacaaagaacctcgggaccacaattttatatgttcgagttaaacccctttttatggcccatgattttaactttttcaaaaagatatttttaatttacatgtagtataatttaattttagtttaccagataaaatattttattttatttctttcttctataaaattttacaaaaaagtttattcaaaaggaccttaattaaaataaattaactttaactcattttttaactttcaaaataatattcggtaaaacaaaactatcaaaatagtaaagaaaaggaaaaattgtatgagaaattcaaaacaccaattaatcatgactcgtggcatttgaaaaatcacaggattaataagtaagttgccatannnnnnnnnnctcttgaccaatatatttacatgaatcataatcaagtattataatttatttcttataaaatgtgatatttttaaatatgtgttacatataaaaagtgattgggatgcatgaataggtggttgtctagaatcatctaataatttttctttagtaaatagatatgatttttcttgttcaccaatagttttcactaattatgaaataaaataaaagatatttattggacaaaatatgaaaatattgaagataaaaatgttttttaatagttttaattacttattttgatttttggaaaatatttttaaaactaaaaaggttaccctaaacataatataacagcccagtaacatcaagagctggaacatgaaagagaatttgataattaaacatataaatgaaaaacagtacagtaaacggagatgttaaactttattaaatgacacctttagtttttttttttactctaaatcaattaattttattattaaatttaaattaaattcttttaaagttatatatagttaaataattagtttatactttattattttattttaatgtatgatatattttatatatctgccaatatttaaattaatcatctaannnnnnnnnntaataataaattaataatggagggagtataatatcaacaatttttttcataagagatactccctcaatcctaaaagaagagttatcttagattgtttacatatatcaataaaaattaataaataatgaaagacaataataattttacaaaagtaactttaatattaacatttattacatttaaaaactataataacatttagtggtaaaaaataattaatattatattaaaattaaaatacaacacttattttaaaatacttttttccaggaactttagaagatatattctctccaaggttgtattattctatatggatcaaacatagatcctccccacaaacacaacttatattgttaacggaattacatctattccattggattgttgaagttttatctattcctatgttacaacatttataagtttaaggtttcattcttaaataaaactataagactgattttaagagttattccattcttcatctaatcatgtatgtatggtttcttttctatagactattgagcatcttattttacttttttttatataattttttattcttttcaaatactatcactcatttttagtttttattttatttaaattttaaattctaagttcttttatagatatagttaaattttagggttattataatcttaattaatgcaaataaatttattttgaattttagcattatattatatataccaataatgaggatttgtttaaaatgattatgattcatttccataatttcttctccaatttggaaaagtcttatacctataatttattcctatttaatataacaaaatatgttattaattattaaagtactgatattctccttaattttttttcattaataaatttatgaaaaatcatagagtgtaaaaaaattagaaatatttcatccataattgaacaaaatataaaaaaaaaatatactgtcatttaattataaactactacatgtaagataaaattgttactgtttataataattatttttataaattataaataaaatcaagttgattattaactttacattgataacataaatgaaaactacacttaaaaataaaattacaggtatagtaagctagcaaattatatccattgcctgtgtgagtaaacgaacatgacgaatcgatgatacaatattttaaagtgaactgaatcaactcatcttcgcagtcatactattatttagccggctatagcttgctaattgaatttgtaatagattgaaacatcatccaatgggtccaagtgtcaagtgggattctgttctgctaccctacctgaatcgaaaagataatcaataaagcaaattattataattttcaccatcatccaaatttatatattgtatgatgtgatgtgaacgccatgatgtctataatatctgttggtactctttaaattttatgtaaagtgtatgaacaaaattattttctttgtgacattcataacagactggagtttataagttaattaatttattgcccagtcagtattaattacgtactagaccatttttctcagcaaattgtttatttttaataaacaattaatctccaaataagaagttttagtatgccatattttatttttagccgtgagtgattgccaacgattcaaagggtgctctggcgttgattaaatagaaacacttaagtgttgggaagctcttgtcttggatgatcccctagtctttttcttgctggagagttgctttggttacatgcataaccttcaaagaagatttcaaatgcctaatattttatggaacttcttccatgactaaaaataaagtaattaatcttaattttttataagaaaattaacggataattttttttaatatatatgtatgatttgtatatgtgtatacacacgaatatatatcaactttatgttgattttgtcattagcaatgaaaattagttgttttattttctaaaataatcatgtagtttaaattggactacactactgaaaacaagtacgtgatgaatctttttaataaaatatgttttttttatctttataaatatccttaaatttaatttattatgtcctttatttttattttttaaaaataaataaaagacatgataaattatacaagattaaatttaacttatatggaaaaaatagttaaacaatgagatatagattgatcttctctggaaagatggtgatccggttcatatgattcattttttagtcatttttcatcttcatctctcccttcttttattattcttttcgtttatctttttttttaacctcctcatatttattattgggttcatcgatcactaatctcaattaacttgagttaaaaatgttataaatgttaatgttatatatatatatatatatatatattaggacactaaattatgtgatttggtaagaatttaatgttttcttttttattcgtgtgagaatcaaattcagatatcatcaaatttatattgaggcagaatgcacgtatgtagattagattatggtagttgtttctaattttagtgcttgagaattgagtttcactttgttataatcataatttgagatcccccaatctattttggtaggatatagccattttgtactcgtcattatgcttcttgctgacgctgatggaaaactaccttcgaatcttcctgttctagagtcggcgaatttccatgtaaatcaattttatcaaccaagcactacattctccttctaattccgcagaactggtcataagccaataaatgatagtgaccttattaattaattatgaggcatttggtgtgtgcataattatcttttacacatgcattaattgcctaattggatggatgtatgtatatatagggaagagaatgctattcccttgttgtatttgactacttccatttcttttgaattggctattacaagaagttttctacagagtcatggaatttcattatttttgcttcatttgtttatattattgcatgcttgttccttactgttttcaagtttcttgcatgccacttactgcttcatttgcacgcaggaaaatcgtgttgttgacgggaatgtggagaagatgcagcgggaggagagagcagatgagctggttgttcatggaaaagttgattggaaaggaagaaaagctttgaaacacgtacaaacatggggggatgaaagtttcgtacttggtaaactaggattgacatatataatatgagttcataaacagtaattaacatgaaaatgcatgtatatacatatactaattaaggtgtggattaattatactacctcgtagtactaattaaaccctgaagtgatggcaagtccttaatttaatgaccacttaccatgtgtatataaaacaatgcaagtttggtgtggattaattatactacctcggagtactaattaaaccctaatgtgatggcaagtccttaatttaatgaccactaaccatgtgtatataaaacaatataagtttcattacatattgttgtgtctttaatgtttaaagcaattaattaattaagacaagtgtataaccagttacacttagtacattggtaaagaaattaaaaaatatatttttattgaaatacataaaattatattatttataattttttttacattcttttataatttttacactatataaatatattttttaaaattttttaaccaatattctaaggagactggtcgacacaagactcataaattaattgtgcacagtgcatatacactactcgttcattaattgatgcagtacgcaagtgttaatttgggtttgcatgggtgcatgcagcggcatttggtatagagaacgtagcaactctgtctctagcagtgaacttggtgtcatacttcactggtattatatatgcattatgaactagcagatgcagctaacatggtcaccgatgacatgggtgctaattacatgctctccattgtggtggccgttcttgctgatacttggattggtagatacaaatccgttgttatttctggaatcgtcgagtctttggtaagatccaaacttaccttaattccttattgcataataacataagttactaatcgttattggtaaacccaagactatatatattgtttatgtgagtttgaccaaatatagcaacgtaaactattttttaaacccacctttatacctattctctttttttttttttcgattacctcatttattatttttattactttctttcttttatctctcaaagtnnnnnnnnnngtacgaaatcatcctcaccttcaaatcaaatgcttgagtaagcacagatgggtattgcctcaaatgaccaacttcaattttgcccacaccttcaagattcacatgcgatggattattcgaatttttcaaaacttcattcagaaaagcatcttgctgagatattaacttgttgtattcctgcacaaactcaggattacaagcgtaatcagtatgcatctccatttcaatggcctctattacatgcttggtggaacttttcttcttcttagaaataagaacctggcttgcacgcctggtagacatcaaaagctgatagtagttttcagaatgacgcgtgataactgaaatcagcacatcttcaaggtagttccacacattttcaacaaaacctataggcttgttggcaattccattcaccttcccttgcaatatagaaagaaaagcagtgcgaggcaagaaatttggaagaccaatccacttagcctcctccagcacctttatctcttgcataagaaaattcttgcttgtatcactttcagcacaagtgtaaagatcatttgagtaggaatcaagcatatccaccaaccgggcagtacaatgcatgtttttgtcttcggggtactcatcaaattctcctctaagaagaatttttctgagagattcttttgtcaatccaataatatgcataaaagctgtcatggcatcggctactgaagccaagtttgttggcaacttttccaactcagacaaattgttagctagcttctcannnnnnnnnnctttagttatttttttttactctaaatcaattaattttattattaaatttaattaaattctcttaaagttatatatagttaaataattagtttatacttgattattttattttaatgtatgatatattttatatatctgccaatatttaaattaatcatctaaaatttaacaaatatatataattactgaaataataccttatttctctgtcactcggataacagattctagctagggtgattattagacattatataattgcatgtactcatctactgattaataatgatatcaattatttaatttaattaaataaaacgaattagataagaagtattttaaagctattatttaacaacttatattaaagtaaaaagtttaatatctttaatagaagatttcattttaagatcttaattattattttgactaatcctataatgttatattactttaaaattttattcatattttattttaataatatatcttattttaagatcttagaacattttttatatatcctacctacactaataaaatgcaagtcaattttgtgaaaagagtaaaaaattattatttttaaatggatactctaatagtcatgcactaacattatacattgtccaataaataaatcagttatatatatatatatataaccaataaacttatcacatataatatacaaatgttttacatattatcttttttctcttaaataaaaccaattgaaagtaagcccaatttatatatgcaactaatttactttaaataattttctaaagcttattgaatgtgttgtatggactggcattgcttacgatacaggcacgcgtgggtagcctgacaccacccatttgcaacctgtactatgtgagagatgcacattgtgaaaagcttagtgggaagcaagaagcatttctcttcattggcctctacttgttggcctttggcagcgcaggtttgaaggcttccctgccatcacatggcgctgatcaatttgatgaaagagaccccaaagaagcaatgcaaatgtcaagcttcttcaaacggtatctttttagcactttgcgttggtggtgcagtcagcttaacatttaatgtgtatatacaagacaataatggatgggtctggggctttgggatctccaccgttgctattgttttgggcaccattatctttgcctctggattgccactataccgaattcatgctgcacatacaacaaacggaatattggagatcattcaggtatacactcttttgcaaaccttgttctgcatgtgctgtatatatttcaatttgaaaatcatatttttttttatacttatgatattagtgtgaaatatttattgattttattgataatcgattaatctccatcggaaaacctagttgatcgctttaagtttaagtagctctttcctctccaccatatttttttcatccataaaatttaaattcaagagtattacccagaataaaatttgttggttgaaaaagtatatttttgagttcattaggcatgcattatgaaagtaaatttttttttatacaaattgttaaccaattaaaattgattcttagtatgacttttaaatagtatattataaaaagacaaattaataaacttttatgaaaaccctttacattgttggtagatatattacttaattctatttttatttacttatagtctgattctgatacaatacaatagttgaagtttttaatttagctcgatattgcaatgatcaagcgcattagttttgaattcttcgcgtctattttccaggtctatgttgctgcaattcgcaacagaaaccttccccttcctgccaatcctatccaactatatgagattcaacaggacaaagaagccgcagtggaaatagagtatcaacctcatagagatattttcaggttcaatccgacaatgtctaatatgactgaaatactatatgttaattgttgatagcttaagtattaaagagtaatgataaatgtatataccatggagattctccacagtgtctacctgtcacacatggctaaccatgtgtgcaaataaatatgattaattgtatacaattatccatttgaatttatattgcttgtatttaattaactatatctgcaagtggttaatagtatcacgaagttatgaggttattgaaatgtttaacgttggttaactttacctaacaagtcagaaatgattaataggaaatgaacttgtatatataattatcattatgtactattgacacaaataattaaatatgtctcacaagtgattaattttcttttgcacagtttcttggacaaagcagctatcaaaagtagatctaatgagcaacctgagaatcaagagactccaaacccgtggaaactatgcagagttacccaagtagaaaatgccaaaatcattctaagcatgctcccaatattctgctgctcaatcataatgaacctttgcttagcacaactccaaaccttctctattcaacaaggctcaaccatgaacaccaggatcgccaagcattttaacatcccacctgcatctataccaatcatcccagttgccttcttaattgttttcgtccctttctatgatcgcgtttgtgttccttttctaagtaaattcaccggtattcccaccggcattacacacttgcaacgcataggagtaggcctaatactctcttccatctccatggcagttgcagcaatcatagaggtcaaaagaaaatgagctaggagacaacaacatgcttgattccttgctgtaatgtcttggatttaagcatgtgattaagcctatgattaggatcataaccaggccttagagtctcaaaaaggaaagcaataggttgttctgaccatgtggcgcgacccgcgtggggtctggcccaatccgcgccagatgtttagatcaggccaattcttacggccttctgacactattagcgtggacatggtgctactctcgtggattgttcgagcctgtggcgcggtcagcgcgagatccggcgcaatccgcgtggaagacttgaatcaggccaatactggcggccatctcacgttatccgcgtggctttggcgctaacagcgtgagttgctcgagcctttggcgcgatctgggcggaatgtggcgcgatccgcgcgggacccacgggcaggcttaaatacaactcattctgggctgagagaaaaagagaaaaagagggtgaaaatgaccattgatgaccctgtaagcttcatatcttttttatttctcatttaaacacctctgacccaactgagaaagtgttcagagcctcgagataagctagagacccagctttattctcgacacgaggcagtaaacggcgagatcgagtttatctgggagaacccttgagagctcgaaacccaaggttgaaggaagctgtgtatggttgatttgtcttgggaaaagtgattccctggtcttccttgactgcatagaggtaagaaactcgagctctagccgttggttctgtgtattggattttgggggattttgagtaccttgagaggtgtttttggaggtgttagagccgttattaggcttggacactgtagagttttgtattcagagggttactctgatgaagttagagccttgagtcatcattattgataaagtttgattttaactctgagtatgtatgagcagaggtaaaaggctgattatttgactagtatgaaccttagagtagttgacaaagttgttcatgggataatatagatgttgtgtgtgagctggaattggtgataatgagaagcttgaaattgatctggataaagcagggatatgttttatattagcctgatcagagtcttagaagaggttctggagccttgtgtaggctgagtaggatccttatgagggtctgagaatcacttgtgaagtgattgttcttgtgttatgtagaaaggattataagtttcctttcgttataaacagcttaaaatcatatttgatgagtatgtgttgttcttatgtaggacgtgagcttgatagtcctagtggtggtgaccacgaggccgggagagccggtattttgcctagagcaggtaagctcttggttcttgcatgtgcgtcctttactgtgttctaccatgatcctgatagggtgatggttctgttgtgattacatacatgtatatgaaaattgtatgttgttatgattacctgttgaatggtgttctgtaccctgtgagagggcaattgatgtgaattgatatgagatgcttgacctgtgagctgcaccctgagatgggtggttgatgtgtatgaccataaattgtctagcgtatgacttgcatggttgattgttgaatcctatggtagtaggatagatgacatgagattgagtaagacctgatgtgagatgttcctgtgatatagacgtaacctcccgaatggagatgttcctatatctacagatatagcctcctcaggcaattgtattgagataggttatgagatgttcctgcaatatagatgtagcctcctgggtggatggagatgttcctatatctgcagatgtagcctcattacaaagagatgttcccgttatatagatgtagcctcctgagtggagatgttcatatatatacagatgtagcctctgatagatgtattgagatcctgccatgagatgttcctagtatatagatgtagcctccctgggtggagatgttcctatatacatagatgtagcctctgcaggatagtgatgtatgtgatgaatgactgtatgccatgagtatagcctgattgttgtcaggtgaacgtgcattgatggtgcatgatgattgattgagtgatttactgatgttcatattgcttgtttggatatactattttcatgtatatgtatgaaagtgaatcgggggaaggaaatacctccaagggccctgagtttcctgggattttatatttcaccccttttgtgggacttatgttttcaggtgaaccctcaggaggagcagatagatcccaaggcaagaagcctatgcagggatagctgtattttgaaacattaggcatagatgacatgagcatgtggctctgatgttttatattttgcctttggtttggttttgttgtaccctaaggggatatatttgtacagttttgtacttaaaatagagatattatgaggtacagtatttatgttagtgacctttgatgaagtcactcttagtttatgcttccaaactgcttaaactctgatgattatatgtgtgattgttgattaatgtttgataatgaccctgatgattgaatgggacgttacacttgccagtattacagccattgccaattagtatattctggatttcttttcagtattttgtatttggctagctgacatgttaacctacgtggggcttcttgagtttttctattcagaggcaccaaaaagccttaaatccacagcaacatgctttctctggtgtgctatggcccttggctattttctaagttccataatggtgaaaattgtgaatagtgcaaccaagaatattactgcaagtggaggttggttagaagggaacaatatcaacagaaaccatctgaacttgttctacttactcctttccatattgagcttgatcaacttctttgtctatttgttcgtttcaaagaggtacaagtacaggcctcaacaccctgcagttactggtggcaattcagaggagtgaatattgggagataaaggtttagcttaatatgattaatatggagcagtgaagatttagtgggttgtactgttcttcgtttgtcaaaaatctatgtgagtaaatagatagaggactgcacctttaattattttccttgtaatgtcttgaattagagctatagtttccaagaaatccatgtgaagtttttattttacctttgcctttggttacatttgatttctattttcacttttgctagaaatttttaaaattcatgaaaagttgtattttaaaaccaataataattgtacaattaaatttaaaatagttattttgaaaatcaatacattagaatttaataagattaacttatcctaaatagaaaaggacttatatatctaattaatgtcttaagatttttttggattaatatgtagtgtaaagttcatttgtatgggttgtgtgtgatttattaatgaagatctccctaatgttttatccattgttttcctaaaatcttttttttttgacaaatcctaacatctatttcatcataattttgatccatgattaattgattaaagcttattaacctatttttaaggtttaaatatatttattagttcctcaaatttttgaaaagttactttttattcaatagattcatggtttcacaatttataataatttttaatcaccaaaatttatttttaaatttttaaaaaaataatttttcacaattttaaaccgacaaaatatttaactctatgacttgatggccattgtttacatattgtgtttgttttgaagaaaaatatagttgtaaaattgtcataatttttaacaaattaagaatgttttaaactatcataaatcattttaacaaattatgacagtgacaaattgtgaggtattaaaatagaacttcagttttgcaatattagagtattacaattatgacagcgacaagttccggagggagaacggaaagagactttttggaatgaccgaagcaaaaacagaagcggctatatatatatacagaatcccttcatcgtgcaagcaaaagatattgcttcgtctgagccaagtaaaccagtaatgttacacaagaaatgatagttgaaagtactgaaaaacctaaatgtgtatcgataatatgatgccaaaataaaaacataatctagataccaaggatcaaacaaaagggcaaataacatgttgcaccccaatgatcagctttgttcataataataaataaataagtgaaaacttttcaagtcagtaggtagaacatctaatttaaaagctaaaacacgaaaaaaaattctataggcgttagggttcacaactgtacagaaaatcatacaaagtgtcgtgagagcagcaaaggaaccaaaagcttagaagatttcatttctgtgttttttgaccgaattgaccttagaagtagagacggaatatttttgcagtcgctgatgaacaaatatttgtcaaatgcaatttgagtagttctttcattaaatagttctaacagattttattttatttaaaattttgtttgattttgaggtattaaaatagaacttcagttttgcaatattagagtattataattctgcatatgaatatgttttggccataacatatttatttttcattattgtatcccctgtatcattcttacttgcaattagcacatttaaaggttcaactcttattataactcaccaattttgagtgttcaacataatttgtccgactaattaaaaaaagatatatttatccgtacattacacggaaaatcgtattaatttatcttaaatttatattttttcaaattatcatgataattaatgttccttttttaattgcttgacaacacattctctcttattttaattagcaatattctattataaaaataattaatataagaaatattataaattaaatcttataaaaaaaaccattgttttaaatttagatcttctaaataaaaataaagtatttaaagatagtgtataaataaagtatacaagttgttatttgattatccttaattgatggtcaagaggactctattacagtcttataaaacccggtttagcccggtcgattgtaccgtgaaccgtagatgtatctgggccaagttgggtattgaaccggccatgcatatggcccgatttggtccggtgaaatccgactgattttgttcaaacctgggaactcggccagttattgaaactcggaccggattgtgcttgaaaaaaaataagctgaaaacggtgtcgtcatcgttgccgcgccattgtccagtctccttcatgccaacgccatcacaccttgcagtaggaaggaacgaaggtgcagcgtagcagcaagcatgaggctgtcatatatgttgctggtcccttatctttccgtcccttgaatgctcacagactcaccactaatgtctcaagcaattacctttgaccatgcattgagattcatttgaaggaggaaggtgtgtagcatccggcaataggaagaaggaggaagcgcagcagcaacttaaaaagaagaaggaagagctggataagatatacatatagtgggaattgattaggttttccttatttgggcggggattgggccatatccaaacgtttactttctgtaccccacttattgctttatgcagtttctttttttgctattttgatttcgataattgttatttacactcgtttttagtattaatatattttatttgtattatcaactttaatacttcaattactattttggatttttcagtatagaattatgaatgaatttttcttaatcaaataatgttagttatatacgtatatataatataattttgaattttttaatataaaccggatcaaaccggaccaattactgacccactagttggaccacggatccaatgactcactacctcgaccagatcaatgatcagaccgattttcacaactctactgtgttggttaaaaaagacacaacacttattatattgtaaactctctcccattattgtcagttctgatgaataaaaaaaaaatctttaattgatcatgttatattgacttcttaagtgaggagtgggagagaagagagtatatacctggaatatgcgttatgccacatcacatggttccatccaagcataactaaccaacacagtcgattccaaatcctagtcctaatcaatctggttccagtttgagttgcgattatggcaagccaggcggtgtattcggtgtgggcgattccaccggaagacgtgggcgccagatgcgccaacctcatgaccgccctccgatccgagttcggtgggccccacttccacccccatatcaccgtcgtcggagccatcaaactcacccctgaagacgccgtgactaagctccgatcggcgtgccaagccctgaggcccttccacgtcaccgtggaccgcgtggccgccggcagcttcttctaccagtgcgtgtatctcctcctccgccccgaccctcacctcctcgaaaccagcgcacactgctgcacccacttcggttacaccaattccactcgttagtgcctttctctttctctaattaattattcttcgttttcgaaagaaactttagttcgcgaatgttgatgattgattcctttgcagcttacatgccacacttgagtcttctatacggagatttgagcgatgaagagaagcggaaggcgcaagagagggctaatgctatcgatgacacgctcgctggcttgacctttcagattacgcgccttgccttatacaaaacggacactgaggacaaaacgctcaaatcttgggagaaaattgctgaatgcactctcactccaaattagtagcttcttaacttcaatattagcaaaatccacaactctgatgaagtttttggttttctacactctctagctgtcttcttagtctttctgagtgctactgctatgtgcttactgcttaccaatttccaaactcttatacataatgatgtcaaataataaggcactagtacttcttgttgtttctactttttttaggcccataattatgaaggcattattaatctgcataagttttgctgtgggtaaaagattgttagacacccttggaatgtagacatcaacatagcgattggaagagagaagagatgagtaattgttataattagtgatgtgatttgataagaagtattgaagggtagtgccaatcagtggcgaacccagaaaaaattatttatgttcgcatagttagtgacgagagatagtggcgagagttcatggtgtcccggaattttttttttaaataaaatttaattaggtccagaatgggtagtaaatgatccgcattatggtaaaacacaaaacgaaaagaacaaatggaatgctagctattgtttccaggatccatgaattttgcaatttcattaacaaggttacggaaaagattcaaaggaatgtggtcacggcctcagaggaccaaggtcatggttcatgcattttggaatttaaaaaagtacccaatatgtataaaaatctcataatagaatttgcaaattttcagcgtccaaatgactattttcttgtaacaacattattgacaattagaattatggcagttacatacatacagtaagttttgctgcggcaagagaaatgcttgcaacaaaatctcttgtactctagtttcaacctagtattttctaatggctcaaattcatgtaagtctcattaaatatatacatctcatttctcatttggtaggtctcatcctcaagctaatcagacttgagtgaactttaactaacaagagaaagtatgctactagtatacacactaagttataacaatatacatgcatactgcagctccgtacagttgtgtaatcaaatattgttatactagtttgattatatatatgccaagagccttaatacaagtagcaacactaggtctctttaggtattgcttcatgcaccaaagccgcttttgcttcactagagctttctttatccttaaaataccccaaggagggcagggctaatagaagagtaaaaggtttccatgagatatatttgtttgaaaaaaaaataaacaaaactattagacctgtattataccagaagtctccgttgtggaaggtggtagtatggattagataaagatgttgtcacagcggaacaacagagcagttgcaatgatgttggatggggcaaagctccatgtggttcaatcaggtttatggttcctaaaataacctcaccagtccattaaaaccaggatgccatgaataagaactgtacactgtttcttatgcacgagccgaagcaaaaaagaaaaaaaaaaaaaaaagctgttaatctcaaaagaacagaatatatattctttttaagtacttaatcaacacttaccatgttttttcatttcttttctcttatcacatcatataacctataatacttatatatatttttttttctctctctctcactaggtgtcatatattgaatgtttatagattattttccaatctcagaatatcccattaggcatatggcgactattcttgtttctgttttgtttatatatctgtcgagttctaaatataaccaatcttctataaagtttaaactaatttgacataaaacattttttagatatttcttcctttttttctttttatgaacaaaataattctcttatgaccaattaatttaaatatcaacagaatcttcaaaattcaattcgtcaatcacgtggggtgtagcagtgtggcacgttacttgaactgtcattgttgtgatgattaacacaatcgataatttcgttatccccacatctttcgtatacaaaaaaaaaatgacaacatgatggttaataactgcggctaccgtaatttaaactctttatttgttaactgctaaaccaagcccaaatgcccaatcactgaaatcaacactgatgacttatgtagacctaaaacagcttagttagcaaacggacagtaagaagggaataaatggttaaacagatcaaacttatattagtagtacaattttccatatcaccaaaagacaaagtagtaaaattttccaattaaaatcaatattacatctggtttcacgcttccatttttggttactagatgaaattagcaattactaagatgagaaccactataataatacttaatgggtactattactacatttaaaatttgtactaattaatcaattttaccgtatgaactataattgcggagtgttggtggttctttctcggcttttttacacaaatgagtaaatttaaaattaaaaaaacactgtagattttgaaaatattacgggtatgagcaagtcgtgttttaaaacactacttcatctagagaaagatcaaagacgtattttaaaataaggctttaaaaactcactttttgtttaaaataaaaaaaataatgaaatcacgttaacaactttagtattttttttcttttttaaatattgaagttgtttattaaatcacaaatttaatctttttttttattttttctttcttttaaaaaatattgaagtcgattgttaaatcatgacnnnnnnnnnnnnnnnnnnnnnnnnnnnnnnnnnnnnnnnnnnnnnnnnnnnnnnnnnnnnnnnnnnnnnnnnnnnnnnnnnnnnnnnnnnnnnnnnnnnnnnnnnnnnnnnnnnnnnnnnnnnnnnnnnnnnnnnnnnnnnnnnnnnattttctaagattgtattttaaaacatgactttctttatataaaatcatattttaaaatacgaacttataatattttcaaaatttatcattgttgtaattttttaaaataaattacccatttatgtaaaaaagcctgctttctcagtataagtaacatgtgcttgattagggatagaaataggccaggtcgcctatcagggcctttgacctggtctgtttaaggcctggtctggcctaacttgtttataataaaggtcagacttagactttttaaaaagtctgttaggcctaccaggctagcctatatatatatatatatatatatatatatatatatatatatatatatattaaaattaaaaagatataaatcaatctttttaaaaaagaaataaaataagataagataaaatctaaataatctatcttacttaaaagataaaatataaaataggaaatttgaaatctttgtagtaggtttgtaaaaaagcacatatatatatatatattaaaacaaaaaatataaatcaatctttttttttaaataattaaaataagataagttacataatctacttgaaagataaaaaataaaaaataaaatgtgtaggtttgtaaattgtataaataggcttttcaatagactcgtaggccaagccagacttttaaatagactaaatcaagcctaaaaaaaaagcctataacaggtaaataggttaggccaaacttgatgtttttaaataagatcaaggtcagacctaactaagcctgacctgccctgacctatttccatccctatgcttgatatataactgcctttcaatgctatgtttaacatgttttgtgccacaatgagtgatgaggtacgatccatgaatagaccaaactgtacccactaggcaatttcacttgctatgtccaatcaagtgaaatatgtgggagttgcatgcctagttggggcgtggatggatggtaaactcaggttgggataagctacaatctgtaactatgcacaaaaaaggaattaaatcaaatagccaagatcaaatcaactattgttagaaatgactccatttgtcgtatcactcgattctagcacacaaaattattcttccattgaataaaattagaatgaaacaatccatcctaatcaacgttcaggaattaacgctgtgttcgatttgcaagagagaaataagagacaaacaaaggtaatggggactgagtttggttggcatgattttggagagagagtaaagttataatttgtggggtttatagcttaaaatttccgtctttggaataggggtagcactaagtgggagtttaaaattttcggtaaaaagataatagtaaccttaaaaaatcaattgtttatgcaaaaaaaaaaataaatagattttcttttttggctatcatactcataaatgacaaaatggattatccaatccaagatcgatccaatgtgggatatggattataatgaattagataaaaaaattaatttaatttaaatttaaataataaaacttaagttctgtcagaggctgacttttgtggacttaacctgtattgaaccatgattgatttgtcataaagtttgcatttaatttgaactaaaaattttaaacacaaattctaggttttatcatatggatttgggttgattgggctagcccaatctatttttgtcacctttactcatggctactcccataaacataataatatttttgtctctatttaattctttcttttccatatatatcaaactcctttacaatattatttttactctatttctcacatatttttcttaaaccagactaccaaacatatatcttcatttctctttttttaaattatctattttctattttcatctattatatttctctcttctaaaccgaatacaacctaagagatgaaattgtattgtaaaccattacagtactgtttcgcacatagataatcaaattgaaattatctactaacatttatgtctaacataaaaaacattcatatttgtttatatgagacgaatatacattcttgaaatttgaaaataaggtttgatttattttagattttaacaacaaacgatgttgttgctcataaagaagaagaaaattgttaattttacgagactttttaaaaattctttgagattttaaatatggataataattgtcattctgcatacgcttatcaaggtatgttaaaatacaaaactaaaattggagcatgcatataaaataaagtatgaaacaaaaaaatgaaagtgaaaatttaaattttaattaaataaattgaaagtgtaatatctaatcataaattatgctataattaagaatttttaattttataataactactacaaaagtcttatttaaaaatgagtttttattagttaacggtgtattatgactaaattatttaaaattttaaatatgtataataattgtcgttgtgtaaaaacttgtcaaaatatgtttattttatacaataacaagaatatgaggattaaatcctcatctatttaaccctcgtcactaacccagtggattactttacttatcaaagtatgttaaggataaaaaaaaatgattttacatagatcatgcaaataatatcagtataatgaataagggtgacctacattacttgtcagcaaacaagaagcagcagaagaaggaggtgagtggatgaattaaatcaggttgtcacattcacatggcggttgccttcaacttttgggccaccgcatagaggtacaatgtgctgtcaatgacaatgacgacgaaagatgtccaacagtataactaatacaaattccaagattaaacatacatatttaaatacaggtttaatatggtagtcattgtaaatattagtagaagatagaaccttcaaaaaggactaaaaagaatgaaaccgcgttgttcatgattgtcagtttgttagaaaagttaatacgatacttggaattaagaatgagagttgtttgaagtccttgtatgtagaatacccaaaatggaaaatttggaacatgatgcattaaatatgtgtagaagttaaaggaaatttatacttggaagaacacgcctattttcattttctatcttttttttcccactctaatttgtaattataaaaaacgccttatttttcttttgttccctatttttaaaaccttgtataattgtttctcataatttattttaaaaacaaaaaattaatatttttgtaactaattacattaatggtataaatcgcaactatgtatccagaattcaaactctagagttttgattatgttgaataatttcaggttaattaataattgttcaaaaggtttatttcacaattgtaaataatgttaaataaaacaaaagtaaaaaaagtttagagaataataattgtgtatattttttcaataggaatagtttatttataggtataaaatataattaaaaaagttacaaaagataaatatatataaagaaattaaaaaaattataaaataatgaaatatatggacaatcacnnnnnnnnnnnnnnnnnnnnnnnnnnnnnnnnnnnnnnnnnnnnnnnnnnnnnnnnnnnnnnnnnnnnnnnnnnnnnnnnnnnnnnnnnnnnnnnnnnnnnnnnnnnnnnnnnnnnnnnnnnnnnnnnnnnnnnnnnnnnnnnnnnnnnnnnnnnnnnnnnnnnnnnnnnnnnnnnnnnnnnnnnnnnnnnnnnnnnnnnnnnnnnnnnnnnnnnnnnnnnnnnnnnnnnnnnnnnnnnnnnnnnnnnnnnnnnnnnnnnnnnnnnnnnnnnnnnnnnnnnnattttctaagattgtattttaaaacatgactttctttatataaaatcatattttaaaatacgaacttataatattttcaaaatttatcattgttgtaattttttaaaataaattacccatttatgtaaaaaagcctgctttctcagtataagtaacatgtgcttgattagggatagaaataggccaggtcgcctatcagggcctttgacctggtctgtttaaggcctggtctggcctaacttgtttataataaaggtcagacttagactttttaaaaagtctgttaggcctaccaggctagcctatatatatatatatatatatatatatatatatatatatannnnnnnnnnnnnnnnnnnnnnnnnnnnnnnnnnnnnnnnnnnnnnnnnnnnnnnnnnnnnnnnnnnnnnnnnnnnnnnnnnnnnnnnnnnnnnnnnnnnnnnnnnnnnnnnnnnnnnnnnnnnnnnnnnnnnnnnnnnnnnnnnnnnnnnnnnnnnnnnnnnnnnnnnnnnnnnnnnnnnnnnnnnnnnnnnnnnnnnnnnnnnnnnnnnnnnnnnnnnnnnnnnnnnnnnnnnnnnnnnnnnnnnnnnnnnnnnnnnnnnnnnnnnnnnnnnnnnnnnnnnnnnnnnnnnnnnnnnnnnnnnnnnnnnnnnnnnnnnnnnnnnnnnnnnnnnnnnnnnnnnnnnnnnnnnnnnnnnnnnnnnnnnnnnnnnnnnnnnnnnnnnnnnnnnnnnnnnnnnnnnnnnnnnnnnnnnnnnnnnnnntatattctttctaatagtagtaacatatttttaagtacaaaaaataattgaaaagttacataagataaatataaataaggaaagattataaaatacaatgaaagatatgaagaatcacaaatagattattcataacaaataattttttaaacttttttctataaaaaaaatcatttgacattgtgaaaaaaaaaacttttatacttacatagtaaattaagacactagatatcaattaacaacatattatattattctttactttagattttttttaaattaaactgaattttaagaggaaaaacaatgtttacacaacatactcgttagttatggacaaggttaaattttttaaaaaactgtttgtctgcaacaacaattacaatggcaacatcaaaaattgagtcatatttgttcacaattttcacaatatcaagaaataatggccagaaaaccaccaccacaatttaaaacctcacacaagatacacgagagaaaagaggttccactgactgaatcatttcatggaatatctcttgttctaagtttccaacttcgctccacgtgtctttcaccccattaataattgcttccagatctctctctcatgccctacttccctcactagctagtgcatgaatttcttaaaagtaaaaaaaaatgttaacaaaattaaattaatttgattcacctcaggtgattcaataaataaaaacaaaagaaacaaagaaaagggaataaaatatacacagatgcagatgagtgtgtgtatccatacacaatttgtttcatatatgcataaaccattatggaagaaagacgtttttcactttataaatacccatttttggccactttgcttgcattttctgatatctcctgcctgatctgctaagtggacaaaagtgagaaaaatatatacacactattcttctaagggctggaacttgctctcctgtcctgaatataacttctccattttgtttgctcaccaggtttgtggagcaaaatactgaaacatcatctaaaatgccttctcaatggttcacctctttttggggtaaatttttcccttgaatccaagattttgcaacacatgaactagattgcaatttgcaaactagccattacaagcaaatgaaactttttgaagctaaatatatataaatagctaatgatttaaatgttgaactaagttcttgaggggtgaagaggttgttccaagctttcattttcttctacatttcttttcagattcttccccaacctgacaaaaatagctgaaagatcaaaatttacttatgtgttttgtcaagaaatacttttttttttgtgtgtgtgtgtgtgtttatacgaggacaataaaatgataagatcttctacttgattcagcttgattaagtcttgagggatattccaagcttccatttcctcttctttccttttcagattcttcacctgacaaaaatagctgaaagatcaaaatttacttatgtgttttgtcaagatatactttgtgtgtgtgtttatatgaggacaataaaatgatgtgatctttttacttgattcagcttgaaaacatggctcttccaaaccaatccatgtcatcagagtctccccagagaaagatgggaaggggtaagattgagatcaagaggattgagaacaccaccagtcgacaagttaccttctgcaagcgcagaaatggcttgctcaagaaggcatatgagttatctgtgctttgtgatgcagaggttgctctaattgtcttttcaaatcgtggccgcctctatgaatatgctaataacaggtacctgcttttcttcaatctcttcataaatattttgggaacattgaatttatataattttgctcatgcaaaaaaaatcttctgaaggagttaagcacaaagagcctaatcactgttgtgatgcagttagaatatggagttaatttttcctctttgttttctgtaatcaacggttcccttgtcttttttttttttttttnnnnnnnnnnnnnnnnnnnnnnnnnnnnnnnnnnnnnnnnnnnnnnnnnnnnnnnnnnnnnnnnnnnnnnnttttccttctatgagcttttaacctcattctcctcttttttcttcttctgtttatgacaattattttcttagttcttgatttggtgggcacatagatctggtgtaccatatagacatagaagcactatggttgttaactagtagcaagaggaaaggatttggggatgttatgaaggtctgtgagatcagccaatccctagaactcataaactttctgtttcctttttcctctttcccttctctctctttctttactcatctaaaaactaaagctgtcatctttccattagcccaatttccttagtaacaaagccagttgattagacaaaaaagaaaaagaatcacagtacactttcaacaaattgtcaatgactgaatgagttaaattggaataaagaaacgagtaaaaaaaataaaaatggatatttgtaacccatcacaacaagatcttctcagaaacattgacatttaaaaaaaaatcaaagtacactttcaacaaattgtcaatgactcaatgtgttaaactggcataaagaaacgagttaaaaaaaaaaaggctttttgtaacctatcacaataaaatcttctcagaaacattgacatttgacacccacttgcaagatctcgtactgggttaaaaataaccctagaaattagggttttattagggactaatacatgagctgagcatagctaattagcaaagggagaagaaaaaagaaagaaaccgttttctcttctcagcatgaccagaaaatagtcaaagttaatctcttaatatttattgctcgttgattttccccattttaggaaatggagtttggcaactatggttagggctttaaggaaaataaagggtggctctagactaggattttcttttttgtcttggttggaagaatctttgaacacgtcacacgtgatttttcagttcttgacttttgaaaaaagagtttaaccaagtaatagttggaagatggaattggtatctctttaactcttgcatctgaaccctaaagttggatcttctacaacacccctcctatgggaaactctctcttcagcatagagtaaaaaaattcttttacatagtttggaaaacagcaaaagacaatgaaagaaagtcatgaaacaatgagggtccaaaacgctgcatcatcataatttcactggtagcttttggagcctctgcatttgctcaagatcttgaactttacatatttgtgaaagttgtagtctgagaaagaaaaagaagggttttaagctgaatgagagagagagagagagagagagagagagagaggtaaatggggggcggggcagagagccaatgagagagttctgagcattttggcttcttccatgcagtgtacaactactgcttttgcttgctgaaaatttgcggtagctgaaatgaacggctgtgatgtacacacactttcacacagaaaagactatttttttaaaacaatatatggtatcagattcagtaaatgtgacttaaaaatcttgcacgaaatttagatggctagaaatcgaggtgagcaatgaggagtggttgagagcattatccactgtgagatgcgtttccttgaagtggcagagaaaaaacataggtctagaaatggttgaaccaatcatattgtgggaacctgtgccgccgtggcagcagcagccaatcagtggctcgaggatattaaggtatcagttcattgcaatactgaaaaggttttcttcttttcttttcctttttcatccctaattttctattattattatggaaactaaatcattttgttattttaagattttatttttatcacatctaatcagactttgactccagtcgaggtttctgaataatgagatcatgtgatgtttattacttttgtgaatttagttgcgtttgaggttcggttaactgaactagttggatgatttgacattaatttcaaccttggacaagctctatggttaacctcaaattaatatcgaacacagttgttcctttttaatttcttttatttttgtttcttttaatttacgcacaaagtaagaaaccgagttaaattggaagattcggatgaagacgttctagagactgaaatgtatcccttagagttagtgataaaatgataatactgttttaaaattagttgtttgcatttatagaatttaaagttattaatcagttgtgaatttctagaatttactaactacatttttattactagttatttacactttattattctattgcactataaagtataaactgcagaagatatgaatctattaataaagctgacagcttcacgaaagagataaaataaacgaataaaggaatataaattcaaaagatgtgatatatataataattcattaataaagtttagtttatattataactttcattaataatgttatcctagtaatttatacactcaaaccaagagataaatgtannnnnnnnnnnnnnnnnnnnnnnnnnnnnnnnnnnnnnnnnnnnnnnnnnnnnnnnnnnnnnnnnnnnnnnnnnnnnnnnnnnnnnnnnnnnnnnnnnnnnnnnnnnnnnnnnnnnnnnnnnnnnnnnnnnnnnnnnnnnnnnnnnnnnnnnnnnnnnnnnnnnnnnnnnnnnnnnnnnnnnnnnnnnnnnnnnnnnnnnnnnnnnnnnnnnnnnnnnnnnnnnnnnnnnnnnnnnnnnnnnnnnnnnnnnnnnnnnnnnnnnnnnnnnnnnnnnnnnnnnnnnnnnnnnnnnnnnnnnnnnnnnnnnnnnnnnnnnnnnnnnnnnnnnnnnnnnnnnnnnnnnnnnnnnnnnnaaaactggattgggtttatgcactttagaaggtaaagtgcacaaatcctaatcattcatattaataaatgatttagataaacacaccttcattaaaattgccacatcaaatttttctttaacgaaataaaacttattaaattaaaatagaaaataaaaaaattattttggcttgcttcacctaatcatcttcattggttacacagaagaaaagcccccaatacagttgttacaaattattcttcttaatctgcagctttatcttaaaatttcttactactcttaattggaattttttcttccaaccacttatccagcaatgtagaagccaataacggaagaaggaaaaaaaatcatttgcctaattaagagccaagtagcaaccagaaattagtagcatcaagaaaagaattagtacgagcctaaatagtggcccctctgtccagaagatgttgtctccagcatgacctcattggtcgatgcaactagtttttttttttttttttcattttgtgataagcacatatggaatcaattgagagagagaaatcacgttgaagacatggaggaaaaaaaattcagataaagcaagatttagaataacaatgccgcaacaattgtttttagggtttttgttcttttgtatattatgaagatgatcaagtgaagcacacgagaatattttctatttttatttaatgataaaaaatctatacgacaattttaattgaggtgtatcaatctaaatcatttattaatatgaatggttaggatttgtgcattttatcctctaaagtgcatgttgcactttagaggagtccaaccggggctagtcataacgaaagctagtgcactgtttgatttagctaagattctcaaaaaatccttttataatcaattaagttgcagggtttaataataatcacaaggaacctaaagcctttaacataactatcctagttagatgattacaaattttgtaagactaaggcatcctacaagttattaagattaaatatttgtttatctttcagaacttttttattttccaaaaaaatttgttactggagaaggagattgaatgctataccggaaatttggtcgtcaatcatgttctttgacttttgggttatgcttatataatcttgtaacaggacaacttgtgaatctatataaggtttttttataacaagggtcatactcttgcagattattagataaaaaaaataagtaattttctgtgcttatataatgttctttcacaatgatcagaaaaagtcctttatcacttagatgatgccactgtcatatcacttagcacaatgatcaatataatttataaataatcctactgttattatagcgtcaaagcttcaattgagaggtacaagaaagcaagttcagattcatctactggtggacaatctgcttctgaggctaatgctcaggtattaattcattattccttctctacattttttcaagagaaactttatttgaaactaattaaacaatgatagatacattaaattaatatcatgcagaaaaggaatttgaatgtaattgcaatgaattataaactaacatttttaaccatgatttcaaatctcagttctacgagcaagaagctgccaaactgcgggtgcaaataagcaatctgcagaatcacaataggcaagttgcattagtaaaaatttcactacaatatcgaagaaaaaaaaaacatatgaagagatctcaagtattatttcaatatttggtaaaaatgttttgaatcgcagtcaaatgatgggtgagggtttgagcaacatgaatggcaaggatctcaaaaacctagagactaaattagaaaaaggaatcagcagaattcgttccaagaaggtatttgtatttctagtaacaagaagtttctttctatgattttgaaagaataaagtatgcagatttactatgttgatctaattttatactttcttcctttgtttgcatgtgctacttcccaaacacctacatcagaatgagctgctatttgcagaaattgagcacatgaagaagagggtaaatgttttccttgtattcttgttttaatttctaaggtcatttttttttttttttgcatttattatctaagtggctcccattacaatttaatcaagtttcttaagtttagcccaatggtctctagttaagatttcacaaatatctgtattagggctctacaattgtttttcatattctgtttaagtttcctcttggtcaaatttggagatttccaaagatggtagtgaggatatatagatcattccattgcatgagtattattcatgatagcttgagtagctcctagagcctaaagatgaatcatcttaaaaagatgccactccataaggtctaaggcccccactcaataagatctagaaagaaaaatgaaaatttgtaaggattcaatcttgtgtataaaatataaatgtgaattgtagctgcaaatgttgtcacaaataaataaaacagaattagatcatataattattaacttgagtttggaattttttatttatacactttataatattatagactatagagtttaatttattttatactatttctacgcaaacatttttcaatattttcaagtagtttttcgagagaaaaaataaatttaatctgaatgttattaaaccgctttaaataaataaaaacacaattgcacaataaaatatcaattttaaagcaaatatgtgagacactgataactaaccatatcacaatattgtagacggtgtaacgtttgacattttgtatatgatgaaactttggcttagactatatgttcattcttatccctaaataaatctatatataggtgcctataattataatctgtgtttttttttgggagagggggtatacaaaatttcttctacaatgactttcaaagtatacatagtaactaatatgtacatttcacaggagatacacttgcacaatgacaaccagcttcttagagcaaaggtttgtcattctatcatcaatctacactctttatatatatatatatatatatatatatatatatatatatgaagtttgtattgnnnnnnnnnnnnnnnntatcaattttctttttttttttgagtgtgtagatagcaggtgagaggagtcaccataatgttaacgggttgtctggaagcataagctatgcatcgatgcaatctcagtttgactctcgcggcttcttccaagtgactggattacaacctaataataatcagtatgccggacaagacaacatgtcccttcaatatgtgtaagtttctcccttgctaggtttcacattcattctataacttgatatgtatttgtttttaattccttaatgttcaaatcactagttactacctattaacaaatctcataagagtcatcatagctttatatggtcatatcatagttccattgggaaagcagatatagaataaatgaagcaaatagttttatggatagatattaacttgcccctatgtataatatggtgaaaaaagggtaaaaaatgtgaagcacaagcccaaccaaggggtttagttgagtagtgttcgtctgagttcaatttctataaataaataaaaacacaaaaaaaaattataacaaatgaatctttcaagatacaaagggacatgcttgtggacatagttgttcttcacacaaaagagtcaactacaattatgatttcagaaaatcccaatagtcatagcatgtcaattaaaaaaggtaataatagaattgaacctctagtaaagatgattcgtgaaagaaattgggatttgtatatatgaaggaaaaaaaaaacatatggctaaagaattgctttagttggctttaaataaatgttttctcaacataaattgaaatttagtttcaataatagcttgagttagcacatatatacccgtaccatgacttgatttcgggcaaaagaacctaaataatacaaattaaataaaaaattacgcatttgggacggttttgaaactatttacaaatctggggcagtgggaaccgcccagaattgggcagcactggaaccgcccaaatccaggtggtaccaagggggtagaaccgcctggatttgggcggttccagtgctgcccaattctgggcggttcccactgcttttaaaccccaaaattttactgttcacctacatttgcactattccagcttctctctaaaagctctgccttctctctaaaagctttgccttctctgtaaagattttgcattgggttttaaggcgatttaacacgccgaaatagggcatgattaaacacgcccaacaaatagaggcgtcaccagacacgccctaggttaggcggcacacaaaagggggtcacgccaacatttgggcgtcactgacccttatataagggtgaccatccacaactcgtcgatatcaataatatggcattcctaggagaaacaagcagtcagaccatagctaattcaacattagccttcatttttccaaatggatcgatgaaacacaacgacacaggtgtttattttgagtgtccctctccaataccaatgcgggttcctgatcattgttcttttcaaacactgaagagtaggatgtccgacacccttatgctaagccgtgaccattttctggacgaaatctactatagaaagccaactgtacgtgtaggtcagcaatgtttttatcattctgctaaacttaccaatgataacgatgtttgcctaatgttaacgtgcaatgaacaaatgtcgagcgttggccctatagaaatattatgcagcatcaacagaacacctgacggtatactcagcctacttgaatccacaatcgtcccaacacatgatgcagtgctatattacaacggcaagtggaacataccacggcaaggcgattttgtgggatatgcattcactggaacaaatccaatcagatttgacattccttcaggatgcaacattgaaacactgaaggatctaatcaagcaagttgtgcctgttggccttcctccttatggaattaacaactcacaggtggtaagaaaattattttttagacaaccaacccattacgcttattcagacaacacaatcgaatatcacataaaagagttgataaccgatgcagacgtgttgaaggtcttagctgaatccaactattggaagcgtttttgcccaatacacattttagctgttttagcaagcccgttgcccaaatggaagaagacatgtctgctacacaacatatgtgaaactgctaagtaatgttgttattttcgtatgccattattgttattgttagtgttatttgtatttgcattttggtaaacactgtttattaagtgtggttaggtcgtgtggttattttaattgttattgttaactcaagtgatgtcgttattgtatttttcagttgacaaataatgaaaggctcaaaagttgtaaaacaaatttgcaattcgttagaatgaaatacattaacatccaagtacttaagcaaacatcataaaaaattcatgaaacagcacgacgatccggacaagctctccgattatgtccaacagccttgcaaattccacatctgctgcgtctttgactggtttcgatttcgtccatctcgtttcgaattctggtcgcctttggacgaccctttccacgcaacatttccctgtcgggtatgataactggaccatcactcggtggaatagcaccttcattaccaattggttgccacggaaatgagtaggcgtgcaccaaattacttatgaggaacacatcatccacgtactgaaaaggattctgacgcacatgtaaagcagcagctacggcgtgactacatgggtatttgaaggccttaaacttgccacattggcaaaaacgctctccaaggttaactgaatatgtggtctcgcagccctcaaacacctcaaattgtgttcgctcaagattatatatgctgacgtggtggcctgtaccaacggtctggttatgcctcataacatccatcacatttttgcaatatggcattgaaggatcaacttgtgaaagagctgcctgacccctagtcacaaaatattcaaccaatctgctgtacgtgtgcttcaccagagcagtgataggcatgtttcttgctcctttcaacaccctgttgactcattcggacaagttagttgtcatatggccaaatcgcctcccctctacatcatatgcacgtgtccacttctccttcgggatgctatcaatccattctgcaaccttagggctgctatcacgaaatcgtgctaacgccacgtcaaattgaatcatacagggtgtataacctgcaaaacaatcatcccattaacactaatctccttacgcatatatccatttaatatattcacagaattgttaatcatacctaaattcatcagcgtcttcttcaagcgttgatttctgaacttttgattaaaattactggcaatatgacgaaggcaaaacacgtgatgagcatgaggtggttgccaaccaggatgattcaccacagcatacagtatgcttcggtgcctatctgaaatcagacaaatattttgcctttgagtaacatgcaaacgaatgttagccagaaagtatgaccaggcttccaatgtctccccgtcaactatggcaaatgctagtggcagacattcattgttgccatcctgagtcgtggcaatcaacaatttccctgtatacttcccatacaaatgagtgccatcaatctgaatcattggtttgcaaaaattaaatgcctcacaacactgtctgaaagtccagaacatgcgatgaaacacgttttcctcgtacgagtcgatttgccacaaaataatctttggtttgaatatcataaaatgaacctggtgaaaaacgaagcatgtagccacaccaccggggcaaatatgcatatgattcttcccaattcccataaaccattgccactgctttctgctttgcaaaccaggccttacgatatgaaactctaaatccaaatgaatgggtgatcctttcctgaaccaatgcaatcgacacagacggctcctccctgatcattcctaacaatgcaaatgtaacatttactttaaaattaacaactttaaagaaccattatttaactcatatacaggaaatttaaaaaatacgtacctactacaattgatgcaataacatcagcatcaagctgtctatgaccctgtgaaatatggtcatttaggcaatggtgattgccaccccatcttgaaacaatccacttctcaccgaacgccggtttaattattctaaccctccatgggcaaccctcgttatgagcaacacacctcatgttaaacttgttgggcttgctctcaaccacatatgcttcttgatgctccttcatcaggttccgcttacatgcgatttgtgcgtcctttttggaggcaaattcttgtttaacaaacaacggatcccctaattgccatggaccctgaactgaaccggaaccggaaccggtaaaagattcttcttcgcttggatgactccaatcaatgtatgtgtagtgaggaattccatcccaaaaaggagtcacctcagcacctacaaataccaaatcaattgaataaacataacatgcacactaaaataatataacatacagatatataaatgattttagtcatgttacataccttcaacaggttcttgtgattgtctacctcctacgtccggatggtgatggatttcagacgaccccgcagcagtgcctgcttggaattcagtcacatccacaccagcattgtcatcattatccgacgcactagcatcctcttcaagaagacgatcttccatggcaatgttctcatcatcgtcatcctcttcgtcgtcatccataacccaggttgggtcatgtgaatcttcctcagacacatttacaaatggagcagcacatgacgcagccacatctacaactggagcagcatatgacgatctacgcctactaggatttaaaggaattgacctaataggtaaaacatcatctgccacagtatactccacgtacaactctaaaaaatctttcgttgccaacttaaaaaattccaccattagcaactctacgtcttcgtcgtccacaacttcaaaacccatgtactcttcacgttggcataatcttcccgtaatacgtgtgatacattggttgtcttgcagacctaatttttggcgtatcttcacatgtacatcacctattgtcgagcttcgcttcatacgtgtctgccttttttccccttcaaaaacaacaccttgtctcccttcaaatatccttccattataatataacacaacacggacaaactcctcaccacctgaactcatttgtttcactcaacaaaaactacataagttgaaaaaaattatgtcagaatatgttgttaccattactcataaaccatagaccctaccccttacactatcaaattttataatataaacactaacaatttcataatataaacattaactaactaaaccctaaacattaagtaaattcaattgaacaaaaccctacttagaaaaaccctaactcgtaaccctaattcaattgaacaaaaccctaattcataatccctaattcgtaaccgttaaccctaaactgaagtcactaaattgacaactaaactaaatcctacaacctaacattttttctacaacatgaagtaaccaatatggctctaacaaatttaaaattcaacaacataatatattaaataatactcataagttaaataatttaacttacctgttggcagagagaggtcagacaaaaaagctttagagagatgtcagagaaaaaatttatagagagatagaaggcgcaacaggttatgtctgaaaaaaagtaaaaagaggaggatttaaggcaggtggaaccgcccagaattgggcagcattgaaaccgcccaaatccaggcgattctacccccttggtaccgcctgaatttgggcggtttcagtgctgcccaattctgggcggttccgactgccccagatttgtaaatagtttcaaaaccgccccaaatgcgtaattttttatttaatttgtattatttaggttcttttgcccttgatttcgtaaaacaaagagaagagataatggggagtgaatgagtaaacaagtcctaatataaaatacaaaatatatacagaaccgaactaatttgcattgcaaaagttatgttttaatattcaagttattttgtccgttgacaggcatatttgtgtgtcccatggagacttgacttattgtatatttggaattaatgaacataaatctaatgcttgttcttttatcttgtactctatcttgtgcagttgaagagtttaagcttaagaaggagaaagacttagatttcctattgtttgtatttgacatctagtatgatatatagaaatgctaaagcctaggaagtatatatccagaactcaatggaggcaattcatttaagtattcccctcagtactatgttatgggctatttagtatgtatacaggtactctgattacagagatttgcaccatgtcatattttgtcaacttttgtatacttttcatatttctcctgtaataggcttctatatatgtctatttcatatttcacttactatgaattcaacatcttactcatacatgcacctgttcttgagtatgatttttttaggaagatcattgttatttgtgcaaagtatccactacattttgaatatgattaatttaagatttaaatacattttagtctttgtgatttatcatttttttatattttttccttacaatttttttacttgttttgttttttagataattaacgcattaaacagtaaaaaaaaactatctaaaatgttataaaaacaaaaaataaaacaaacatttttgtagagactaaaaaaaattataagaacaaaatgcaaaaaaaatattataagaactaaaaatatatttaagtacccaggctaatttccagcattgttaagcatatgcaagtgcatatcggcatcgactgcttcaacatctacatactcagctctatgagaaagcttgaaaggaatgttgtgatctacaaccataatgtttctttcctgttagtaaaaattgttccaagggcaaaagcattaacaaagtgagaaaataaaactggaaaaaataaaagcactcaagtatctgcaatatcagtataatatgtattatgtgtatctgaatgctaattaatcaagtttgttagattaaaagttgagagaaacaaataaagaaattagatctattgatatatatatatatatatatatatatatatatatatatgcgcaagggtaagtggtcataagttcgggaaacagtttttttgaatatgtaagagtaaggttgcatataatatttctcctccttacttgcgcataacgtgcaacctccgggtaataaagtatgtaaattttttatatatgcaaggataagattacatccagacaatgaaatatgtaatttatatatatatatatatatatatatatattgtgggtgagagagacaatctttgaactttttaaaatatataaaaacaatgacacgagctgatcaaaagggtcgtactgatatgcaagatgagaaaggtggaatgttagacaagataaaagctcaaaatagacaagcagggtaagaagaatgattaaactcagtgagaagtgtcacatgaaaataagcgaattgagaaaggctactgtgagtgtgaccatcctacttagcttcactgcctgacaaagtcactttcttgatacagtagtaaccacttctctaacagcttgtttgagtattagagcctcacagaagtgttctaagcttcatgtggttatattcaaagcttataaataggattacaatcaattaaaacactgttgggcaagttgagaagccatagaacagttataaactgttttctctgccactctgctcaaacaaactgagtagcatgaaacttttttcttgtgtagtgtatccctgctctgcagtaacttttgaccctttcctagagtgttttccagtgtagatatgatacacattcaacaacttatacaacaattcatgcaacattacttttttgcgtctatctctctccatcatcctatcatttattatatttcaaattcaattttcctctctttttctctattggttgtacattttgttgtccaagtatcatttctcattgttttaattcagtctgtttgttgagctctatctttttttcactcttccattatttatacctttgacattgtgaccgttagggcaattgaatgttttcttaaaactcgttttcaaactcagcttgatgattaaccaaatcatcactttagttaaattttttagaaggatactattttgcaggtgtttatttcagctataattaggtaaaggtttcaagtattgggttgctgtagcgaatacacctcattcttataggtctacaacctttatttatatcttaatcttggtgataaccggttataaccataaatccaaaaaactaacaattaacatttaccaaaaaaaaacaataaatccaaaataaattaaacataattaatgcctataccactatatacaacaacagcaataaaaactatgaaagatactggatagttttccctttccttgagggtaagtggcccttggcaactctgatatctgtagattcttttttttttaaaacttcaatttctgtgattagttagaaaagatctggaacaaattaactactattcaaactatcataaagaagttcttgatctgcaggaacaaaagtacaccaatacatatgacatgaaatagctatatataacaccacaatattgcaaatgaaattccaataattgattgcaattaatctccttcgtctacaatatgattattataagttctagcaaaaatcaggtacatccttaaataaatatggttgtaagagtttccatcttcatgttaacttaacaagatgacagatatccattgggtgcgcgatggttggaatgggagcattataagcacttcttgcactgagttggttggccatctcagtaggatgaaatgcatcaaaaaatacgtgtaggtttctgttcttgcatggcttctcattagggatacactgcccattcggccccactttgcagcacataacagtttctgaaatccctacatgcatggggccaccaacgaaagttaatatatttaataaacaacatatctatttacttcaatttcttaaaacgatatgatcataattgtattaacataatagtaaaaattgaagacatgcatgtgcatccttttggtcatagtttcaattatacaaattcaatttagccaatcttttgtggaaagtacaaagatacattatatatgcattttacaagctttctgctacgaggaaataacaaatacgttaaaaccattttagatgaataagtgtttgaatatatacaggcacagtaaattatacaaaatccatacttgctggtatatcatatacatcaattgaatcttagtactactataattttggctatgaaaagaagaagaaaaaaaaaattgttaccttgtaactttgaggcgtgtaatgagaccacagcactattaatgaagataaatttggcatgaggtaattctttattgaaacgatcaactactggtttaagcttatcattaaaaatgagtgctgctctattttcctcgtcaacacataatgacccatttttcccatgaatagagatttcatgcggaatgcagcctataagcccgaggcctatcaaaacaaacttccttgccccaagtgcgtgcaaatcctgcacatagaaacaacaaaagtagataacaaaccattaatttggtgcatcatgtatattataaatgttacttatattacgtctgatcctttttttaagaaacaagttttagtgtattttatactaaaacttgtttctgatattatctttttctagaatttgaagtaaaataatacctttaaattccttgcatattcttggacaagggccacagcatactgttcaggagaatactttcgacttgatgggtaatgctccggtaagaagtagttgtttaagtagtcattgctgcctatattcacataatataagcacttatttaggtggtggtgtgcttggtcagggcctccaagtttctgagtgatttgggaaactatgactttatgattttgcaactgcaatcccaagctaatatcctcacccttcaattaaaaattaagtaaagtaaggtttttgctccattagcatgagaggataaattaagtaatacatccatgatatattgtgtatatacacctaatatcaatagctgattttctaataaacaattgaaattactttacctttaaagtgcgttttagcttgtgagttgttcaatttaaagaaatcagattcaattaagtaaatgaacatgtgatttgatttaatgcatgaaacaaatgacacatcacacaaatcatgacaaattaaatcacaaaggcaaatatctcaaaaccaaattataggtaagatgtatatatataaattagatatatgtagtaaaagaatttgacatataccaaatgtaacccggtctcgttgcgaatccccgctgaaccggatgcataattcacgcctttgagtatgtctgaaccaccggtatttgcaaagggtgggataaaattttccaatcccaaaagctcagctgcaataacataattttatattgaataattaactgaaaactcatctatacattaaaataacatgaaaacaaatcatgttaatctatggaatttattcttttcaagttatcaaacttaacgtgacaaaatcattgttttttttattagaatttagtttggattccttaacaaggattcaaattctagtctttttatgaaaaaaagaagagatcttactaaaaataatttctgaagagatcaactatggataaaaccggtaaaacatcttttgcacctataatccaaaaaaacttgattgacaaaattaaagatcacatgtccactttcattaatcgtgtctcaacactcaagctcttcaaatgaaactccagacaaaatattttttgtccatgcccaattgcaactatgtgaaagaaagatatatacatgttgagaactgaattattactgattatatcaactgaagtacggccgttggtaaatcttccagtggggccaagtggaaaatcaatcccataaggcaagttattaactttggcatctgtttgtagattgttgttgtttccactatcagataaagagtctccaaaaatgaaaagacaaggtacttggggcttcccaacaacacaataatgttgcatgtatgttgcactgaagaaaaaaatcaccactaaccataacttggtttcataatccatatcaaagaaaaatattaagagggcgaagttcagatccaaaatattaggggtccaaacacaagggtgactagataacatatatatataaagggagagagaagtgagagaaaggaaggtatgacccagtttaatttgtggagaaattcgttgaaataatttatctatgtgacacattgtaaggccatatgttgattttagtaagtgaatttcatgcacacactattagaaaattactggaacctacatacggcagaaactagaatttcgccaagccatgagattgtaactatctcaagttttcaatttggacaaaatttaaatgaagttccttatgagtgatttttatttattttatttacttgtttaagaaatttggaggtaaaaggagggaaaaatgagggagggttaaaatcactaccttttaatttctatctccctctcaatgttggtagagtaggaaaatgatttataattttaagactatgtgacttaaattattttaatattttattgtatcccttttttctctattatcatttattagatataactgcatatattatcagtttaaaaaaattacatatattctctagattttttcttttcctatacgaactaaagaaagtgatctttcatgatcactaaatcaaattaaaaatgacctcttttttttcctcctcttttctctgttaaaatttctctcctccacctttactcccttgaactaaatacactatacatctttgtattaaatattgcagtttaataattcacacaaatatttatataaaattccatgatacatatatttattatttataaaaacatctaaatgtcgtcatttaaataataaaaaatatagtaataaagaatttaatttaaatcctggtttgtttgaaagaagtcaaatgaaagcaactataaataaacatagaataaaatttattcataaaaattaaaaataaatattagaagatttacaacactatctttatcttactcaaataacgaaatttgatcactcattagaataatatttcctaaaattataattttttacaaaattttcacaaactgctcaaggtaaagtttgaatttaatagataccaaaaattgaatttaattacatgagttgtttcattaattaatttagattcaaccacttacaaaacaagatacaaccactttttgaagttttagatttttgcccatttgttttgaagcatttgcttttctctgatacttctgctgctacttttgttatagattgcagctagttttctgttttacttttattttttactagctcaattgattaaatatgatatatgaattattataaatcttttattagttcttacgaataaaaaaaatacaacacttcactgtttgtattttctaatacaaaattacatataccgccggcagctcaatggtaattgtggaaggcagtaatgctcaaagccacatagcatgccacgttaattctaggtcaataccatcgagctactacacctcttacaaaatttgagctactgtgttactcataaatataaatattgtaaatcttcacaggatcctaaaacttggcattggaaaatggttttgggagcttccacaacagtcgacgttattgtgttcaaggcaattctgcgtcaatcaagccaccaatgaacatcatatcctcatctccaacggctagtattttgaaagaaagaccaaatcagacttcataacgtccagcaaaatccaagctaaagagtatatttggtaatgagaaaataaataatataaatgaaaataaaaagtggcaataagtgagatataaaatgataatttgagttgtttagttaaagaaaaatagaaaaaaaataagaataaataaaaaataattcaaatgaatcgcaccattctaaaacttattttcgcactttccttcaaagtttccttcaaagtgcagtgagccgaatccaaactctgattgtatatctctagcaaaaataacaaaactctgtttgtatataatttgtccattctccataaaaaaatagttacttaaaaatagtaaaatacgtactaactctgttttttttagtgatttactctgcatttttatttttaaagttcttattttaaattttaataaaagttgggtcaaatataggcacacgttttttataatgtgacatatcatttatattttaatttctttttaatttaaatttatttttcttaaattaaatataaatactctttataattttagttttcttatttgtattttttaaattttatatacaatataaaacacacacacacgtattataatttatatgtttaaaaactatttttcttttcttgatgccgtgaattccatttttttttaattaaagtaaaccttttaattttctactcagttaatttatactggaaatatatatatgtatatatatatatataattataaattttacatgcattaacgatagccgtaaaatatataaaacccttgccaatttgacttctaagtttattttgtcatcaattatttgtattaattttttttaccagaaatgttaaagcaaacagtttgttgtgaaagttatcttaatcattttggaagaaacattcaaaaggagaatcgatcagccaacaacatatatactattattcactataattaaataagcaatcttccaaaactttacgacaaattacacctgtacttgtgaacccatgaacatttagcatatatgaatatgtaagagaaagagagaaaacttaagactcttatgccttaaaaggaggagaaattcttaggtgcacctggagtaagacatttttcttgctctgatcctttcattatttgtcatgtcagtattgtgggtcattgttgtttcttacattaatgacaattgttaattttcctagatagattaatgacaatttttattttttctaggtagattactgacatgacaaacaatgaatggattagagcaataaaatgtcttgctccgggtgcacttaagaatttctctaaaaggagtaacacattcgaagaacattgaatatggttgtggcacagcttaatagccaccaccctctggaccatgttcattgttcagagatcatatctgagctaagcgttggatatcaaaagggtaagcatctgatgcagattgaacactgtaagctctctgagccacaacaacattgccagcttcagtaggatgaaaagcatcccaaaacaagtactctctcctgttttggcaaggtgtttgcattggaagacatgtaatttgaccattgttccttccaaacccacagcacccagcatttgtaacactgaaacctgaagattgattcatgtcaacagaactttgtgagttaatattatttgatgctaaaaaaaagtgacaaaaatcatgactacaaaataaaatgcattggtttgaaaataattaccatagactgaagggttgtttataatatcttgaaagatgtcataacagttaatgaagatgactcttgcatcaggtagtttgttgttgaattggtcagtgagacctttcagttttttgttgaatatttggattgcagaattgatcttttccacacatgttttaccatctgggctgttttgggccaattcatttgggctgcaacctaattggcctattccaaacagcacaattttccttgctccataattgtacaaagtctgaatgacaaacacaaacagtcaatatttcaatttgtggaaagcttttcaattttcaatttcattcctgactttataattgaaaattaaatggctattttgaacactgcatgttaccactatattataatagaaaaattgaagatggtgaatatcaaatggtaaaagacagagagagctaaagactaacttttagtttttcagtatatgcttgaataagaacatcagcatactcatctggtgagtactgcctgctgctggaatagaattgaggcatgaaatagttgttgaggtaatcattgctgcccaacccaattgagtatatgcacttgctcaagtaatttgcagctgagtcctcacttcccagtaaatttaccacttgagacactatgttttggaaattttgcacctgcccactaaaactaatacgccctccctacaaaatatatgaacaactttatagcataaataccttaacaaatgaagattaaaaacagtgatgttgcatgaagcaaaaggaaactataaaggggtacaagttgctgcccagtttcctctctaattccagcagcagcagatgcataattgactcctttgagtatagcatcgacgctagcatcagcatatggaggtatgttatcatcgaatcccaaaagttcagctgttaaatttcaacagaaagttaaaacaagagtgaaacctttctatggttatatacttacaagaatcaattttatgtgccagatctacttttctcttgttcctgtttgtttttaccaaattagttcttctgataagtaaccatctggccagaggcggagacaagacacggggtcgccccccctaaaattttattatatatatatatatatatatatatatatatatattaaaaattaaaaaataatttgacaataaaaaaaagttacattgcataatataataaaatataatattttttaatattatattaaaaaaatagaataaaatattttttaggattgcattcaaaaataggatagaatattttttaatattgtattaaaaatatttaatattatattaaaaaataggatataatatttttatgattgtattgcattatataaaatatttataagattgtattgcatattataaaatatctttaagattgcattgcataatatgataaaatatttttaggattgcattcaaaaattggttaaaatcatatgtttaaattagtataaatagaaatgtgttgatagcatgcatttcattccaaataatattagagcgctttagagagtttatatttgcatcattaagagaattgctatgagattatatagaagtgtttgacaagtctgattcttaactctctatcagaatttaaaggtacttatttattatcatagtggagttgtcaattggattaattatccaatttgaacgtagtcattttttatccaattggatttttcacgctaaaactgattgtgtcttctttatctcttatctccatattattactttgaatttgattttaaattgtgaattattttattaagactcactaaactttgccagtttattcatcaacccaccctatttgcaatttgtctagtatgtggtttgcggtttacatctttttgtatattagatttgtattgtcttcaaagtacttttatttatgatataattatttttatgttcatttcctctcaataaaatttttgtctccgtcactgacagtaaattttcctatttctttctttatctgtaattctagaattctacctctttatcaatgaaatgaactacacaaaactctaatcttaaattacatattcaatgcgggcaaacagatccatgtaaatggaatttaagggtcagtcacaaacctttttgaggggtaactaactcagagtagtgccaactctagtgtcaaaagttttactttttttcacggatgacatctgcatgttacgccttttttaatttttttatttcaccggtaaaaaatattaatgcatcttaattataccctttccttctaggtggtggacatttattgtctgattttagcataatacagcttgccatccaatagaaaattatgcatgcatatattaagatgcttttagttgcagttaattgataggttcaaaaatagggaagaagaacaacagttcttagaaccattttgatgccattgactcactataactatgacttttacaatgacgaattgatgattgttataagtccatgcatgtgaatctagttttaagaccatgcaaagatgcaaacgtgtataaatttcaactaaaatgctgcatgccatgcaaagtttataagccaattaagcaagtgcaagctcaccaattgcatcaacagtggttttcccattggaaaaccttccggaaggtccaccagggaagtcaatcccataaggcgcgtaatcagccctagccaaagattggagctggttgttgttcccattatcaaccaaagaatcaccaaaaatgaagtagcaaggcacttgtggtgcaccttgaacaccactccacaaaccaagagaaacaacaacaatgagtgccaacatgcttattgtgagatccaatgcttccattggagcaagaaacggtgttgcttgcgaggaattgaagtgaataatctaggtagctaaggaagataggggcatgtgtgagtgattgaatgtggaaggtttgacacgagtataagtatatatagtagtagagagataaggctctatactagtagtagctatagtgtagcttttacgattgggagtgttagttaggtgcattaaatggacgcggatataatgtgagattgaatgaaatggctccactaccaattccactgtaccaccccacctcattgatgaaatctgatcattgatgtgatccagctttaatttagagttgcatcttgcagggatggaaatttggacattacaacgactagttaaaacactcaggtattatgatacgacactttttatgtttttgttttgagtttttccggaatgttagattaggaatgttaaagtttcgttcagtatgggagtttttaaaattattttcaggaatttaacaagtctggaaattggttttcaaataagtttcttactggtttcaaaaattaagtttcttcctcaattttttctctgagaaagggtggaaaattcaagttttatgtaaaatagaaaaagttttagacacttgtatacgtgattttgtcgtgttcaacagaacgagctccgcagcacgagggcctctatatgtctagatgctacatcgtctccctatatgtatccatagcctacccgtcagagttgtccaaccattaatatttgaagttcattcccaagaaagaagacaaagataatagtattaacaagttaaaaaaaatataatcactactataaaactgtattttactattccaatcgatttccaaaaattgttttaaaataaaatgcgatgtgttaaaatatattaaggtgacaattttgtaaataggaatgtgcaaatcacgaaaatcacgacggttttgttttgcgcgctcaatttactatttcatctccaacttaacgtattcactcactcaccctcattgtggtttccctcacttagctcgtgctcatgccttccctcattgtcgccgccgtcgaagatgtctccattttcgcgtctcctccattgtccccaaagcgcttactctatctcgtccctcccttctctctctccctcttctctccacgcgccgcctcaccttcgccatttgcgccgaatcccaaaacggcgccgacaccatcaccgcacactacgacttccacctcttcaccatcggcgccggcagcgacaacgtccgagccgctcgcttcgctgccaactacggcacttccgtcgccatctgcgagatttctttctccattatctcctctaaaatcaccaaaggcgtcggcgaaacatgagtttcttattttcaatgtttttcaatttcgctttttattgaactagggtttgtcgttgtggaggctagtgaaacagagtttcgtgtttctgaagatttgttaggtagggttcaggctaaccaagctttttcaacaagctaatttgtagaagctcatttgtttgatatattctaacggatagcattctatcattggttctgcttattcttaatagttttcaatttaatagtttcccacttcccctacatctcttttgctatatatgctactagtcaattgttcaggaatctcattgaattataaatttatatatccatattaaagtaaagagctattatagtgaaagtacgttgttcccaacttctattttatttattttaacatgtcctgcatattagaattggtttctgatagaacataataacattattttatccatttagtttatggcttttggggtggtagtttgtatattctgtataaccctctaatcccatatatattttccaacttttctgcacttgataactcttgaaacaatgctttgggtgtatgaaacacatgcccgactggcactggaatctggggacctgtttgagtataatcaggtttgttctgtatattttttgaagaaaagagacttttatgttttaattcattttagtctttgattacttttttgtacttgtttttgcttgttatgcttctgtttcttttgttttcctgagatcaaggattaatatacttcattaaaggtaatcaatgctatgaagtagtgatttataattttaatcaacgagtaaaatttggtcccatctttgcttgttttggaaatacgaatgatttattatagaagttgaagatgttattaaccttgtaattggactttagatattgacgccatttgagtgaatgtagtgccaagtctcagttacgaactctttatgccgaaggcattgaggggtccaataataatataattaatgataagatatattcatattttacatcaacttatatgttaatctgatatatcttatattattattatcattattattattattattattatttgtaatgtttacactaacactatataaaatttttgttacataaaaatataacaataaaaaacttaatgtgaaatcgttaatatatgatttcgcaaaaaaaatcattaaatatatgatacttttataaaatcttgatattaatttttcaatacaaaataatgtaatataagttttacataaatgcactactaaaaaaaagctctttcatctaaaattttaaaaagttaatataaaatttattttaattattaaaaaaagattaattcattttagctgatataattaattaaattgactcataattattagtttattttaacaagtttcaattattaatttactttgactttttaataattttacatttacgtgactaatttgtattttttatattttgtagtgatttggtgattaaataccattattagatatgaagatcataaaagaaattaaaagaaatgggcagcatattttttagaagttaaaaacaagcgatttaaaannnnnnnnnnnnnnnnnnnnnnnnnnnnnnnnnnnnnnnnnnnnnnnnnnnnnnnnnnnnnnnnnnnnnnnnnnnnnnnnnnnnnnnnnnnnnnnnnnnnnnnnnnnnnnnnnnnnnnnnnnnnnnnnnnnnnnnnnnnnnnnnnnnnnnnnnnnnnnnnnnnnnnnncatgttgggtttgttataaaacaaaggtaacattttaaaaaataaacaatactgatttctagaaaattgtcttaaaatgtttactttttaaggtgattttttgaaaaatcatctttaaattgtcacatgttttttaaataacatattttacgacgatttctaaaaaaaattgatatagaaatcgagattgtaagacgacttaaatatcgttgtagaaagtgttgactttctacaactacaaattcaaagacgattggaaattatcataaaaaatattcaataataatctttaaaaggattttttataatagtaaataagagtgaaatagtattttaagtaataattttttttattttttttaaaccttatcattttattatccctctatttctatcatatttttcttcaaccaaatcatctcttttgtattcaatttctcttattttctcttttcatttatttttttttcgttctctccttttaatttcatcctcacaaccaaatgaccccttaatgaacacttaggagataagcaactgaattatacgctggaccaaataatgaattaataaagtaagatgttggtatttgattttgacagaatagatgtatttttttagtggctgaaaatagatgtatgtgttaataatgtctacttggctgccttgcaaatcatcgtagtcatctcgcgtattaatttaattaaataattggtcatgcgaatggcaagtgagttacaaatgaaaattactgtcaagttaacgagagagtaattaaaacgtagaaaaatgttagaaatacttgtttttcttaatctttgtgagagaaaagaagtttaaacatcaataatttgagatggaggaagtaattataacttgcaaattaaaagagaattgatcccgaataaagaagttacattatctgacagcgttcaatatttctgagtttatgcaaagatatggatatgaatgcgttgtaaaatgattagatcatctgaaaaccacaaatataaacttaacttataaattataatcgaaaattcattaaaaaaaaaacttatatcacatatatcaatcattagatggaagtgcatccttcatacagttcttttatggaatcttgaggatacgtttcctgcattaatattacgttggagatatctacatgaaagtaaatgtcaattaattattgtgaataaaagaaaaatcgaccgcctattattacctcaaacatgcactagaggatattgaaggacgtatttcacaccagctttaactagcaataactaaaattaaataaataaactttaggccaaaatataagaattgcttttaagaaatattttttataacataatttatttctatattataaattcgattttttaatttcaaagaaaagtattactattttgtacagcttaacacatagatcaataaatatataattatttcaatttatccaataattttaaatttaagttttgaatacataagttaaatatttataaaatcagaggtatctaaataattataagattgataaagtggttgagggaaaaaaggagaaaaaaataatattcgttatttaatcacaaatcaccatttaaatatatatatttttatttaaataactgtataaaaactttttagcatatcggtgtataatcttttttcttaaataaacaaactaacaaacatccacagataaaaagaatcagaatcacccaccagattaattgacatgaacaatagcatgcagcagctagggtaggaacagcatctacaaattaacgactatgaatccggtctttccaatggatgaactggttattagtgattatgatatatggcccagcggcacatgctcagaataagaatgtctttttctctggatctaccccttttgggtttcatgtatgggatggtaatttggaaagctggaatgatcaaattataaatatgccccttttatttgtctccttgattgtccctctacacataacttaatgacacggaacgaaaaagacaacgatttgatatataagcatatatgtcttaataaattataaaatcacttaatcttttttattatttaagactctcagtattaaaaaattgtatcactacaagaaaaagacctgtttccgataacatatttccgaagcattaatattccgtcggaaattgcgttttttttttgtagtgtatatattatgactcaactaatttaaacagttattaaggttaatcatatttttaaatataataaaacatatgacgactgatcaaattaattgggactaccttttcagtgctaatgtgatcatctaataaaaagacaagcaaaatattagcgacaacttgttattaattagcattcgataacacttatttaaagtttttttattctaacagtttgatccatcctatgaaatcatatcacccatgaaagttgttaattaagattcttctatctagcaacaccttaattaatatggcataaccttaagagtttgttaaggattagattcaaagggccgggaaaagtatttatgatgaataccttgacaatcaaagacagaaaacagaataataacggacacttttttattagccaaaagagatttatttataaggtaccggcaaacgccaaaaaaatgatgatgatttacaaagacctaccccttgcacatatattcaccagcttagcaatccaactcgaccaattgtgtctattcccaagcccataaatatccaacccgagacatcaacatatcgcatattacatgttgatattcatccaacaccagtttagacccgatttaagccatctgatctcattttcctccccattacaataattcccatccatcataaatattgtatacaagacaaaggatttgataccactcaaaataagagaaatgaaaagctttaagtttagcctccaaccatgaccaagacttatattttgttacctccatgacagaaatccaagtcaagtaattgatagcggaagatgatgttgtttctatagcaccataataacggacataattaatgcaagggggaattgaaaataagcttaaaaacttctttaaaaaaaaagattccataattttttggggcaaataaacacattcgtccataaaattgtaaggcgtcacacaaatttattcttaaaaaacgaaaaaatcaaatttagtctataaatgtgcaaaaaatgcaataaattaatcctacagacaatttaataacaaattagtccttaaactttataatttaatgtcaaattgatcctcaaaaaatataatttgtaattaaattgatctttgaatattataacttaatgataaaataatttcacaaatttaacgacaggactaataatttgatgcactttttacatatttagggattaaatttgtatttttcatctttcatttcatagatcaatttattatttcattacactcttaagataaatttgactatttttaaatttttaaattttttaattttataatggtgaaagtgaattttgaactacttgtagggtcacactagcttattaaatggacactttcaccccctaactttaggacgacaagtgctctcaagagtcaagatataaatttggtcttcggaagccatgcaatactttgtagctaactattcctatatgacggggtctagcatgcgaaaggcaaacatgtttcgtataatacaaaagtaaggagaactgttggatttgcatcttcgcggtacccttggttttttttttatttaagttaggcacagtacagtatgctacaccttgttgaatgcaccctatggtccacagggatttagtctatttgcatcagattctaatgttgaccgtattctttgtgtcttcgaatggagggagcaaacgaacaacaacttagtgaagtagcaaaaatattaaaaggttattaaaagactggggttagaaaaaaaagttgatggtttaagttttataataatggtgggaaaattatgataattgttgaaaaagatgaatagcaaagaaaaaaaatgaaaaaataagaaaaatatttaatttatttaaaaaataccatatattgatgttaagtaattaatacaattaatgatgctgtaattttgtaaggttgtgattttagaattttgtgtttttccataaaataataataatataaattatattaattgattaggtaaatgtatattaatgaaagttgtgttataagtttgagttgatgtaaattattatgaaaagtgaataataaaaatattaaaggattttttaattgattggtagttttgtaaggttggtaaaataaaaaattgtttttttagaaaataataataattgaaataggatgtttgtataaatggaatttttgttataagtttgagttcggcattgaagtaaaataatatgaaaacaaaacaatgaaaaaatatagatgaggccataggtggggccatatttttaattgggaagtataaaatgcaattattaataaactaaaatttatgcttattaatgaataggccagtcgaagcaatgccttaaacaggtgaggccataggtgccttaaataggtgaggccataggtccttgacaaattgtatgacatatttccacctgtaacgagggtatcccattagaagaaagtaggaaatagttattattaattgtaaatatgaatttaaaaaatgtgcagtccttaagaccgtaatgttgtcctatttaaacgacccaaaaatcaactgttgaagaggtttacacattttattagaatcattttaatgtttaaaagagtttaattcctataaatatagatagcgaacaaaaatttgagtttttatttttggagcttaaatgacttaagtagactgtttttatttttcatattttatgcaaaataaaacaaatatgaaattgatatatcaatttaatgatataatatatgtataatagcttaagtatatattaatttaatgatatatatataagtatataactttgttgatttatgaattaatcaagtagagatataaatagcataagtttagataattttttaaagagtctaactttgactcaagttcaannnnnnnnnnnnnnnnnnnnnnnnnnnnnnnnnnnnnnnnnnnnnnnnnnnnnnnnnnnnnnnnnnnnnnnnnnnnnnnnnnnnnnnnnnnnnnnnnnnnnnnnnnnnnnnnnnnnnnnnnnnnnnnnnnnnnnnnnnnnnnnnnnnnnnnnnnnnnnnnnnnnnnnnnnnnnnnnnnnnnnnnnnnnnnnnnnnnnnnnnnnnnnnnnnnnnnnnnnnnnnnnnnnnnnnnnnnnnnnnnnnnnnnnnnnnnnnnnnnnnnnnnnnnnnnnnnnnnnnnnnnnnnnnnnnnnnnnnnnnnnnnnnnnnnnnnnnnnnnnnnnnnnnnnnnnnnnnnnnnnnnnnnnnnnnnnnnnnnnnnnnnnnnnnnnnnnnnnnnnnnnnnnnnnnnnnnnnnnnnnnnnnnnnnnnnnnnnnnnnnnnnnnnnnnnnnnnnnnnnnnnnnnnntgaatgttaaagtttagcttagtatgggaatttcaaaaattattttctggaatttaacaagtctggaaattggttttcaactatgtttcttactggtttcaaaaattaagtttcttactgaaatttttctatgagaaagggtggaaattcaagatttatgcaaaacagaaaaagttttttttccataattatgtctttcatttctgaaaatattttagacatattaaatatatacatataaattataacagtcttttagaattttcttactaaatattataattttcaagaaacatgatnnnnnnnnnnnnnnnnnnnnnnnnnnnnnnnnnnnnnnnnnnnaaacttataacaaaaattccatttatacaaacatcctatttcgattattattattttctaaaaaaacacaattttttattttaccaaccttacaaaactaccaatcaattaaaaaatcctttaatatttttatcattcacttttcataataatttacatcaactcaaactcaaatgaacttataacacaactttcattaatatacatttacctaatcaattaatataatttatattattattattattttatggaaaaacacaaaattctaaaatcacaaccttacaaaattacaacatcattaattgtattaattacttaacatcaatatatgatatttttcaaataaattaaatatttttcttttcattttttttctttgctattcctctttttcaacaattatcataattttccaataaaacttaaaccatcaacttttttttctaaccccagtcttttaataacctcttaatatttttgcgctgttgttcgtttgctccctccatttgaagacacaaagaatatggtcaatattggaatctgacgcaaatagactaaattcatgtgcaccatagggtgcattcaacgaggtgtagcagaatgtgttatgtctaacttaaatataaaaaaaaaaaaacgaaggtaccaattctagggcaatatgaaaagcgaagatgcaaatctaatggtcctccttactttcatattatacgaaacatgattacctttaacatgctagaccccgtcttcctatatacagaatcatcgatgctttgatattaaattgaagaatttaatgagtttgtctaagtcatacttagtaacgtgctttgttttgagtactccattattatgcatttatagcaaaaagttcacactccactctcttcaattcatggatgtttatccaacattgcaagttgtcgttgacgtttgcctagggctagaggttagcttttttggatggctcttggcattcaaaccaaatctgcaacccgtgatccttagtaatgatcaataatcgctcctacaattttagcaactagtaccagtagtatttgtttttaaagccaaacctcttactattataagaaagaaaaaagtaactaactaactcaaaatgaaattattttttagaactaatttatagtataagaatttgttttgacaggcactcttttttaaacatttggataattattaatatcttataaaaaaatggatctaatatgtacatatagatgttcgtttcctggaaattctcaagcgcatattagttttgaggtaaaatttgctgtgcaaaaaattatttaaaagttagtatttttcttctaatctaacttttttcatatatatttttttttctccttttttagtttccatttccccttcgttttgctagatctaaaggtatgtaattatagggattgttgacttatttaattaatggtcgcaaaaattttcaagtttaaatgtttataataaaataaaataaaataaattttagttaaaagaagtttgtacaccatacaattagttaagagtaaattataaagtactagctagtaatataattttatatgaatagggatcgttgacttatttagttaatgatcggtaccaaaacttttcaaatttaaaaataaattaaattataatttatttaagataagtttgtaccaaacaaagtttaattaagagtataagaaaaaatgattatatactaaattttatacaattatccaatcataatttaatgtgtctattaagtttgttgaattttaaaataattcaaataattacttatggttacatgatcatgatattataaaaatatttgacattattactgtattaacattaaactccaagatgaaatataaagtataaactaatataattttataaatattgtaactcctcacaggatcctaacacttggcattggaaaatggttttgggagcttccacaacagtcgacgttattgtgttcactgttcaaggcaattctgcgtcaatcaagccaccaatgaacatcctcatctccaacggctagtattttgaaagaaagaccaaatcagacttcataacgtccagcaaaatccaagctaaagagtatatatatttggtatgagaaaataaataatataaatgaaaataaaaagtggcaataagtgagaaataaaatgataataatttgagttgtttagttaaagaaaaatagaaaaaaaaaattagtataaataaataaaaaataattcaaatgaatcgcaccattttaaaacttattttcgcactttccttcaaagttcccttcaaagtgcagtaagccaaatccaaactctgattgtatatctctagcaaaaataacggaactctgtttgtatatataatttgtccattctccataaaaaatagttacttaaaaatagtaaaatacgtaccaactctgtttttttagtgatttactctgaatttttatttttaaagttcttattttaaattttaataaaagttgggtcaaatataggcacacgtttttataatgtgacatatcatttatattttaatttctttttaatttaaatttatttttcttaaattaaatataaatactctttataattttagttttcttatttgtattttttaaattttatatacaatataaaacacacacacacgtattataatttatatgtttaaaaactatttttcttttcttgatgccgtgaattccatttttttttaattaaagtaaaccttttaattttctacccagttaatttatactggaaatatatatatatatatatatatataattataaattttacatgcattaacgatagccgtaaaatatagaaaacccttgccaatttgacttctaagtttattttgtcatcaattatttgtattaatttttttaccagaaatgttaaagcaaacagtttgttgtgaaagttatcttaatcattttggaagaaacattcacaaggagaatcgatcagccaacaacatatatactattattcactataattaaataagcaatcttccaaaactttacgacaaattacacctgtacttgtgaacccatgaacatttagcatatatgaatatgtaagagaaagagagaaaacttaagactcttatgccttaaaaggagtaacacattcgaagaacattgaatatggtttaatagccactaccctctggaccatgttcattgttcagagatcatatctgagctaagcgttggatatcaacagggtaagcatctgatgcagattgaacactgtaagctctctgagccacaacaacattgccagcttcagtaggatgaaaagcatcccaaaacaagtactctctcctgttttggcatggtgtttgcattggaagacatgtaatttgaccattgttccttcctaccccacagcacccagcatttgtaacactgaaacctgaagattgattcatgtcaacagaactttgtgagttaatattatttgatgctaaaaaaaagtgacaaaaatcatgactacaaaataaaatgcattggtttgaaaataattaccataggctgaagggttgcttataatatcttgaaagatgccataagagttaatgtagatgactcttgcatcaggcagctggttgttgaattggtcagtgagacctttcagtttgttgttgaatatttgatttgcagaattgatcttttccacacatgttttaccatctgggctgttttgggccaattcatttgggctgcaacctatttggcctattccaaacaacaccattttccttgctccataattgtacaaagactgaatgacaaacacaaacagtcaatatttcaatttgtggagctagctagcttttcaattttcaatttcattcctgactttattgtaattgaaaattaaatggctattttgaacactgcatgttactactatattataatagaaaaattgatgatggtgaatatcaaatggtaaaagacagagagctaaagactaacttttagttgttcagtatatgcttgaataagaacatcagcatactcatctggtgagtactgcctgctgctggaatagaattgaggcatgaaatagttgttgaggtaatcattgctacccaacccaattgagtatatgcacttgctcaagtaatttgcagctgagtcctcacttcccagtaaatttaccacttgagacaccgtgttttggtaattttgcacctgcccactaaaactaatacgccctccctacaaaacatatgaacaactttagaacataaataccttaacaaatgaagattaaaaacagtgatgttgcatgaagcaaaaggaaactataaatgggtaccagttgctgcccagtttcctctctaattccagcagcagcagatgcataattgactcctttgagtatagcatcgccactagcatcagcatatggaggtatgtaatcatcgaatcccaaaagttcagctgttaaatttcaacaagttaaaacactagtgaaacctttctatgggcatatacttacaagaatcaatttatgttccagatctgcttttctcttgttcttgtttgttattaccaaatcagttcttctggtaagtaaccatctggcagtaaaatttttcctgtttctttctttatctgtaattctacaattgtacctctttgtcaatgaaataaactacacaacactctagtcttaaattgcatattgaatgcggcaaacagatccatgtgaatggaatttaaggatcagtcacaagcctttatgaggggtatctaactcagagtagtgccaactctagtgtcaaaagtcttgctttttttcaatgacatctgcatgtgactccttttttaatttttttatttcaccggtaaaaatattaatgcatctttccttctaggtggtgaacatttattgtctgattatagcataatacagcttgtcatccaatagaaaattatgcatgcatatattaagatgcttttagttgcagttaattgataggttcaaagatagggaagaagaaaaacagatcttagaaccattttgatgccattgactcactataactatgatttttacaatgatgaattgatgattattataagtgcatgcatgtgaatctagttttaagaccatgcaaagatgcaaacgagtatatatttcaactaaaatgccgacatgcaaagtttataagccaattaagcaagtgcaagctcaccaattgcatcaacagtggttttcccattggaaaaccttccagaaggtccatcagggaagtcaatcccataaggcaagtaatcagccctagccaaagattggagctggttgttgttcccattatcaaccaaagaatcaccaaaaatgaagtagcatggcacttgtggtgcaccttgaacaccactccacaaaccaagagaaacaacaacaatgagtgccaacatgcttattgtgagattcaaagctgccattggagcaagaaacggtgttgcttgtgaggaattgaagtgaataatctaggtagctaaggaagataggggcatgtgtgagtgattgaatgtggaaggtttgacacgagtataagtatatatagtagtagagagataaggctctatactagtagtagtctatagtgtaccttttacggttgggagtgttagttaggtgcattaaatggacgcggatataatgtgagattgaatgaaatggctccattactaattaccacccccaccacctcggatctatcttggagagggggtgggccaatgcatcatctcatttcaataaaatcattaatatttattcaaagatattatattttacacctcctaattttataatttgtactccctaattttatatatttgaacttttttacctgttcacatgtaagaataaataaatatatcatcttattttaataaaaagtgcacacatatttatcttaaaattttatattttatatcttttattttcatgtttgaacgtaactatttcatatgataataataattattaattttttatttttttaaataaattgtcccactgtcccataatcctatatccaccactgatcccatctcattgatgaaatcttatcactgatgttatccaactttaatgtagacttgcatcttgtagggatggaaatttggacattacaacgactggttaaaacttaggtatgatacgacaatttttatacttttgttttgagtttttcctgaatgttaaagtttagcttagtatgggaatttcaaaaattattttctggaatttaacaagtctggaaattggttttcaactatgtttcttactggtttcaaaaattaagtttcttactgaaatttttctatgagaaagggtggaaattcaagatttatgcaaaacagaaaaagttttttttccataattatgtctttcatttctgaaaatattttagacatattaaatatatacatataaattataacagtcttttagaattttcttactaaatattataattttcaagaaacatgattttttttagtttattacgtagtacataatattttagaaatactacgtacatatataatattttggacatctatatacttgattttgccgtgttcaacagaacgagctccaccgcacgacgacctctatagatctagatgccacatcgtctccctatatgtatccatagcaaactcgccacaactgtccaaccatttgaagttcatgcccaagaaagaagagaaagataatagtattaacaagttaatatatatatatatatatnnnnnnnnnnnnnnnnnnnnnnnnnnnnnnnnnnnnnnnnnnnnnnnnnnnnnnnnnnnnnnnnnnnnnnnnnnnnnnnnnnnnnnnnnnnnnnnnnnnnnnnnnnnnnnnnnnnnnnnnnnnnnnnnnnnnnnnnnnnnnnnnnnnnnnnnnnnnnnnnnnnnnnnnnnnnnnnnnnnnnnnnnnnnnnnnnnnnnnnnnnnnnnnnnnnnnnnnnnnnnnnnnnnnnnnnnnnnnnnnnnnnnnnnnnnnnnnnnnnnnnnnnnnnnnnnnnnnnnnnnnnnnnnnnnnnnnnnnnnnnnnnnnnnnnnnnnnnnnnnnnnnnnnnnnnnnnnnnnnnnnnnnnnnnnnnnnnnnnnnnnnnnnnnnnnnnnnnnnnnnnnnnnnnnnnnnnnnnnnnnnnnnnnnnnnnnnnnnnnnnnnnnnnnnnnnnnnnnnnnnnnnnnnnnnnnnnnnnnnnnnnnnnnnnnnnnnnnnnnnnnnnnnnnnnnnnnnnnnnnnnnnnnnnnnnnnnnnnnnnnnnnnnnnnnnnnnnnnnnnnnnnnnnnnnnnnnnnnnnnnnnnnnnnnnnnnnnnnnnnnnnnnnnnnnnnnnnnnnnnnnnnnnnnnnnnnnnnnnnnnnnnnnnnnnnnnnnnnnnnnnnnnnnnnnnnnnnnnnnnnnnnnnnnnnnnnnnnnnnnnnnnnnnnnnnnnnnnnnnnnnnnnnnnnnnnnnnnnnnnnnnnnnnnnnnnnnnnnnnnnnnnnnnnnnnnnnnnnnnnnnnnnnnnnnnnnnnnnnnnnnnnnnnnnnnnnnnnnnnnnnnnnnnnnnnnnnnnnnnnnnnnnnnnnnnnnnnnnnnnnnnnnnnnnnnnnnnnnnnnnnnnnnnnnnnnnnnnnnnnnnnnnnnnnnnnnnnnnnnnnnnnnnnnnnnnnnnnnnnnnnnnnnnnnnnnnnnnnnnnnnnnnnnnnnnnnnnnnnnnnnnnnnnnnnnnnnnnnnnnnnnnnnnnnnnnnnnnnnnnnnnnnnnnnnnnnnnnnnnnnnnnnnnnnnnnnnnnnnnnnnnnnnnnnnnnnnnnnnnnnnnnnnnnnnnnnnnnnnnnnnnnnnnnnnnnnnnnnnnnnnnnnnnnnnnnnnnnnnnnnnnnnnnnnnnnnnnnnnnnnnnnnnnnnnnnnnnnnnnnnnnnnnnnnnnnnnnnnnnnnnnnnnnnnnnnnnnnnnnnnnnnnnnnnnnnnnnnnnnnnnnnnnnnnnnnnnnnnnnnnnnnnnnnnnnnnnnnnnnnnnnnnnnnnnnnnnnnnnnnnnnnnnnnnnnnnnnnnnnnnnnnnnnnnnnnnnnnnnnnnnnnnnnnnnnnnnnnnnnnnnnnnnnnnnnnnnnnnnnnnnnnnnnnnnnnnnnnnnnnnnnnnnnnnnnnnnnnnnnnnnnnnnnnnnnnnnnnnnnnnnnnnnnnnnnnnnnnnnnnnnnnnnnnnnnnnnnnnnnnnnnnnnnnnnnnnnnnnnnnnnnnnnnnnnnnnnnnnnnnnnnnnnnnnnnnnnnnnnnnnnnnnnnnnnnnnnnnnnnnnnnnnnnnnnnnnnnnnnnnnnnnnnnnnnnnnnnnnnnnnnnnnnnnnnnnnnnnnnnnnnnnnnnnnnnnnnnnnnnnnnnnnnnnnnnnnnnnnnnnnnnnnnnnnnnnnnnnnnnnnnnnnnnnnnnnnnnnnnnnnnnnnnnnnnnnnnnnnnnnnnnnnnnnnnnnnnnnnnnnnnnnnnnnnnnnnnnnnnnnnnnnnnnnnnnnnnnnnnnnnnnnnnnnnnnnnnnnnnnnnnnnnnnnnnnnnnnnnnnnnnnnnnnnnnnnnnnnnnnnnnnnnnnnnnnnnnnnnnnnnnnnnnnnnnnnnnnnnnnnnnnnnnnnnnnnnnnnnnnnnnnnnnnnnnnnnnnnnnnnnnnnnnnnnnnnnnnnnnnnnnnnnnnnnnnnnnnnnnnnnnnnnnnnnnnnnnnnnnnnnnnnnnnnnnnnnnnnnnnnnnnnnnnnnnnnnnnnnnnnnnnnnnnnnnnnnnnnnnnnnnnnnnnnnnnnnnnnnnnnnnnnnnnnnnnnnnnnnnnnnnnnnnnnnnnnnnnnnnnnnnnnnnnnnnnnnnnnnnnnnnnnnnnnnnnnnnnnnnnnnnnnnnnnnnnnnnnnnnnnnnnnnnnnnnnnnnnnnnnnnnnnnnnnnnnnnnnnnnnnnnnnnnnnnnnnnnnnnnnnnnnnnnnnnnnnnnnnnnnnnnnnnnnnnnnnnnnnnnnnnnnnnnnnnnnnnnnnnnnnnnnnnnnnnnnnnnnnnnnnnnnnnnnnnnnnnnnnnnnnnnnnnnnnnnnnnnnnnnnnnnnnnnnnnnnnnnnnnnnnnnnnnnnnnnnnnnnnnnnnnnnnnnnnnnnnnnnnnnnnnnnnnnnnnnnnnnnnnnnnnnnnnnnnnnnnnnnnnnnnnnnnnnnnnnnnnnnnnnnnnnnnnnnnnnnnnnnnnnnnnnnnnnnnnnnnnnnnnnnnnnnnnnnnnnnnnnnnnnnnnnnnnnnnnnnnnnnnnnnnnnnnnnnnnnnnnnnnnnnnnnnnnnnnnnnnnnnnnnnnnnnnnnnnnnnnnnnnnnnnnnnnnnnnnnnnnnnnnnnnnnnnnnnnnnnnnnnnnnnnnnnnnnnnnnnnnnnnnnnnnnnnnnnnnnnnnnnnnnnnnnnnnnnnnnnnnnnnnnnnnnnnnnnnnnnnnnnnnnnnnnnnnnnnnnnnnnnnnnnnnnnnnnnnnnnnnnnnnnnnnnnnnnnnnnnnnnnnnnnnnnnnnnnnnnnnnnnnnnnnnnnnnnnnnnnnnnnnnnnnnnnnnnnnnnnnnnnnnnnnnnnnnnnnnnnnnnnnnnnnnnnnnnnnnnnnnnnnnnnnnnnnnnnnnnnnnnnnnnnnnnnnnnnnnnnnnnnnnnnnnnnnnnnnnnnnnnnnnnnnnnnnnnnnnnnnnnnnnnnnnnnnnnnnnnnnnnnnnnnnnnnnnnnnnnnnnnnnnnnnnnnnnnnnnnnnnnnnnnnnnnnnnnnnnnnnnnnnnnnnnnnnnnnnnnnnnnnnnnnnnnnnnnnnnnnnnnnnnnnnnnnnnnnnnnnnnnnnnnnnnnnnnnnnnnnnnnnnnnnnnnnnnnnnnnnnnnnnnnnnnnnnnnnnnnnnnnnnnnnnnnnnnnnnnnnnnnnnnnnnnnnnnnnnnnnnnnnnnnnnnnnnnnnnnnnnnnnnnnnnnnnnnnnnnnnnnnnnnnnnnnnnnnnnnnnnnnnnnnnnnnnnnnnnnnnnnnnnnnnnnnnnnnnnnnnnnnnnnnnnnnnnnnnnnnnnnnnnnnnnnnnnnnnnnnnnnnnnnnnnnnnnnnnnnnnnnnnnnnnnnnnnnnnnnnnnnnnnnnnnnnnnnnnnnnnnnnnnnnnnnnnnnnnnnnnnnnnnnnnnnnnnnnnnnnnnnnnnnnnnnnnnnnnnnnnnnnnnnnnnnnnnnnnnnnnnnnnnnnnnnnnnnnnnnnnnnnnnnnnnnnnnnnnnnnnnnnnnnnnnnnnnnnnnnnnnnnnnnnnnnnnnnnnnnnnnnnnnnnnnnnnnnnnnnnnnnnnnnnnnnnnnnnnnnnnnnnnnnnnnnnnnnnnnnnnnnnnnnnnnnnnnnnnnnnnnnnnnnnnnnnnnnnnnnnnnnnnnnnnnnnnnnnnnnnnnnnnnnnnnnnnnnnnnnnnnnnnnnnnnnnnnnnnnnnnnnnnnnnnnnnnnnnnnnnnnnnnnnnnnnnnnnnnnnnnnnnnnnnnnnnnnnnnnnnnnnnnnnnnnnnnnnnnnnnnnnnnnnnnnnnnnnnnnnnnnnnnnnnnnnnnnnnnnnnnnnnnnnnnnnnnnnnnnnnnnnnnnnnnnnnnnnnnnnnnnnnnnnnnnnnnnnnnnnnnnnnnnnnnnnnnnnnnnnnnnnnnnnnnnnnnnnnnnnnnnnnnnnnnnnnnnnnnnnnnnnnnnnnnnnnnnnnnnnnnnnnnnnnnnnnnnnnnnnnnnnnnnnnnnnnnnnnnnnnnnnnnnnnnnnnnnnnnnnnnnnnnnnnnnnnnnnnnnnnnnnnnnnnnnnnnnnnnnnnnnnnnnnnnnnnnnnnnnnnnnnnnnnnnnnnnnnnnnnnnnnnnnnnnnnnnnnnnnnnnnnnnnnnnnnnnnnnnnnnnnnnnnnnnnnnnnnnnnnnnnnnnnnnnnnnnnnnnnnnnnnnnnnnnnnnnnnnnnnnnnnnnnnnnnnnnnnnnnnnnnnnnnnnnnnnnnnnnnnnnnnnnnnnnnnnnnnnnnnnnnnnnnnnnnnnnnnnnnnnnnnnnnnnnnnnnnnnnnnnnnnnnnnnnnnnnnnnnnnnnnnnnnnnnnnnnnnnnnnnnnnnnnnnnnnnnnnnnnnnnnnnnnnnnnnnnnnnnnnnnnnnnnnnnnnnnnnnnnnnnnnnnnnnnnnnnnnnnnnnnnnnnnnnnnnnnnnnnnnnnnnnnnnnnnnnnnnnnnnnnnnnnnnnnnnnnnnnnnnnnnnnnnnnnnnnnnnnnnnnnnnnnnnnnnnnnnnnnnnnnnnnnnnnnnnnnnnnnnnnnnnnnnnnnnnnnnnnnnnnnnnnnnnnnnnnnnnnnnnnnnnnnnnnnnnnnnnnnnnnnnnnnnnnnnnnnnnnnnnnnnnnnnnnnnnnnnnnnnnnnnnnnnnnnnnnnnnnnnnnnnnnnnnnnnnnnnnnnnnnnnnnnnnnnnnnnnnnnnnnnnnnnnnnnnnnnnnnnnnnnnnnnnnnnnnnnnnnnnnnnnnnnnnnnnnnnnnnnnnnnnnnnnnnnnnnnnnnnnnnnnnnnnnnnnnnnnnnnnnnnnnnnnnnnnnnnnnnnnnnnnnnnnnnnnnnnnnnnnnnnnnnnnnnnnnnnnnnnnnnnnnnnnnnnnnnnnnnnnnnnnnnnnnnnnnnnnnnnnnnnnnnnnnnnnnnnnnnnnnnnnnnnnnnnnnnnnnnnnnnnnnnnnnnnnnnnnnnnnnnnnnnnnnnnnnnnnnnnnnnnnnnnnnnnnnnnnnnnnnnnnnnnnnnnnnnnnnnnnnnnnnnnnnnnnnnnnnnnnnnnnnnnnnnnnnnnnnnnnnnnnnnnnnnnnnnnnnnnnnnnnnnnnnnnnnnnnnnnnnnnnnnnnnnnnnnnnnnnnnnnnnnnnnnnnnnnnnnnnnnnnnnnnnnnnnnnnnnnnnnnnnnnnnnnnnnnnnnnnnnnnnnnnnnnnnnnnnnnnnnnnnnnnnnnnnnnnnnnnnnnnnnnnnnnnnnnnnnnnnnnnnnnnnnnnnnnnnnnnnnnnnnnnnnnnnnnnnnnnnnnnnnnnnnnnnnnnnnnnnnnnnnnnnnnnnnnnnnnnnnnnnnnnnnnnnnnnnnnnnnnnnnnnnnnnnnnnnnnnnnnnnnnnnnnnnnnnnnnnnnnnnnnnnnnnnnnnnnnnnnnnnnnnnnnnnnnnnnnnnnnnnnnnnnnnnnnnnnnnnnnnnnnnnnnnnnnnnnnnnnnnnnnnnnnnnnnnnnnnnnnnnnnnnnnnnnnnnnnnnnnnnnnnnnnnnnnnnnnnnnnnnnnnnnnnnnnnnnnnnnnnnnnnnnnnnnnnnnnnnnnnnnnnnnnnnnnnnnnnnnnnnnnnnnnnnnnnnnnnnnnnnnnnnnnnnnnnnnnnnnnnnnnnnnnnnnnnnnnnnnnnnnnnnnnnnnnnnnnnnnnnnnnnnnnnnnnnnnnnnnnnnnnnnnnnnnnnnnnnnnnnnnnnnnnnnnnnnnnnnnnnnnnnnnnnnnnnnnnnnnnnnnnnnnnnnnnnnnnnnnnnnnnnnnnnnnnnnnnnnnnnnnnnnnnnnnnnnnnnnnnnnnnnnnnnnnnnnnnnnnnnnnnnnnnnnnnnnnnnnnnnnnnnnnnnnnnnnnnnnnnnnnnnnnnnnnnnnnnnnnnnnnnnnnnnnnnnnnnnnnnnnnnnnnnnnnnnnnnnnnnnnnnnnnnnnnnnnnnnnnnnnnnnnnnnnnnnnnnnnnnnnnnnnnnnnnnnnnnnnnnnnnnnnnnnnnnnnnnnnnnnnnnnnnnnnnnnnnnnnnnnnnnnnnnnnnnnnnnnnnnnnnnnnnnnnnnnnnnnnnnnnnnnnnnnnnnnnnnnnnnnnnnnnnnnnnnnnnnnnnnnnnnnnnnnnnnnnnnnnnnnnnnnnnnnnnnnnnnnnnnnnnnnnnnnnnnnnnnnnnnnnnnnnnnnnnnnnnnnnnnnnnnnnnnnnnnnnnnnnnnnnnnnnnnnnnnnnnnnnnnnnnnnnnnnnnnnnnnnnnnnnnnnnnnnnnnnnnnnnnnnnnnnnnnnnnnnnnnnnnnnnnnnnnnnnnnnnnnnnnnnnnnnnnnnnnnnnnnnnnnnnnnnnnnnnnnnnnnnnnnnnnnnnnnnnnnnnnnnnnnnnnnnnnnnnnnnnnnnnnnnnnnnnnnnnnnnnnnnnnnnnnnnnnnnnnnnnnnnnnnnnnnnnnnnnnnnnnnnnnnnnnnnnnnnnnnnnnnnnnnnnnnnnnnnnnnnnnnnnnnnnnnnnnnnnnnnnnnnnnnnnnnnnnnnnnnnnnnnnnnnnnnnnnnnnnnnnnnnnnnnnnnnnnnnnnnnnnnnnnnnnnnnnnnnnnnnnnnnnnnnnnnnnnnnnnnnnnnnnnnnnnnnnnnnnnnnnnnnnnnnnnnnnnnnnnnnnnnnnnnnnnnnnnnnnnnnnnnnnnnnnnnnnnnnnnnnnnnnnnnnnnnnnnnnnnnnnnnnnnnnnnnnnnnnnnnnnnnnnnnnnnnnnnnnnnnnnnnnnnnnnnnnnnnnnnnnnnnnnnnnnnnnnnnnnnnnnnnnnnnnnnnnnnnnnnnnnnnnnnnnnnnnnnnnnnnnnnnnnnnnnnnnnnnnnnnnnnnnnnnnnnnnnnnnnnnnnnnnnnnnnnnnnnnnnnnnnnnnnnnnnnnnnnnnnnnnnnnnnnnnnnnnnnnnnnnnnnnnnnnnnnnnnnnnnnnnnnnnnnnnnnnnnnnnnnnnnnnnnnnnnnnnnnnnnnnnnnnnnnnnnnnnnnnnnnnnnnnnnnnnnnnnnnnnnnnnnnnnnnnnnnnnnnnnnnnnnnnnnnnnnnnnnnnnnnnnnnnnnnnnnnnnnnnnnnnnnnnnnnnnnnnnnnnnnnnnnnnnnnnnnnnnnnnnnnnnnnnnnnnnnnnnnnnnnnnnnnnnnnnnnnnnnnnnnnnnnnnnnnnnnnnnnnnnnnnnnnnnnnnnnnnnnnnnnnnnnnnnnnnnnnnnnnnnnnnnnnnnnnnnnnnnnnnnnnnnnnnnnnnnnnnnnnnnnnnnnnnnnnnnnnnnnnnnnnnnnnnnnnnnnnnnnnnnnnnnnnnnnnnnnnnnnnnnnnnnnnnnnnnnnnnnnnnnnnnnnnnnnnnnnnnnnnnnnnnnnnnnnnnnnnnnnnnnnnnnnnnnnnnnnnnnnnnnnnnnnnnnnnnnnnnnnnnnnnnnnnnnnnnnnnnnnnnnnnnnnnnnnnnnnnnnnnnnnnnnnnnnnnnnnnnnnnnnnnnnnnnnnnnnnnnnnnnnnnnnnnnnnnnnnnnnnnnnnnnnnnnnnnnnnnnnnnnnnnnnnnnnnnnnnnnnnnnnnnnnnnnnnnnnnnnnnnnnnnnnnnnnnnnnnnnnnnnnnnnnnnnnnnnnnnnnnnnnnnnnnnnnnnnnnnnnnnnnnnnnnnnnnnnnnnnnnnnnnnnnnnnnnnnnnnnnnnnnnnnnnnnnnnnnnnnnnnnnnnnnnnnnnnnnnnnnnnnnnnnnnnnnnnnnnnnnnnnnnnnnnnnnnnnnnnnnnnnnnnnnnnnnnnnnnnnnnnnnnnnnnnnnnnnnnnnnnnnnnnnnnnnnnnnnnnnnnnnnnnnnnnnnnnnnnnnnnnnnnnnnnnnnnnnnnnnnnnnnnnnnnnnnnnnnnnnnnnnnnnnnnnnnnnnnnnnnnnnnnnnnnnnnnnnnnnnnnnnnnnnnnnnnnnnnnnnnnnnnnnnnnnnnnnnnnnnnnnnnnnnnnnnnnnnnnnnnnnnnnnnnnnnnnnnnnnnnnnnnnnnnnnnnnnnnnnnnnnnnnnnnnnnnnnnnnnnnnnnnnnnnnnnnnnnnnnnnnnnnnnnnnnnnnnnnnnnnnnnnnnnnnnnnnnnnnnnnnnnnnnnnnnnnnnnnnnnnnnnnnnnnnnnnnnnnnnnnnnnnnnnnnnnnnnnnnnnnnnnnnnnnnnnnnnnnnnnnnnnnnnnnnnnnnnnnnnnnnnnnnnnnnnnnnnnnnnnnnnnnnnnnnnnnnnnnnnnnnnnnnnnnnnnnnnnnnnnnnnnnnnnnnnnnnnnnnnnnnnnnnnnnnnnnnnnnnnnnnnnnnnnnnnnnnnnnnnnnnnnnnnnnnnnnnnnnnnnnnnnnnnnnnnnnnnnnnnnnnnnnnnnnnnnnnnnnnnnnnnnnnnnnnnnnnnnnnnnnnnnnnnnnnnnnnnnnnnnnnnnnnnnnnnnnnnnnnnnnnnnnnnnnnnnnnnnnnnnnnnnnnnnnnnnnnnnnnnnnnnnnnnnnnnnnnnnnnnnnnnnnnnnnnnnnnnnnnnnnnnnnnnnnnnnnnnnnnnnnnnnnnnnnnnnnnnnnnnnnnnnnnnnnnnnnnnnnnnnnnnnnnnnnnnnnnnnnnnnnnnnnnnnnnnnnnnnnnnnnnnnnnnnnnnnnnnnnnnnnnnnnnnnnnnnnnnnnnngttgagagattcctcaggcattgtgtgtgaaagtcctgagttgagagattcctcagacattgttagagttcagtgaggttctgggagaattgtgtttatcagatgatggccccaggcgtgggactaagttccagagaacttattccctggatatgtgtgacacctatgatgaatacatatagacatgagatgagaaagccgagatggctgatagttttatatgagataagggcacaggccttgttaggcacccataatatttagtatgggagaaatgcttgatagtgaaccagggggaggtaagacctccaagaaccccgggcttactgagattttatctcaccccgtgtggggtttatgttgcaggtgcgtagaatagaggatagatccctggggagaaaccagtggagtcaagcagggtaactgtttggattagcatctgtgagcttggagctccctgtggcgtatacatagtgagatagtttctgtctcctgtcatatctatattgatatggttgttatctgcccggttcttagttagttttgtttatctagatcaataagggctagttatagttgtattgtgatactttattatgtctctgttacatgctatacatatgtatcaagaaatacgattcttacatgcttccgcagcttattttatgagattctgatattataatgatgttaacacactgggtgcacacggggtgttacagatggcattctatcattggttctgcttattcttaatagtttttaatttaatagttccccacttcccctacatctcttttgctatgctactagtcaattgttcaggaacctcattgaattgtaaatttatatatccatattaaagtaaagagctattatggtgaaagcacgttgttcccaacttctattttatttattttaacatgtcctgcatatcagaattggtttctgatataacataataacattatttgatccatttagtttatctactgggaagggcttttggggtggtagtttgtatattatgtatatccctctaatcccatatatattttccaacttttctgcacttgataactcttgaaacaatgcttcgggtgtatgaaacacatgcccgactggcactggaatttggggacctgtttgagtataatcaggtttgttctgtatattttttgaagaaaagagacttttatgttttaattcattttagtctttgattacttttttgtacttgtttttgcttgttatgattctgtttcttcttttttttcctgagatcaaggattaatatacttcattaaaggcagtcaatgctatgaagtagtgaattataattttaatcaacgagtaaactttggtcccatctttgcttgttttggaaataggaatcatagaagttgaggatgttattaaccttgtaattggactttagatattgaagctatttgtgtgaatgtagtgtcaatctcagttgcaaactctttatgccgaaggcattgaggggtccgatatggattttgctgcttaaaacttgctttgtgtcataatgcattcaaataataataaagatcttgtagcaaggttagccttacatgcttgcttgattctttttttcaaaaaaactattagagctgaattatgtcatgtgattcatctatctgaatttcgtgatattattgttaaaatcttcattattgaaagttaccagattgagtcattttggagttatattcccagaaacatgctttgataattgtattatgtttcaccatcagaatattgtgctaatattattataatctgcactgttggaattttctagtttgggtcctttgggagttcagttccctgaaaaatacgttgataatttggaacatgttattaagaatttagaaaatggtttgtgagggaaaggctcaaatcaggtcctgataagcaaacacaaaacgggatcaatatatatcaagtctttcaatggctatacgtaaatatatttccttgaattattgtgataatagtttaatgatatagtctcaaatattttgtcatgttatcatagaatgtcacgaatttgaatgtttagtgtttgtcaataccaggttatctcacgaagcaaagaaggatgaagctgtaaaacatgcgtttgccattcgtgctgctgtaacttcagcaaattatattgcattctttagactgtacaaaacagctcctaacttaaacacctgccttatgggtgagtatttttaattaactggtttttgtagcttgttggtaacacgtaacatatatgttaagggggataaaatgaaatgaattttttaatatccacagatctctatgttgaaaagatgcgttataaggctgtgaactgcatgtgccggtcatatcgcccaactctacatgtttcatacatttctcaggttcttgggttttcaactggcctggccacaaatggagcaagtgatgagagagacacagatgcattggaagagtgttcagaatggttaaaagcacatgggaccaacataattactgataacaatggagatatgttgctagatacaaaagtatgtttgatctctatcttttgtattcattgtcctgtaggtgctaatttgctctgtgaattagttaaccgttagttaacccatacaaatctagaattccctagttactagtcaactttaacaagtgttttcttaacctggttaatggttgtggattggtgatttaatgagaaatgtttaattttgcaggtttcatcatctactctgtttgtgccagagccagaggatgttgttggtgttgctacctgtcagaatatatcacttataaaacatgtatgcaaccatggatgatacagatattgaattgttacagcttaataaaccttcttcacattcgaattgtgaactatgtctgcagattagagattttgtttcagaacaaatgtctgtaagaggtattgaattccataccgaggagtctccccaagctatcacaaagtcagctgatggcaaattctctttaaagaaaccagcgggtgcctcaaggtaaggatggagttttgtttcttaaaagagttaggcacatactgcatttaattttttaatggtgaataagggcttcgtttgagaagaaatgctgttttcatctctagttcgccacttgttattatgatctcatagtcgttgttcatggcagtgcattgtgtatagtaaacttggaaaccacttttgttttgagaactccatggtattcaaatcttcccacattaattgtcttctatatatttatatctataacatgtatattggagtccaagtaatgtaaaagatataaagaaaagtgaaagtgcgtgatatatactcgtaaaatatacgaagtatatcattatactaattcttcagtatcttaaatatttttagactctttggtaaaaataaaaaataaaaaattaggtattaagattgtctgcataatatagaagattataaatttatactaacaatataatatattatattgatagtataattaatgataacatatattaatatatgtttatctgatatatatgttattattattattatttgtaatatttacactaggactatatataatttctgttacataaaaaatatagcaataaaaaacttaatgcgaaatcgttaatatatgatttcacaacaacaaaaaaatcattaaatatatgatacttttataaaatcgtgatattaatttttcaatacaaaataatgtaatatacattttacataaatgcactactannnnnnnnnnnnnnnnnnnnnnnnnnnnnnnnnnnnnnnnnnnnnnnnnnnnnnnnnnnnnnnnnnnnnnnnnnnnnnnnnnnnnnnnnnnnnnnnnnnnnnnnnnnnnnnnnnnnnnnnnnnnnnnnnnnnnnnnnnnnnnnnnnnnnnnnnnnnnnnnnnnnnnnnnnnnnnnnnnnnnnnnnnnnnnnnnnnnnnnnnnnnnnnnnnnnnnnnnnnnnnnnnnnnnnnnnnnnnnnnnnnnnnnnnnnnnnnnnnnnnnnnnnnnnnnnnnnnnnnnnnnnnnnnnnnnnnnnnnnnnnnnnnnnnnnnnnnnnnnnnnnnnnnnnnnnnnnnnnnnnnnnnnnnnnnnnnnnnnnnnnnnnnnnnnnnnnnnnnnnnnnnnnnnnnnnnnnnnnnnnnnnnnnnnnnnnnnnnnnnnnnnnnnnnnnnnnnnnnnnnnnnnnnnnnnnnnnnnnnnnnnnnnnnnnnnnnnnnnnnnnnnnnnnnnnnnnnnnnnnnnnnnnnnnnnnnnnnnnnnnnnnnnnnnnnnnnnnnnnnnnnnnnnnnnnnnnnnnnnnnnnnnnnnnnnnnnnnnnnnnnnnnnnnnnnnnnnnnnnnnnnnnnnnnnnnnnnnnnnnnnnnnnnnnnnnnnnnnnnnnnnnnnnnnnnnnnnnnnnnnnnnnnnnnnnnnnnnnnnnnnnnnnnnnnnnnnnnnnnnnnnnnnnnnattatccctctatttctgtcatatttttcttcaatcaaataatctctttaatttctcttctcatctttttctttttttcgttctctccttttaatttcatcctcacaactaaatgaccccttaatgaacacttaggagatcagcaactgaattatacgctggagcaaacaatgaattaatgaagtgagatgttggtatttgattttgacagaatagatgtattttattttagtgactgaaaatatatgtacgtgttaataatgtctacttggatgccttgcatatcatcgtagtcatctcgtattaattaaataattggtcatgcgaatggcaagtgagttacaaatgaaaattactgtcaagttaacgagagagtaattaaaacgtagaaaaatgctagaaatacttgtttttctgacagcaatatttgatctgagtttatgcaaagatatggatatgaatgcgttgtaaaatgattagatcatctcaaaaccacagatataaactttttaacttataaattataatcgaaaattcataaaaaaaaataaaaattatatcccatatatcaatcattagatggaagtgcatcctacatgcagttattttatggaatcctgaggatacgtttccggcattacgttggagatatctacatgaaagtaaatgtcaattaattattgtgaataaaagaaagatcgactgcctattattacctcaaacatgcactagaggatattgaaggacgtatttcaccccagatttaactagcaataactaaaattaaataaataaataaattttaggccaaaatataagaattgctcttaagaaataatttttataacataatttatttctatattataactttgattttttaatttcaaagaaaagtgttactgttttgtacagcttagcacatagatcaataaatatataactatttcaatttatccaattattttaactttttttttaatacataacttaaatatttataaaatcagagttatctaaagaattataagattgatcaagtggttgaggaaaaagaggagaaagaaattatggacttgaatttttcactaacaaaaattaatagaattaatatttatgtattaataatatataaaattattttatattgtcattgatattgctgtatagcctttttttttcctcaaattaacagactaacaaacatccacagataaaaagaatcagaatcacccaccagattaattgacatgaactatggcatgcatgcatgcatgcagcagctagggtaggaacagcatctacaaattaacgactatcaatccggtctttccaatcaatgaactggttactagtgattatggcccagcggcacatgctcagaataagcatgtctttttctcgatcctgacctaccccttttgggtttcatgcatgagatggtaatttggaaagctggaatgatcaaattataaatatgcccccttttatttgtctccttcattgtccctctacacataactttatgacacggaacgaaaaagacaacgatttgatatataagcatgtcttaataaattataaaatcacttaattttttttttatttaagactctcaatattaaaaaaattctatatattatgactcaactaatttaaacagtcattaaggttaatcatatttttaaatagaataaaaccgttttttggtggattaaatataataaaacatatgacgacgactgatcaaattaattgtgactaccttttcagtgctaatgtgatcgtctaataaaaagacaagcaaaatattagcgacaacttgttattaattagcattcgataacacttatttaaagttttttttttattctaacagtttgatccattctatgaaatcatatcacccatgaaggttgttaattaagattcttctatctagcaacaccttaattaatatggcataaccttaaaagtttgttaaggattagattcaaaggggaaaatgatttatgatgaataccttgacaatcaaagacaggaaacagaataataactgacatttttttattagccaaaagagatttatttataaggtaccggcaaacgcccaaaaaatgatgatgatttacaaagacctaccccctgcacatacattcactagcttagcaattcaactcgaccaattgtttgtattcccaagctcataaatatccaacccgagacatcaacatatcgcataacgcatgttgatattcatccaacaccagtttagacccgattgaagccatctgatctcattttcctccccattacaataattcccatccatcataaatattgtagacaagacaaaggatttgaataccactcagaataagagaaatgaaaagctttaagtttagcctccaaccatgaccaagactttatattttattacctccatgacagaaatccaagtcaagtaattgacagcggaagatgatgttgtttctatggcaccataataacggacataatgcaagggggaattgaaaataagctttaaaaattctttaaaaatccagaattttttgagatgaataatcgaattcgatcatgaaattgtaagacgtggacaaatttgtttctaaaagataaaaatttaaatttagtctctaaatgtgtaaaaagtgtaataaattagtccaataaataatttaataataaattaattcctaaactttataatctaatgtcaaattgatcctaaaaaatataatttattattaaattggtctttaaatattataacttaatgataaaataattttacaaatttaacatcatgattaataacttgacgcactttttacatatttaggaattaaatttatattttttattttttatttttcatagattaatttattatctcattacatttttaaagataaatttgacttttttttttataatggtaaaagtgaattttaaactactagtacactagcttattaaatggacactttcaccccctaactttaggacgacaagtgctctcaagagtcaagatataaatttggtctgcggaagccatgcaatgccgtgtagctaattaactattcctatatacagcatcataaatgctagtgggtcgaagaatttaatgagtttgtctaagtcatacttagtaacgtgctttgttttgagtacttcattattatgcatttatagcaaaaagtccacactccactctcttcaattcatggatgtttatccaacattgcaagttgtcgttgacgtttgcctagggctagaggttagctttttggatggcttttggcattcaaacccaatctgcaaccgtcatccttagtaatgatcaataatcgctcctacagttttaacaactggtactagtactagtagtaatattttttttaagccaaacctcttactattataagaaagaaaaaaagtaactaactaactaactcaaaatgaaattatttttaagaactaatttatagtataaggatttgtttcgacatgaactctttttaaacatttgaataattattaatatcttataaaaaaaatggatcttatatatacatatatatgttcgtttcctggaaattctcaagcgcatcttagttttgaggtaaaatttgctatgataaaaaattatttaaaagttagtaattttcttctaatataactttttcatattttttcttctccttttttagtttccatttccccttcgttttgctagatctaaaggtatgtaattatagggattgttgacttatttaattaatggtcggtaccaaaattttcaaatttaaatgtttaaaataaaataaaatgatttttatttaaaagaagttgtacatcatacaattagttaagagtaaattataaagtactagctagtaatataattttatatgaatatggatcgttgacttatttagttaacaatcggtaccaaaacttttcaaatttaaaaaaaaaatagaatttatttaagataagtttgtagcaaacaaagtttaagttaagagtaagagaaaaatgattatacagtcatctcatctaatcacaattcaacaatattaattttattgacttttaaaataattattttaaaataattgaagcgattagatgatagtgtaaaaattttatagtatattgacattaaattctaagagtaaatcataaagtataaactaatataattttatttgaatagtttatctaattaatacttttaaaagatgtgaaactgctttggctagcgaactaacaatatatagtactatttcttacctaatgtctaatattcagcacggggatagaagaattagtgtttgatattttcctgtatttattgactgtatcatccccccaaaaaatactacaatagtactataatattgcaagaaaacgtatggtgcagtaagatgcttggaggttgtcactgaattgaaagcatcctgcatgttgaattacgtttgttatttcatgaatatgcacggaaaaacccacatggcagtgacaattaagcagaaattttctttatatagtacgggatacttttatcagaattaaaaattcccccctctttgagaattgttctacattaatttgatcacattcgcttaaaagttttttaatattttttctgaaagaagtgtcccagctgtgaatcttgatgttgatcgaatcatgagccatgacaacgaatagcactcattagcatgtgattacaggctgactcggttgtttcataaataatccatctgcctttatgtgtgtttcccttttttgcaaatctctaagactattcgaataagacatgcatggtctccccattttttgagatgtaaaccagacatgttcaaatatggaacactcaagtaaaaaaatgatagtttcttttttaacaagtaaaaatggaagacattatcataagatttgtaaacatcatgatcaatcaattgaattatattctcaactaaaaaaaataatcttttatttataagaatcaatgacaatgtcataaaaaatttataataattcacacatctttattcaatcagttagatcttcttcggacaaaaaaaatttaatgactaaggagacatgtattatctattttataagtttacattcaaaatttgagttaatatttacgttatacattactttactgatatttaaacacataacacactttgacttataaaccccataggattagtattagagtggagtaagacaaaatcttcttgtatatgaatatgataattaagaagtttcttgctaatagctatgtagtatatgaatgttcttttgcatgtatttcatgggtatgaaccaccacatgggcgtaataatgagccattgcccaggggaaatgtgctgtaacgttttcttcagcaatgctaggctgttatacgcgcgtggtccaacacaaactgttaaagcctaaattaaatcctaatcgtctctagtctttaatgttcggtataatgtctcttgacttttgtttcccttggaagatttgaactacgcgttccatcatagaatgtcgcatcctggtggcaatagacttattttattcatatagccttttactattctttatgaatagtaatggcaaaagttacaataatactatcataactttaacctagaattcttctataaaaaaacactgacctagaattccgccataatattgggccaatgaggttctttgtttttacagagccgatgagtttcaagatcaataaattaggttattagttgactttagaaaaagtaaaaaattgatttcacaattattaagaaaattaattaatttcattaaattatattatttttaattaaaaaataattttttttaaactactcccattggaacttgatatatctcattaaacgaaggaaaagtagtaaaagagaacaaaaaaaattgtgtttttgtttataaaagagaatggaagagacatataagaacattaatgatttttagcttgatatctaatttttactaaatcttctaataaaggagttgaagaaatctctaatatggataatgagttattatagaaaatctcttaaaatctgcatattattccaaaaagaataaattttatttctttttcaatcttcctaaaatctcaaaataaaaataccattaaagaaaaaaatggaagaaatcttgaaatttttttaatcatatatgacattatgggatctaccaaaaaatagtcaaagatcctaattggatatctactactaaaaatactctaatacttgttataaataaaatttcacctaaattttacaaatgtatattaaatttcagtttaaatcaaatttatatttctttaggttaaaaaacgggtacatgactccctctaactactatcagtactttgtggtgtctgaccacaattctttttgttgggactctgatccctctttttgctcccattaattactatgaccgcaatttcaatgggcttcttaaatacagattttgctgaccttccatgagtttcggcctgttccttctatgttctgttattgttctttctcttttttctataaatttgggttgggttttgatagagtatctttagactaaagggtatcaacatagtgaaatctgcttcctacaccattttcgtaatggtggaatatccaaaatatttttcgagttatgcttcatacatattcgcataataagttttttttttatggtctcgaacctgcgaccttcacgttattaatacgatgctccaattaactgagttaatagactaattatgttgatacatataacactaaattttttaatatatatatttaatatacatataattttatataataaatttgtaacaattaattttaatctaataattaatttatagtttaacttatctataaattttgttttgtaacatatattgttacgaaataatttatagtttaatcgcatgtttgataaattaattattagataaattaaactataaattaattattagatcaaaattaattgttacaaagtctattatgtaaaattatatgtgtattaaatatacattaaaaaatttagtgttatatgtatcaacattaattattttttaatataattgacctattagctcatttggttgtatgaattatgcggatccgtatgaagcataacacgaaaaatatcttaaataacagcacaagtaatccaacaaaaaataaaagagagaacgtgtgtgtttgttttaagactcttgaaatcttcccctttttattttcaaaacttgttttcaacatatttttatattaaaaaaatatgtatagattttaaaaacaaaacaaaagaaaattttatttgttaatttctttttcagaaaacagattttaaaaagaattgtataagataacaatatatgtcaattacataatcattattacatatctgacatttaacaacatttttttgtctaatatttattaaaaatgttactaaatttttttggcaacattcaaaaaatattgtcaaattatcaatgtatgttactaatatgtttttgcaacattttatcaaatgttgtatagctcatattgctaaaacctaaaaatttcacaaaaagactttagcaatatggactatatgcaacatctaataaaatgtcacaaaaacatattaataatatttttttcataatttgacaacattttttgaatgttgtcaaaggttttaaacaaaatttttattaagtgttagacaaaaaaaggttgttaaagatcatatatgtagtagtgattatacaagatcaaaagggttctttatttattacaataaagcatcaaacttaaaactaaaactacaaaattaaattataaatctaattggcatgcatgcaattgatctttttctaagagttcaagttcttttaaggccttatgttcaaagtagagaatgaactctttgtttaagtgagtaatgacttcagtgtgtcttaatgctcaaacaatggcataaaattcattgtcatgcataaaatacttaaatttgtcatcattatataattaagtttctcataaaaaagaaaaatataagattggtctagtagttaaaaaagagatgaaagaagaaagaagaaagcaaagatcacgagtttgaatctctcaactaatatttctaaaactataaactaacatttgtcgataaaaaaaaaagtttctcatgaaaaatatgccatgacataaaactcattgccatactaaaaaagaaaaacacttatagcttcatttccctcttatcttggtcaactttaccaagtagcaagggtgcttacttgattttcaactcatcttttataaagaagcaattgtttgcataattgttatacaatgctcgatagtcttattgctcaagtctcccaagaagatgacatgcatcaaaggaaataacatcacatcctatatgattctatgatatttccaagcagatgaaaaatatacaatataacatttagaaacttttaccttactttctttgttatgtcattgaaacttgtatggaagtggatgtttttgtgttgataacttattcaccatgtagttttatactacattttcacaccctttgtttattgtaatactagtatggtaccaaattcaatctatagtagaatatttacaaaaagataaaatttgaatttcaaattgcacccacaaatgatataaatactaccgttgcaatagctttacttacatcaattgcatatttctacatgaatctttcaaaaaaaggactagcttattttaataaatacatccaaccaacccaatccttttaccgactaacatctcagaaaatttcacaaactcttatctcttagtttttgacattttggaaatatattagctgatgaattagtaaatgttgttcttgtttctttagtacctttagtagttcctatacatgtcatgctccttggattattcacaagcggtattcaagctctcatttttactactttagttgcagcttatatagataaatccatggaagtagaagaagctctggtgggatcctcacgtatagaaaaagattgtagttagtttgataaggatcgagtgacattgcttctttgatccgaaccaaggaatcccttaaatattattcaagataaatcttattctatcattgatcaaaggtttctctatgaaaaatacgaatcggagtttgaagggggggagtcctcaacccacaacaaatagaggaggatttttcaatcacatagtttggtctcctagaatatggtgcccttaagacttcctatttgaggggttaacttctcacacccagccaatttcccatacacccagccatgaataagggaatttcgaaaatgcccatcttaaaataatgcataaagtgggtgtttcaaattttttcttatacacccagcagaccaaacgctttctttgatcttctcagctccgttctcctccgctccgctgcgcccttcgtcttctccgttcttctcagctccattgactcccatcttgtcgtcattgtcgaatccgtgagttctgcgttttatttttttcatttctgctatggttgatttggatatggaattgttttgatggatacggattcccaattcggtagaagaaatggactaatccgtaagaagacgtcgtatccgtaaccctatacggattggcaatccgtgaggtaaacaaaaggcttatcttttaaattaatgcatttgttagagccccaatgatttgagatttctctattgggccaagtcatttagggagaagtggatcatttatgataaagaggatgagttttaagagaatgatttagagttcttgcatggcagaaccatgcaataccagacacgagataaatctttcagagattagagcttttttcaaataagccaattcatttgggactcatagattcactctttttcctattaaaagataagccttttgtttatgtgtaaagttagtgaatataataatagtgtgtagtcttttggtaccaaagatgagtagtagcaggtctactgtataaagttgatgtgaaccaaaaacacttcaaaaccaaacatatcttgttgatcaagctagtacttgtctgtacggtaaagaaattgcaagataaattgttttgtatataataatataatgttatatgataaattaatctaataaaaatatgtgaattgatcaaaatatttttcttttaaaatttaaaaaataaaaactaaaagatatattttaatcttatctaaatatataattatttaaaacaaaaaaatgtataagttattattgtgaataagcatgacaaacgcgtgggagatcaggtatatttcaagttagtttgctaagaagttagttagaaatgtttatcaaatcaatgatcattcaatcaatttatacaatgttcttatatgatactcctctactatatttcaaactttatgggtatgatgacattatgtttgtgctagttgtattttttttcaaaccatttcatctcaaatttctaatactaatcaatattggttaacgcttcaaaaccaccactacactccggaggagtattttgtaagctacatcaccagtaatataccaaaaaaatgtgttcgtacccggaaaaaaaaactaaaagtattaacggttcattgtttacaacaattcaattttttttaatatcattttttagatattttagtttacaaaagaagtagggatatgtcacttccccaaaaatatattcaagaaacccgaacccgtaggtgcagatcgtctttttatccattttctgaagtagaggtgttgatatatcacaaaaaaaggtgttgataaaatttaatttagatgatcaaatgcattaatttaattttggagatgaacatcacaagggggaaagaagtcagttaaggacgtacgtcttaaaaacttaaaaagaaaaagaaaaattccatattccatataagataatattggggtacccaaaaaaaaagagatgatattattaaaaaaattcttattataattataattttaatttactagaagttataagagaatataaaccaaattaattaaaatattcaatgaattcctaattatagtaaatgcatagtaatttttttatttatgagaaaaaaaattctagtcaataatcaaccatttatttatgacaaataatatcgtattaaatatttttatgttgacaattgttatcttccgtgatagaaaattttaaattgaaattataattcttaattcaaaatagggtttgggttaagaattgattgcaaaaatctgtgtcataaatacaatattgatttaaatggtcaaataatcattaattatattttcaatcaaatcattatgttcaaatttaagatagtagtatcggttttacgaaataatcattgctttagaaattgtcatgtgtggagttttcttcttctttttttaaacattttacttttttatagaacattttactttttttaatgcaataaaacattttactttgtatatagtaacattttctttaacagtgtatataataacatagatagaattcacaaaaaaaaagtaacatagatagatttgttatctttgacacgtatctttttttttagggattttacacgtatcttaaaacacacccccttcccaaaaaaaacctaaatcataatggacaataattataaaaataaaatataaatcataagggacaattttttaatatcctacgttgatgttcactaattaaatcattctccaatttcaattcattgtattcgcatgcatggctagtctttgattggacgagaatgaatagattaatctaacgcattatactctttaatgtatgctctttcaaatacatgatcttcttttcccccttcaagccaattacctcgtctatgccttttatctcttcattgtatgggtaatcttccttgttctatcatggccaccacccttttgatcacttctacaaaaccacggtgtgaaaacaatgtggagttgtggtcagtaatgtgaagcgaaatcatctcacgaaatattctacattcttataattatcaggttacaccctacctgtaatgggcatattttggctttcaaaattttcaacaaaacaatgtctcaagtaggtatattttgttgtctgcgttataacttgcttgtgttgcctggtgtcattttatccattattgtaaatgatttatttatttaacacatgaaattttgcaaaatctgctataggcatgttaagggtattgttaaagatatgattagatttgctgattatagggatttatttccctctttcccttattatttttatcccttcagaacacacaattccagcaataatacttttttttttgtgctgaccggcaatacttgtttaggtatttttgaaacagtattttgttttggtagtcattcaattgttatgaattttaagtacatttcaatattttgttcacgattcaatttcaggaattttctgatccttgtcttgttatttgtctaatgtgatgagaagcattgcgattatttttatgcctgatggttactttacgcatatatcatcagtatgatttttacttcattgtcaatagagaagttgttttagcctattgagacatacaacattgactaatgacaatacaatacgtggatcaaagcatgcatgtgttagttctctagagtgcattttcccatttggtaagtaatagaaatgtgggaaactggaaaaaatatgtaacaaatgattggagtgtgcaactattcccgtgtttatttgagaatgtgattgagcattatccattgttgaatatttgaaggtaggaaaaataattttaccttttgagtaagaatgctgtctttgtaggaatcaaataagtgaaaagacttaacatggaaaatttcaggccaagcgtatgccagggaacaattataactgcgtccctttaacaccaaggtctagattggaaaggcttctgagggaaagagagctaaggaaatccttcaagcttattcaaccaaccgaggaagcaagagatggcagcaacgagggagaacaattttatggtgattcatgcataagtgagaacgaaatttcgggtattcataaagaggaagagatcacggaaacgaattttacagatagaagccaaaggcaagatgagaggccaagcaaacaacgtttgttggtggtagctaacaggttgcctgtgtctgctgttagggagggtgtggagtcatatcgccttgagatcagtgtaggcgggctagtcagtgcacttctaggcaagaaaattttgtcaccttgcactaattgtttctttggtgtgttttgttaatttatttattgtgaagtttgtaattgcaactcaactttgctaattagttacctttcttgatgatctcatagaggtcacaacaatgatagttatcttcacaacattctaataataatctattacttataggaatagattgaatttttctatttttaaagtgaaggttgtatgaagcttgttgtttttgttgaaggtgttaaggaatttgataccagatggattgggtgggctggtgtgaatgtgccagatgatgttgggcagagagcattgacaaaagctttagctgaaatggtattgactcaaatttataactcacaagcatgtggccactgatcaatgtagtgaataatgataatctagcaactcttctctttgcaataccaaagacacacacaaaccatcagtaattatgcgttgttaactgcagcgatgcataccagtatttcttgatgaggagatagttaatcagtactataatggctactgcaacaacatcttatggcctctgtttcattaccttgggcttccacaagaagatcgacttgctacaactcgtactttccaatcccaatttgacgcatataagaaggcaaaccaaatgtttgctgatgtagtaaataagcattatgagaaaggagatgttgtttggtgccatgattaccacctaatgttccttccaaaatgtttaaaagaatacaatgaaaaaatgaaagttggttggtttctccatacaccctttccttcctcagaaatacataggactctaccgtctagatcagagctgttgagatctgtacttgcagctgacctggtggggtaagttattctcatgcatctccaacttgatgttgattatagtagcaactagtacattcacaagctaaatttctttggtatataggcatcaagggcatgcatttagaacaagctagtccatctttagtcaaaaaattatcttccaccttgaaatttactattcttgcttgttgatggcactatttagtcaataatatcaagtggtatgttgctgcttgctaggatatttgagaactctagacattttgtttaatgttgtgattttaatattttcattggtctgcatcccagattccatacctatgattatgcaaggcattttgttagtgcttgtactcgtattcttgggcttgagggcacacctgaaggagtagaagatcatgggaaactgactcgtgtggctgcggtatatctgcatatattattttccctttctaattctatacatctaattgtgaaactggaatttcatcttgtgttgtatgtttatcagcattgaatagctttacgaatcagtatgcagtatctgatttcattctcatgatgacaatgttttattttttgggagtgtgaaacttcagtttcctattggaattgactctgatagattcattcaagcccttgaactccctgaagtccaagaacacatgaaagaactgaaagaaagatttgcaggccggaaggtaggagccatatacgccaaattttaatgttcaacaatttgagaagttgagattattcctcagttctgttctacatctgcctttctctgaaaatgtgaatcattagaatcactttatgtttcttatcaaatggacaggtaatgttgggtgtcgatcgtcttgatatgataaaaggaattccccaaaaaatcttggcatttgaaaagttccttgaggagaattcacactggcgtgataaagttgtcttgctgcaaattgctgtacctactaggaaagatgttccagaatgtatgttatttctctagaaaagttaattatcacttgaagcattttcatccattgacttagactatgttttatttattttgtttctcgtcttatcatagttattggcgtttttcatgactgacaatattgacttaatgctttggcagatcaaaagcttacaagccaagtgcatgagattgtaggacgcatcaatgggagatttggaacacttacagctgttccaatacatcatctggttggtgttttaaacatctacagcatatatgtgttgtttggtatttgacgatgcaaggatcatgagtgtggatgctatctattatttgggatctcattgaaaatattaaatttctcatgtcactactatatatgagttgatccccgttactacgagatttgaactattcatcatctatatattgtctgtgttctatggattgtccatttgatcattatgctgccaccaaaaagctgtaaattcaatgtctgggttgatctacttaattcaaatttgttattctcaatttgtgttgttagctacattctctgctagctgttttacaaaacatatcattatcacaaacatattcacgatgtctcatttcttcatctccattatttgatcaagtgatataagacaaaagtgcaaacggaataaaaaagggaataaccattctagcagatgaacaacaaacctactagacagattctcctgaaaattaccaggaaatgaggaaagtcctctgaatcataagtgataaataggagttgcattttatcacatcttattttttacatagcaaccttttgataacaagacttgattgacaagtaaagaaaacatacctatacaaagtactctgatgggattttaattctatcaaaatttccgtaaaattacctccaataacccgataaaattataaaaattctttgcaaaattacaataaatcttcaatagttgatcttcttttgtcctgcatcaccaaggaactttcaacctattctttctagattaccttgatattattcagaatgtggagcttttctattacacaatcacttatttgtgtaatgtggtcaaacgaaaaattatttcccttccatcaaaaattaaagttatatttattttttaaaaatattcaagtaactaccttgactgttctttgcacacactgaccatgcattttgtctcgttgattacacatccttctcttgaattgctaaaatttttagggcaaagtaaatacattgctaatcttcccagaagagtgacaaatgaagcgaagtcatatgtttatttatcatacagaaaatatttgttattgttattctgttgaccttgtaatgatttctggaacatctctttctatgattacaggatcgatcacttgactttcatgaattatgtgcactctatgctgtaactggtaatcattttctgctataacatacaagatttagtccatgttgtccttatttattcaaagtaataatattttttatatagaagtagtatcatatttcaccattggattggtgaaatactcaagctgtaggacattctttcttgttattgaaaaagaaatttcattatctttgcagactctttcacttttctttaatatatgttccacgtgatttaagtcctctgcttgtaacatgtacctggctgtaagaatagattgaactgattgatatttatttaccaggagatgaggaaagtcctcaagaatcatatttcttgatttttaattcatcgagaaaagaataattgaagtacaatgacttacagttgtttctttatattcacatttgtaatatacttctgttttatgcttaagatttgacaactattcctgggaatcagaaaatggcaacaggctgcagcatatcttctttataatatattataaaatccatcttaagtagttttattgaactaagtattcagcacccatgatatgtatcataccagtctgactcacatcgtatttagatgtagcacttgttacatctttaagggatggaatgaatcttgtcagctatgaatttgttgcgtgtcaagcatccaagaaaggggttctcattttaagtgaggtaattcagttttttaatgttctcatcatttattttggctgcatctcttggatactctgaatgtatttgagcttcatatttgagaacgtgatttatgttttactaagatcaccaacatttcaaatgattctgccattaagcatagtaatgttgaggtatatgtatttagctattttcataaaacagcaaaacataaaacaaatttactgtcatttaatgaataagactttcctaaccttaactaggtcaagctagcaagtcctaagaattataaacaagtttgtttttcctttatcaccatatattaatctatagcaccgcacatagtctttttttattttatttattttgaagtgtttacgcatcaatggtgttaaagtttttctagtctcaagctcacagtttggcttgttggaaaaagaaaaaaaaactagcctagttaagctgagacgttcagctttctttttttattttgtaacctgaattgtgtatagtttgttaggcttaactatagagaaaaatcatcagtatgttgtatctgtttcatcaatcatccgcgtcgttgttgagctctgtaatgacaaggtctacttttgatggtaacctggttatgctataatgtgttcataagtatactatggtttcttgaatattgagaaccagaatttgtttttgtcaaaaggctaacatttgttgaaagacatatgtcaagagaataagctagggtaacatgaaatgattgcttttgatgcatggaattgtggttgctgatagactgaaatttaaataattataatcatcttcccctatcattatcattctataatccacgatgcaatattgatgtatatttatttttcttttaaattaactatgatgtccgtgttcttcatcttatcaccatcattgtgaatgttaaatatacgaaatgatcaatctattcaaaccaatatattttctgttcttagttgttttctatgtacagcccatgagtgctttacaaaaactggaatatttgtgataaagtgacagatagaaaaggatagggttgatactaggcttctagttcaagacttcagtaggaatgtaagatcatactgtagattatattctttataaagttattgtttgtctggaaatatcatcttgtttaaataaaaacaaattcttatatgtccaattattttattatcacataattaactcctaaaatcactaggctttcagtataattcaaataatttagaattctttatttggtatcagtttgcaggtgcagcacagtctcttggtgctggtgctatcttggtaaacccatggaacatcacagaggttgctgcttctattggttatgcgttggaaatgtcagctgatgaaagagaaaaacgacatcagtttaatttcaaacatgttgagactcacacatcacaggaatgggcagcaacttttgtgaggttttaatcgtataacactgcttgcattttgtttttcttggatcaattttgttccatattttatttttcttgtaatatgaaacagtcagtcttacacaagcatattagatcgaccactaaagctagtttgaaatagtgtcaatgggaaaatggagaaaaatggaaattctgtctttgaaatagctatattggtcggtctattgctctagattttgtcctgaccttctatggtggtctgtgccacttatgcttttcatgattatttattctaaaaacaaggttttatttttacagtgaactgaatgataccattgttgaagctcagcttaggacaagacaagttcctccattacttcccaacaaagtggcagttgattgttactcaaaatccaataaccgactaattatactggtaagctgtttgttagatcatcaaacactgaataaagggctgtcgcaaattattcaccctattttgtgcaataagtattaggcttacatttataaatggaaaccaacatgaccttacttatacaagtgcaccgcacgtgtttaagagaaacgcacatgaggacttatttgtttccacttgttttttgtgaataagtgagaagggttgccttctcaccaacttatgtagctccttttcactaaaacaataccattttgcctcatctgcactgcagggtttcaatgccactttgaatgaaccagtggatgcccttggaagggctggtcaaattagagaattggaacttaaattacacccaaatatgaaggaacctttaaagaagttatccgatgatccaaagacaacaatagttgttctgagtgggagcgatcgagcagtcctggacaaagtactatcaagaaaacttcatgtgtttttggattttcagcaacatttgcttttggactaacaactactttatgcagaacttcagtgaatttaacatgtggttagcagcagaaaatgggatgtttttgcgacgtacttcaagtgagtggatgacaaccatgcctgaaaatttaaacatggattgggttgatagtgtgaaggtaaattagctgcatgaatacaagtgtttctcttattaagttcctttagtttcaagtgtgattttttgtgatttttttttctcatattttttataaaatttcagcatgtttttgagtattttactgaaagaactccaaggtctcattttgagcttcgggagacgtcagtagtatggaattacaagtatgcaggcatgtgaaaattttctgttaccatcttcccttttaattttcaacctacttatttttttataggactaacatatgtttttatccttaataaatatttaaatttgtttattttttgataaattttttctttatattaagtctttaataaaacaacaatttattttttatcattgtcacttttttttagtctatgataaattagtaaattttggatttatttcttgataaatttttttttattaatcttttttcaaaggaactaatatcaaatgagaaaaaattatcagaaaacaaatacaaaattcactaatttgtcacgattaaaaaatgtcaatgatcaaaaatcaaatttttattttatcatggaacaaaaataaagaaaaactttattaaaaaaatataaaatttggatatttattgaaagatcacaaacatattttaacacatcatctctttactcccttcccagcaaagtgggagccttctatggttaattgctaacttattgtgactgcaattaacactagatgttgagtttggaaggattcaagcaagagatctgcttcaacatctgtggacagggccaatatcaaatgcatctcttgatgttgtccaaggtggtcgatctgttgaggttcgcacagttggcgtgtcaaaggtataagcaatttcagctggctagtagagtctctcacctatccttttctgttcagaagctttatttcctctacatgctagcacctgactttttttggtatagggagcagctattgatcgtatccttggagagatagttcataacaaaggcatgaagacgccaattgactatgtcttatgcattgggcactttctagccaaggttagtgcactttatttgattttctattcttagttcacttgagactttgttattgttagagtggcagagcactaagaatgactagattgttgccttttggcagtctggtagcaatgatagaacaccaattgataaggtaataaaatataatattgaaaactgaaatcacacacaatacagcagtacacttactttcccaaagacaagtctccggcagagagtacccaaactgcaaataactacacccttcttatttacacaacttactaccaaatatatactcttaatagataactgtcagtagttagttattttatatgcatgcagattctaatatggaactacctccaattcattaagggtcctttcctaaccaacttggatctcagttcccatcacctaaggactcaactgtaaatattagaatgaaatttctaaaggagcattgattttagattgatctacatcagaaaaagttacatttctaagccttctataatgattaaggcaaataatggttggaaatgaactgtttcaggatgaagatgtgtatacattttttgagccagagctcccttctgaatcacctccattaccaagagctatgctatccaaatctaattcttacaggccatcatctctgccaaaattaccagccaccaaaaccgggtcgaaggcagctcaatacaagaaacaacgttcattgtcaaacatagaaaagagagaaattgatcaatggagaccaatgtatagtgataaaatagcattgcatgagggttcctcagtgcttgatctaaaaggtgagaattacttctcttgtgttgttggacggaaaagatcaagtgcacgttatcttcttaaaacctcagatgatgttgtcaacctcttaagtgacttggcagaacattcttcatcaccaacttaactgattgtctttttgttagattgtttttttcttggtaaagtgtctattcatatcatttgattatgcaatgccctacatgtctcttgtgagttgaatgaatctcaaactggcaacgtacttccagcatgtttggaactctcaaaactgtgtttgaaattctaacttaattttgctatataaaaaaattagttgtttgggtgtttcttttagaattgcttttagttttactcatagcacgtttaacagaaagcaacaaaaaaaaatgtagcttttgccttagattgagattttacactaaagtccactgttaacttgcgtaaaatcaaaatatttttaagttggtaaatttttaccaaaacattacaggaattgaatgaaggagtcccactcaatcattttcaaagattggttttaattttaaaaccagatatgatccaaatttaaagtagtttaaattaaatcagtttttttgttttaccccttacgtatttgttttaatgtgagaaatgaaaaaattttaaatatatatattaaaataataaagaataagatggcaaaaacaaatactataattttataacataatacggcgatatgctaattccataccaataaacacttctattcttcaattgatattaataaatgagaatacaaaacatgggggcatacacttattcagtgacatacaaaatttagaaaatggccgcctaaccaaagctttcactgtttaacaatgctcttgaacttttgaactaagttttacactatatgtggtattaaatgaagaaaagatgactaatccctaaatgaatgggtggatacatcaagaatacaatttacagctaccaaagaaaaattaactcaatgcaggtcctggttggggcagaatggtgttcaaaatatgacacaaacctcaatcaagtttagttccccttaaacaactcgaattaattcccatgagctattcttctagtcttggtttgttttggcacatatgcatattggccgaagtccacagtttttattggcctgagttaagacaagcaggacacaaatcatggtgttgatacaaaagtataagggataatgaattccagtttggcagaaatgcattacctattatcagaagtgtttcgaacatctttcagaggagcacggagaccactgacacgagtgccagaagtgcatctaaaggatgatatcacggagacaaatctttccatagacttctcagctatttctgaatactggcccagatgggaaatgtttgtcccaaatttttcttcttcagcattattctctgtaaatggcccgtcaacattgtgatcacagcaacctataatcaagaaacatcagaattcagagaaacttcagcctcagcgagatatttcctttcatgattatttaaaaaacatgcatatattcagtaaagttcatggcagatatctctgctgagcctgaataaaacaaatggaatccgaaactgagaatttactcctctttatcctcgttgaagagtactatgttattcatatactcaaagcacgattttccataaactgagcttttgctaaacatgattttacttttacttttgctaaagtttatggatgtttgaacctctctttgtgatttcctacttttccataagggttaatagttaatacttaatactaataaattgtctatcttacctctccaactcagacaactccacaagtctgtactctttaccttataatactataccaaaagtagtcaatattaaattattaattatgtttaaagataagttacaatttagaaccaataggagcttttcattatccacaaaagtcaaattgcactgaccaaaaatacaaaagtcaaatcgccatgaaaatgaaaccgaaaatgaaatttctaaatgaagaagtagtcaatcagtatgcatagaagcttctgtgggagttgtaaagccacattcttaaaagatgataatgcaataacaacatcagtggtagccaccactttggacagcaagtagaagacaacaaaagcaaagaacataattagtggaatagtaagacaattttagctaacaagtaataattcataccattattatgaggaggtgaagaacagtgcatttgcctgggctgcaaattttcctggagaaagtcatttccatcagtgcatgagtaaaaggagaaagtgttaaagaaaacataaggtccgaagtttaaaaaatcctacattttgaatattgtcattaggggagatcttccttttcaggtctttattcttcaaatggttgttacataaatcactgtcagatatggcctttcttctcttgtcaatgacaatgccagaggacaggtgatcttgtttctcatcacaaacattattttctacttgcttgtgctgaaaataagcactccttacaattaactttcttgttgcctccctgctctttccttcaactgagtcaaggactatctggtctttattcttcacatcgttgttacataaatcactgtcagataaggcattttttctctcatcaatggcaatgccagatgacaggcaatcttgtttctcgtcacaaacattcttttccacttgcttgtgctgaaaataagcactccttacagttacctttcttgttgcctcctccatggtttttcctttaactgtgtcttggacatttgtgtgcccattcaaccccagacatggtttatgaattggctgcctgggctgtcgcagtactgtatgttcagggcttttcttctcttcacccaccatagacaattcatgcaaacaatgaaatgagtaactaacacatgtaaaggcagtaagggattttcccatccaaagcaaaccagcagatttatatcttaccatgacatggagactctgtaaattcagaaatgtttgtggcagaactatatcgaatctaaagaaagaaggaagaatatgtttaaaaaaatatgtaagtctcactaccaacaatgagtagagttttcactgttatagttcaatattcaggcaacttacatggctattaggaggaggggcactgccccaattctcagagtcaataaccgatgcagtagagttctttgtttcattagcagcagtaggtgacacccgaggagctctgaatttccttttcgcttcaagagaagtaaaacctttcatggctaaggaaaagctactctaaagaagaatagaaaaaaaagctgctagctacaagtggtatgttgtaaagaaacattgagcttaaatgccactgaaattcattgcctcaacttgattgttttaaatgttatatatcttgaatctaaatttttagaaaactggtaactaaagcatcaatagcatcaggcagtatcccagtgaagcatagaattctgccctgcattcatccccgttaaacatgctaaacatattaaaatcaattcaagaagaatgctttgtaggatacaaaagtacttagttaagagattcttctgcacaggcaaatcaatctttttctttgcactttcagaatgagttttgaattgactcgttcccacaattgcaaatctggctgtaagattctctccctgccatttaaaagaaatagatttttaaccaaaagtcccctttaaacaagggtttaattgaaggaccatacacccatgtatacttcttaaatgcttttaacatttattaaaaagaaaggggtgacaatctattcatatttgctcaggacatgtttgtgaaggtgatactaactcccaagaaaaccttgtaccagtactatagcataaggcaaacaaaatctactttatatgtagaatttacacaaactcatgcacatccacgcaaaccaaaggcaacggttatagaacactagcaacagtcttttcagttgttgtcaatcctattcctatcattttcaaaattcattttttttttcacaatcatgcaaattgtccttattccaaaaatgaacaaatgaaataagtcaatttattttgaccaacacatgcaagaaaaacagaggtatttcagtttactataaatttattctttcactttaacaaacacacactttggtatggatgaagataaagaagaaattgatgatgtacctcaaatggcattttggtaattggatcaagatccccttttgctattctttgtgctatatcttttggcatgggtgtatcccaggttaaggtataacttcaagtaagatcttagatgattgaacaaaatggagcagagtgatattaatttaaaatggcaagagaacattaaaaatgaaggatatgggcctaaaaagtctaactcatcaccaatatcatcagatatattagacaaatgaacaatattttcattaattggatcataaacccgttgatattggaaagtaagtatagctttcttgaatgactcttcataaaagggaggcacagaaactccactatatctcaagtgcttaagaacctgatacattgcaatttgcattagaaatacaaaaatttcatatagaaagatttacatacaagatttataagatatatattgttataaaaaaacacttttaagcatttatgttatgtgtatagatgtagacctggctgcttaagtgagtttaaacagggaaaatgaacattgattgctaaaaataaacatgcttgttagtttttatggttctgaacaaccatgcttgctaagtgtatcagctgcactcaccttgtcataacttctaaattttttaatgcttgcatgggcccttttgagacccatacctggcaaggactgcagataatcacagccactcaaaatacacatttcaagaagcatttgtctgttgaacccttcaaaactaagctccttattcttttgtagcatggaatactgaaactgaacaccttgaccaaacttgtccattttaaagataatctaaattttcaaggaagaagcaggccagtcaaaaaccagtgagtacgtcaaagtaggaataaatatacactagtatagaaagataacaaaaaacatctatagcttaagccacgtggtaaacttactcttgggcaaccaaacggtataagatcagagtcttcagttataactgcatcaacttgtccacttattgccaagaatgtcatctgggcatctgcctcgtaaggagcaacaatatactgcaagttctcctgcttcaatacctttcaagaaaaaacaaggttaaatatttagttggggatttaatgtaattattgtattgaatatattcaaacgaaatacatatgtgatacacacacacacacacacacacacttcacaacaaccagaccaacgctgatatattgaactcctttatacctgaattagttcaagtgcaatttgaggtgaaatatcaactgctttctggtagcactcataagcagcagctgaatttccatctgactcatgttcaactgcacgtgcaagattatcctttctagccctgcacttgtagcatagacaatatttgattcatttgcaaaagagcaaatacaatcaatgagattttaaggttcttaaatctgcccagaaatcaaagcactcctctttggtgatcttgtaataaagctcataacctctttatcccttaatatcctttagtacttaattcttttggtaaaaagagagaaaaactacgaaactcaggccccataacaagatgttgttttcatgggtgctggagaaggattggtttttcagtatcttagtttgaaagctattaaattattaatcaattctatccctaaatcattcagtattccatccatcctctatatttcacattaaaccaagttcattttaattttacctcaatttcagaaacagaaaagcaatcaaacaatgacaaacagcaaagaaaacaagtatgacatttagaacagaagcagaaacattgagcaagtcaagatcataaacatggcattactgctattttcaacaaattgtgcttgtgaataagaacctcatgtaaacatgaaggcatacatggagacagagctcaagaaagtttttgttcaaaattgtcagcttatatcatttggagaatttccctacatgcagacccactgtacactgaggaagtgaaatcccacaaagggagaaactaatgcaaatgcagacagctggtacaagcacagcatcaaatccttctttgaattttgaaattagataactcacagagaatcaaattaaaagaaaaatgaaaacggttatgacttgagcacattaagcttcttactctactcaatgtaagactcataacattgccacctcctttaagaactgatgtttacggaggcttcacactatcaacagaaaccctgcctgataatagccccttttcctcacctatcagtacttggtacattataccttaatctaacctataagtagcccttaccatagttcaacgctcaacaaaagcactaattgttatgacttgagcaaaagtggagagtccaatccaaaagactagttcgttatgtaagagaacttcatagctagtaccacattactcaacataacatacatgaaagcatcccattaacaattaaggtgacactcaactcaacaaaagataggtttttctttttatgccaaaaaaacttaaaatacccaattaagaaaaaacaaagtacaatgtcgggaagacaaagagagtacctggcacgcttgttctcttgttcactcttcattggcagaagccctccatcaaacactagaataggcttaaccccaaaatggcgcagcaaatttactctgtgcatgcaatactcaatgtgcctaaaacacgccaatgcataaaccaatctcggttaagccattttggggtgccataaattcaactaaaccccctttaaaaataaaaatcgaacttttacgagctgggttactccaaacaaaaatcaaagaaaaacccaataaaataatggtaaagaaaagtgtgaaagggaggttacctggtagtgggcatccctttgcagagttcggtgctgcaagagagggcacctttgtggagccaagagtaggtgtctaccgctacagaacaacccttcagatccttgatgtggattggaaccataatcgacttcaatagcggcaaaaacccctgtattcccattcctctttctctttggagtgaaattacaatgcactaacactacatttcatttcatatatgcactaaaattgggcgccaaagtttatattttggcttgggtaatggcggagtttaatttaatatcttcatttaacgttacttttgtttacatgttttaatttttatataaacattttttagagaatttatataaacttttattgatactaaaaaaataaaaatttaaatatatttgtatccctaatatatatttaaatttggtatttgatttctaataaaaatttattttataataaatctctaatattttaaaatttttatacgagatgtttgttgttggaaagaatatgttattttttatgtagttgttaattttataagtagacaaaatacttgtaatgtgatgtatatttgagttggaattttattataaaataaaatttttattttgtaattataaaatattatttaaaataaaaatttaaattaacattaagagaaagaaagaaggaaattactatttatatatcattttaatannnnnnnnnnnnnnnnnnnnnnnnnnnnnnnnnnnnnnnnnnnnnnnnnnnnnnnnnnnnnnnnnnnnnnnnnnnnnnnnnnnnnnnnnnnnnnnnnnnnnnnnnnnnnnnnnnnnnnnnnnnnnnnnnnnnnnnnnnnnnnnnnnnnnnnnnnnnnnnnnnnnnnnnnnnnnnnnnnnnnnnnnnnnnnnnnnnnnnnnnnnnnnnnnnnnnnnnnnnnnnnnnnnnnnnnnnnnnnnnnnnnnnnnnnnnnnnnnnnnnnnnnnnnnnnnnnnnnnnnnnnnnnnnnnnnnnnnnnnnnnnnnnnnnnnnnnnnnnnnnnnnnnnnnnnnnnnnnnnnnnnnnnnnnnnnnnnnnnnnnnnnnnnnnnnnnnnnnnnnnnnnnnnnnnnnnnnnnnnnnnnnnnnnnnnnnnnnnnnnnnnnnnnnnnnnnnnnnnnnnnnnnnnnnnnnnnnnnnnnnnnnnnnnnnnnnnnnnnnnnnnnnnnnnnnnnnnnnnnnnnnnnnnnnnnnnnnnnntttcattaaaattgtatataattttgtaaaaagcaacttttaatttatttttaatttttattgatataaaattataattttattattttttaattcaatcacactatacaataagataagataaacaataacacgataaaattatattatttttgcactaaatattttattataaaaggatatgataaatatcaccaaacaaatcctaataaaatataaaatttatattataataaataaatatttaaacttatagattatattttaaatttatgatagatatattattaaaaaataattacaaaaaatatttatgatagataatttaattttgatttaagatttttttagttattgataattttttaaaaataaaatttagtttaaaaataaagataaaaataatatattaaaagagataagaggttaataccaatttctctaaaaattatctttactaaaaaaatccttacgtaagaaaaaacatttcctaaaaattcttaaaaatactatttttaaaaaaatctctaagcacacttaattagattaataattataatttaagtaaataaataatttcatttaaggtgttaattctgaataataaaaaaatgaaatttaattatgattatataaaaatatgaaaaattagttttatagataattttataataaattaatttataaattttataatttaatgttacattagatcacattttaagacgaatttgattaacaatatcaaatgaaactgaaaagggcaagaagaagctgagagagaggggatcatccatccatgtagggaagccaatcgattccttgcgcgtttgcttgcttcgatccacaccactgcactctttacttcaatcttctcaaccctacttattcattcattttccgtttaagtaagggtttctcaatcgtactcctccatgctcgtagctcgagaatgctaggttaacgctggcttagcacgtagctctaacctatgaacctccggaacggttaactgtttgttccaaacccaccgttccgcgaagaactcgtacgaattgacgatgtgggcttagtttcgttctctgtttcccaattctgtttcacttctttttctaattgatctgctgtatcgtttccgtgctcagtgccaccatgcctcgtaaagtaaattacggactcgattacgacgacgattactatgatgatgattatgatgactatgcttatgatgatgccgatgcagaagacaatggttagttactttaatttgctttattttttttttctaatatgatgctttgtttcacttgtcctctggtttggtgtcagttacactttacacagcttgtttcacattggtatctgtttagctctgctacattttttccatgcagtttctctgatttggagctgtggttgttatttgttaggtttcttgttattgctactaattttttttactgactgactatttgaatttttacattgtttattgttgatttattttttttctgccgtagcaggaggacctgatacaaagcaagagaccattaagcctggggtttggcaatgctccatttgcacttacgacaacgatgagagtatgactttttgtgatatttgtggtgttgtacgccgtcccttggttaacactggaacttccaacagtaacaaaacaggtaatccagttaatgaagaataattttgtttgttggttgggttttttacatttgttttgtatgaaaagcatatctcttttacactgtctaaattctaaattacactgtctaaattccatttgtggcttagggtgtgggggagggaaaactccgttgatgtggtacatacaattcttttgtcattctgttttgatatgggaagatgggacttggaatgtaaagtttctaaattcttctagctttactaatatcaacacattagtttaaatccgtgagatattttatttctatactccatccctagaaagataagctgagataaaaacttatctgaaattctggtttgtttattacttctaaggctatggcacggttgtagatacaaaaaatagacttgttattctcacagggtaggattagatgtggggaggaagcaaatcaagaatgaagcaaggctttcccgtctctctgtttgttagaaatggcaactgccttaaaatggccatatgaaagagtctaaaagaatgaagctgcgctttcctgtctctctgtttgactatcatgatgctgtatatcttgttcatagagcacccttgagtggatttgagtgcagttcagtttagatggctattgtaggaagaaacaccatactgtgaggtgtgttaggaatatggacagaatactccttataagactttggcaatcctcctcccttgactagcttttggaagtgagttgggactaatccatttctaatatggtacaagagcctattcagtattaatgttgggtcacccaaatgtttagtcttgcaaacctcacattctaaatatcctgtactgggcgtgaggcgtgtctgttaagatgtcctacattgaataggaatatggctaaaatactccctataggacttgggcaatcctattcttctgagctagtttttgagagtgaactagaccctgtccatttttaattaattgtaccatagttttcttgacaatagcaaaataatgaccagcaaatttaaataattgagctaaattgataaacaatactgactctggtattagttattttttggttttaacaacttggagggaatgcaacgctgttcctaaaaactgatcattttgcatcatccagatacaaaaaacgaaaaatattaaactgttacaaacctagaattaggaatggggaagaaaagaaatattttattgaatagtatgaaaagaacaaggaatagccaaatagaaagagcaatctcacctccaagggtttccgtttcacaaagagttaatgctcaatttacaaatgatacccgatagaaatgaaagctttccccttacatcttatttatttaactcactaacccctaattatctaatcaatagggacaggatttctcagtgtttctggttgtttggcaattttccaatttatctttttatgtaaggttaaataataataatttgctaataaaaggcgtagcaggaggatgaggaatcatcaatgaaggaaaaagaataatttaatctttttgcaaatctgataaaaggagaaaatggggagggaggagagtcagagaatatgagaacatgtatctggctgcatagtgtcaggttttcaacaatggccatgatattcctataacctattgaacaatgtctttggtgcagttgaagacataagcaaaagtcctggagcatccaagttggccaggtctctttttcaatcattacaacaacagattcccaaagagattgtattatttccaaagccagatgatggttttctgacagatgacaataacttctacaagcttgaaaatgtccgaggagaatttcatgaaattcataaggcttttagtactcaaaggcatccacatttaaacataggtcttcacaagttttgattcaggatgtgcatgtgactagtttaaacagtttcttctaaatttgatatttgaaggttatgcaatgcaattataattagagataaaggtcttattagttgaagatcagagtttttttaatgagtaatgacatatcatgatttagtttctgcaagttgtaactccttgcacatgtgagcaaattacttatttattcttttttaaataatagttataaaaccatgccttttttttttttttttgtatacagatcctttcaagtttgatgttccatccccagatgatgtggtttatactggcctacgttcttccaaaacgggtttgaaaggtatccttccctcaacaaatctaatttgcctatagagctcaagttggacaaaatgtgtttaatagttgagagagctactaaccatcatttaacctgaaagctcaatcatttttttgtggttcacttcaatattttctaaaaactttcaatccctctcccccccccccccccccccccnnnnnnnnnnnnnnnnnnnnnnnnnnnnnnnnnnnnnnnnnnnnnnnnnnnnnnnnnnnnnnnnnnnnnnnnnnnnnnnnnnnnnnnnnnnnnnnncaatttcaatatgttccctattaaagttgtgtccttgaatcaccctcgaaaagatttctaattcctggaggttgttttaagtccaatggcaggaagctttcattgattatgatagtcaaagtaattggaaatatctcaaggccaaactgggatttctaacaaaatctttatcacagtagctttcacccaaaaatgaaaatatatttctaggaaaaactgtttactttttccatattttctgtcttcaaattcttattcgttgtacataaatattaatccatcttatttgtgtaatgctttcagacaaagctacaaacactaaaatttctcagctttcatcaagcatcagagagaagaatgaactttctgtacaatcaaatgctgaaagttctgacaacttatcatccttaacgcaaaagagcagacagggtagttcagctgagagcaaggtttccaaaaatgtagcaattgatctacaaacaagtggtaaaacttcaaacagcttgccagaatctttgtcaaaagacaaaggtaacaatattaataaaataaattctttgaaaaatggtacaattgatattcaatcaagcaaagaaaagtcaggtagtttgtctgcactgtcaaaagtcaaggaaagtgataacattagtttctcttctatcaaagatggaaaacctgaaagtatttccagcagtttcaacaatatggctctcaatgtaagatctggaaattcatctggaaattctgataatactaatgctaagggaactcgctcacatgtttcttataagccagaaaaatggatgctccctcaacaagctgaagatacattgactcagctgaatcttgcaattgtatgcaaatggccaattcttttgtacattccaggaaaatatttctcggaatcaatgacactaaattttttggtttgtctattgtaggttggccatgttgattctggaaaatcaactctatctggtaggttactgcacctattgggacggatttcccagaaagaaatgcacaaatatgaaaaggaggccaagttacaggtaatttcactgtggtcatcttttttgtgcttttaaagcttgatgtttctgaactcatgccaatttctgatccttttttttttgttaatcagggcaagggatcctttgcttatgcttgggctcttgatgaaagttctgaagaaagagaaaggggaataactatgacagtggctgttgcttattttgacaccaagagatatcatgttgttgtgctcgactcccctggccataaagattttgtcccaaacatgatatctggggcaacacaagctgatgctgcaattcttgttatagatgcctcgcttggttcatttgaagctggtatggatggcagcaaagggcaaacaagggagcatgcacaacttatcagaagctttggtgttgaccgggttatagttgctgtaaataagatggatgctgttgcgtactccaaagatcgatttgattttataaggcagcagctgggagtttttctccactcttgtggtttcaaagattcttatctatcttggattcccatgagtgctatggaaaatcaaaatttggtggcatccccttctgatgctcgtttaaaaaactggtatatttttttattactctagatgtgattttgactttccatgatgggcaatgaagagggatatagaaggggtggtttttttaatgtaaatttctgttagaaaccatacttttcactctgtaaatttgatatatcattcatggtgtctggggctcaaaagtaccatttgaaacagcactagtaggtgatttctacctcccaacttctttggtacagacattttctcaacttcttttctctgaaacaaacaaaaaaaatgtatttagagaggacatggtgtgcttacctgtgcaatgtatggtgatggcttttatattaaaaatggactcagcctaattcaaaccctaaaactaactgaaggagggaggactgctcaactcttgttagaggagtattctgatcataaaccccccaattcccaggactgagtatttagaagcataaggtttgcagatactttttggtaagaaagatggatactatttaaattggaaaccgtgcaattgaatagaatccatactgttacaatggtactgccctagttaatataaaaacactgatagtttggcagcattcatgatatattataaatttataataggtgtttatatactggcaatctatgcttgcatttagtgtgataacattttagcaacaagtcactttcattttggttttgattgtatgcaatttgtactgctaaaagaatgatggttgtgttcattgtgaacaggtatggtggaccttatctattagatgcaattgactctctccaacctcctactagagaattctcaaaacctctactaatgccagtatgtgatgtcatcaaatcaactacacttggacaggtgtctgcctctggtaaactggaagcgggagctcttcggaatggatcaaaggtataccaataaggcaatgttatggctgttatgaaaaatcaaatggtagatataaatttggaattctccaaattaagtgttatttaccgatatgatattaactgtatttctgctagacattaataatttttagttaaatattttattttgtgtttttactgtatgtacatagtagagaaaccgaaataaaaatgttgaaaaaggactcaaaatataattaaggaccaaaaacttgtgagtttaatttatatacactgttagtataatttttttatacatactttcaataagatttgactattttattacatcatcctatttgttaatatgatgtggggatatggtagatttttattgaatgtatgtgtaaaaatatttcatgctgaaagtgtatataaattaaactcaaaacttattaagcattattattattttataaaacaaatgtttacttgatgaactcatttgaggaagcaagggatgttatctaaaatatttattcaggaaaattgtctagcatgaaaattgagataataatgtctctcaaagggcacaaattttgattttctagctttctagcttttgtatgcatgtcatgaaactatttgtccataactgtaatttttgtttaataaaaaaattgtaggtcttggttatgccttcagctgttgtgggaacagtacgttcattggagcgtgactctaatgcttgtactgttgcaagagctggagataatgtagctgtaacgttgcaaggtgtcgatggaaatcatgtgatggcaggagatgtattatgccatcctgactttcctgttgcagttgctaagcatttggagttgaaagtgctagtgttagatggtgcaagtcccatattggtgggcacacaggtgtgtactacagatgcgaatgacgttcgttgcactttattttccagtttttttttttttttattggaggaaaaattgtattttattttttccatctctgcagttagagtttcacatacaccatgcgaaggaacctggtagagtttccagaatattatcagtacttgatcccaagacgggtaaggtgaccaaaaagtcacctcgctgtctcactgcaaagcaaagtgcagtaattgaggtgaataaacaatgcaaaactcgttgtttcaatgatcttcacttttctgttcatctatgatgcctgggattaataaaacttagaaggacttttattgtgtctgatttttaggtgattttgaatgagacagtctgtgtggtagagttctctagttgtaaagctcttggaagggtgtccctaagatcaatgggaagaacgattgctgttggagttgtgacaagaataatcgaagaacaaggttaatttatgctattcatcaaataagataaaatgatgataacaaggagcgattctcaactacataccatgcatctttgtttgccatcctagtctagattaagttgtgctcccagacaacaggcagctatacaagtctcgatgaggtttatggtttaatatgtgaattatgaattatgtaagaatggtgaagatttttgtgtatgtttttcaccatatatgtatcataagagagcgtttcttttcaaaagatctagacttatgtaccatagcaactagtctgaccgcgtcggatgcaattgcgtttattctttaatgcccaatcttcagcatagattgatctacatctgcatatctataatcaaattttgggcttggaaggaaatttcgtggtattttccttgggaaaggcatttctttttctactacagtctcttggttaagtaatgtggtgtgggacagtctagttaagtgaatccctgaatgaattggactaaatagttttttttttttctttttctttggaaggcttgcacaagtaaccttaattgagtcattaataggtatgtttggaaggaaagaaaagggttaattttttatttaagagctatataatatttataaaataaataaaagcttaaggcagtaagtttatgtggggcaaagaaaaattaaggccactatgaggaaagtgggctgtccatgcacttggggccgaaatgacacctactttcagcttgccttttcgagcaattgtgatgtttattttccatttttgtttttcatatgtatcattttatcaaattagttttgcttgtaatatggtttgatattaaatatagacatttcttaatgggatttgaactataattagttatgtggttgcactgtttcctaggagtttgagaggattagtcttgtgactttcgcatgtgtgtatacttctttttttaaaaaaaaaaaaaaaaaaaannnnnnnnnnnnnnnnnnnnnnnnnnnnnnggttgcttgacttctatcatgtacaaggaataaataacatgctggtctgcacgtgtaaccttgtttttcgagttactttgccaggatctcaatccatctatagatattagttacctcctttatacctcgaagtctaaatttgctcttgaagaaatgacagcccatattaggaccaaaacaaagccagttaagcatatatctattgtgcaattgcacccttcattccattgattatggtatgaaatgagatatcctcaaatcaggcaaaaaaatttggacattctctggtcagttctgtacaatccaagatatatacagttacgatacagacatatcactaatcaatttgtaacaaatactcaaagttattgccccctttaattaaaattcgttaactaagaggacatgaattgaactgagtatatgtgcagattccattctctacaatgttttgccttttttcattccctctcttgctcgtttttattctaagacctattatgagctttgccttagaaagaatagaaaagaaaaacttccctatatgaataaagataaagaagtaatttcagtcattgatgaaaatattttacaattaatattctaacaagtctgcaattttattatcaactattgatattacttattttatcgaataaaatgagttgctgattttaaaaatgtcatatccattaaaactaataaaataagtaatgacttcaacaaggataactctttgtagcatccctatttcatagcataccaccatatgtgaccttcccgggaagccacttaattatttgctcaaatcatataattgccagcttatttccttctattgctttcatcagtgcatgaaacgtcttagtgcaccaaaagatcatcatggtctctccatcacttatataaactccatataaagagtccatcttctcacactttaaactataaaattttatagcaaatatggtaaaatatgaaacctatctgagagtctcaggtctattgctggcctctctcttgatgtatctcttaggagtcaccgctgagggaaatttctatgaagatattgagatcacttggggtgaacatggtggtgtaaatatactaggaagcaactctctcgtgctttctcttgaccagtcctctggctctggctttcgatccaaggcagaatatctatatggaagaatagatatgcagattaagcttgtctctggtaactcagctggcacagtcactgcatattatgtgagaaatcctctgattctgttctcatgttaaatttaactgttttacatttattgccgttaatacatttcatgtgagaaattctcgtgtgcactaaaccaaccaacattaaataattatacaaatctcgcgccacaaaaatattctatatttaaaaagtgatcatgcatcaattgttaattggcttagacagaagaatccactgttttgtatgtaactttttagtttaataggtatgccctgttagtttagaagtctttacattgttaatcagttaattttttgtatgacttttaatataataattataaaagtcaacaaatttatcatgacacgtgacgatttagtttagaagtctttacattgttaatcagttagtttttttatgacttttaatataataattataaaagtcaacaaatttatcataacacatgacggtttaattataagtcggataacaatataaaaaatctttagattatctgtgtatctattattattcataacttttatgatgcttttgactgagcttatgtgacatggtgcagttatcttctgaagggccaaatcatgatgagatagattttgagttcttgggaaacctcagtggagagccctacatagtccacaccaatatctacacccaaggcatagggaatagagaacaacaattctatctttggtttgaccccacaaaacatttccacacttacactattgtatggaaccctcaacgcatcatgtaaggaacataaagctttcattgtccatcaatcctataatttaattctctaaaattttactttggatatcttttttctctatgaaattatgtttggtaaaaaaatgaaaattttcatggaaccatctatgatccatatgtaatgtataactagaccattgatcctctatgtttcaacattttggctagtttcatggtagataatatccctattagagtcttcaacaactatgaagccaggggagttccatttgctagcagccagcccatgaggctatactccagtttatggtgtgcagatcaatgggcaacaaaaggagggcttgtgaaaaccaattggtcttatgctcctttcaaagcttactataggaactttgatgctaaagcttgtgtgtggtccaaaggatcatcttcctgtccttcaaactcagcttccatggctcataataatacttggcaagctcaagatttggatgcttatggtagaagaagtctgagatgggtgcaaaaatattacatgatttatagctactgcaaagattacaagcgattccctcagggtcgacctcgtgaatgcaggctttctagattctcttgagtgtgggataagtaaatttaaaattaatttgatgatttttttcatttatgtgtatttaaaattccactcaaatacggttgaatttgagtaagctcaatttgattttacttttgcttgcttgaactgataattatatatctctgtttatttacttatttttcctattctttctaaacaatgtaaaattattaaaacgaagtgaactcttcattttaaaggtgttccaaacatacaattttatttacaaataagttcaatcccatatttacaatgaaaaatgctgatcaatactcttatgacacaagttaaagaataaaaaataaaaaaaattattattagagtgcactgttttgtaatttccaatgtaacctcaaccttattttcaataaacttttttatttattgattccttaactagtttttcaagtacacctcgttaacaaaatccttttacagtacgttgaaaaaatgataattgattttttcatcaaatcaaaccaattccattcaaaacgtgagttatattattatttatttagtgaaaacgcttctagagtaatttaacagacaactgatataaactctcgataaaaacaacaaaaaagtgaaaaaatacgtgcaccctcccaccccccctcaagagtaatataaataagaatcctcctaactagtgtagctaaggcatgattaaaaaaataaaaggaaaatatattatgtaaatcatgagaacatgaaaaaaaaatcataaacaacacaatttttcatctcccaataaaaatatttctactttaagtttcttaattattatccttaggacactcgttagcattttttctataaataaacatgagacaaatgaaactgttcaaggcagtagaaaccacacatgctgatcatgatagatataatgacttagcattagagtcaggtccaacaaattcaaagtgaataacactacttgtgcttgagaaagcttttatctgcattgtgtgttcatgcacaaacaaaaagaatttcttttgtagatattagagaggtcagaattggcttttgaggcagtatggaaacaactcatgggtcgtttgcatgatgttatgaggaaacaaatattaattagaagggggattaggtgcttctatttagcaaaccgtccataatgctacctacctttgtagttctggaagcattgaaaccaaaaagtaaagttcaagcggtcatcactataatatatatagcaaatcgatgtacagcaaatgatttgatccagagtacatcaaataatgtacaaaaaattcaataatatattacatataaattaaactactaggaccaatggcttcattccctattccaaccataaggtatattaatccataactccaataccttcaagcgacaaaaaatctttcatgtgttacagaagagtatcgactccttgtaccaggcaccacaaatttccccaaacctacaattcatgagaagcagttgggacaaaattttagagacgcaagtatgaaacaaaatggtgagaacataaaaaaagtaatatcagagaaaagaaaatcaaggctacattgttggccactatgttttttttttacagaaaaataaaaaaatataaaaaaaggataatacagaaaaagaaggataagaaatagtcgaaagcaaagcacattaggaggaaaacaaaacaaaaagtaataaaatacagcagagcttcccaacctatgtactccaaaattttgccataaaagtttgacctttatnaaagcaaagcacattaggaggaaaacaaaacaaaaagtaataaaatacagcagagcttcccaacctatgtactccaaaattttgccataaaagtttgacctttattagtccttcaaacccagttgtagaaactgctagccaaccaaggatcctaaacaaattttcctataagatggtaactgtttcacaatgcaattgcaagagcaagggtccaattgtttctgaaagcagtcactacgtatagtgcctgggtggaaaggcgagagaaaagctctaagaaaaaaacatttcacacctaaacatcctccaaaagtctgaagcggagaaaacctctaagaaaaaaacatttcacacccaaacatcctcaaaaaatctgaagtgaggattacccaacaataacaacaatagtagccttatcccactcgatgaggtttactacatggatcaccatcactaatagacttggttaaaaaccaaattcttagggatattattcaagtgagaaacacccacatgtagaaaattattgctctataaacttttgattgataaacaaaggagtttatcaaatattcaatactttaggcataaaatgcatatctgcacatattggccagaacatataaatgtttgagggaggaggaggagcaaggtagagtagttatcaatagcaaccggaggccccaaaagcaacagagcaggggcactaaattggtatagatggttgaatgggttgaaaaatcctaaattggcctcactaaaatctcagtcagcagtatcaaaaaagggattctcaatctctgctaggatttatgaagacacctatttcatcccagtgtagtccccatcatcacctcatgcttgcagtctacttaaggttttcaatcctatttcacatgacacatctctgttttaaccccacctagcctcacccagatccatcctccatttttacactatcttgctttgtttcacactcgcacaaggtttcatgttcaatgtattacactattaccagtttgtgaagtttttatgttgtatcctctacctttgatgtgtgtttgcacaatcagaaaccattcaatcgtgcaagaagtcttgctcttagcagcatttcccttttccaaataacttccacctaaaaaggaccagaatgataaacaatttttgtaaacaaatactaactttcaatttcccccctaaaaaatactttcttgtatcactttggtacattgaaagtttatcaaaaagtgtatccaaaatcacattcgttagaccttccatctcctagtatgctagatacactaatcccctagttaacttgtgatatgttattctgttatacactttccaatagtattatttacataacgggtaagactttttgcacatgcatgtatttgcacttttgaccaactgaaattattaacatagtttcaaattcaagggtagatatcagcgaaggattagtcaacttgtgtatttacccattagactattgattaacaaacttgtggtattattttagaagagataacaaaatcattatacatgggtacaagcaatcttcatggaaacaaacaggcaaaaaataacaattgcaatccacctccaaactttccccaaccccaactacccaaattcagatatatcttggacttggccatatgcaattgaacaattgaagaaaaaaaatggaaaaaattaaattcgtgaagaaaggatttattttagtaggccctagaagtccttgcatcacccatccaccatgtatatgcttgcaacataaagtagcaattttacctctactccaataaactatctcatacttacaaagacaaatcttccagatccacaagcacatgaactctcgcgacacaaaggcaacataaagaaataatcactacatacattaacccacagacagaggatgggtgctgcacacaacacaaccttaatcaaccacaacattatacaatcaacattttcttcaccaccttccatccattaagtagcaaagataaataatactcatcaatctatgcatatctcttacatcactttaccaatcaaagaaagaccccaggcataaactagatcaaatccttggacaaataactgtatgctctagcaccaagaataactacataaaaataccccagaggagaactactagcatattgaaaatgaaatggagacccacatcagaaatgctggtaataaacccaaagtggtagtgcttactcagagacataacaagttcagaaccaaagaagaggctttaaaaggaaaaaaaaaaacaaaaaagacaagtactttaagcatcaaaactaaaaccctatgagaatagaaaatgagggagaaggaggaaggggataaaagttacctttagagcagaaagcatgtgctgaggatgtgggtatgaaaaatgccatgggactgggaagagtgagtgggtattcgctgaagaaagctgagcgaagaagagaatgcaggaagctgagaccttatattacagaagtgagtgagaggctcttttttctttttccgaattccgaggtaatgtatttggtttgaaaatgaaaagccccaccactggttgtattgtgttgtgttgtatgctgtgcacccattgttttttcttgggtgctgagaccaatcaatggtttaagaacatgaaactttgttcaaacaaaaaaaaaaagaatgaaaataaaatataagaagagggtgaaaaaaagagagtaaagtgccaattttttgcatggaattttcatccactgtagttttagtctttaaatttagggaaattaaaaaaaaatctctcaaattacatttcatttaatctaagtattaaatttaataatttgtttgtcattttattctataaacatgtattaatattattatttaagtgcatgttccaattgtgtttcattaatataatagaattaattgatgaaagatgaaaatgtcgataacgagttttgttgagccgattgtgaaatgaattaacatacaatttgtgggacccagaggttaaaaatatgcgatttaaataacggaaaatcaattattttaaaattatatttaaaatgattagaaaaatggaaacaaaaccatatataatttgatcattttgagccaatacaaaatcttttgaataagggacgacactatgtatgagattataattttggatatgaaagataattctaaacaaaaataatcaattttctttggttattaaacctactcacataagggtataatgatatttttgtgtctctatttaattttctcatacttatctagttcttttttatacaaaagttatgtcaatctcatctttaccaaagaactttcaaatattattttattccaattctcacctatttctcttaaatcaaacaacaacaaaagcataaactcgatctactctaacataagtcacttcaccaccaaaaaaaatgagtacttgtttccggacaaaacattttacttcatttctcttttttaaaattatctcttttctattttcatttattctatttctctcttctaaataaaaaatatacataattttaaattaaagtaataaacatatcataattgcaggatttttttcataccttgttaattctagatacttaaatgacaacaagtcacaatttcatgaactaaactcatcattcactaaaaaaaaaacaatacaaatcgggggccagttggtaataggcacattaatctctggtgtgtccagagaccaaacaagttttaactacagaaaaaatattttgataaaaaaacgactatggaaaaaaaatttgcttttcattttgagatatatttttaaaatgtatatgcccaaaaaaaaaacacagagatgattatatatgagtgtgagtgtgaaatgcacatataaaatgatcgtaaaaaaaaaaaggattaactacaataaaatataaaaaatgtaaaataatttgtatgtaagtatgtacatcaaaattaatccattatgtacaaaaaattaataatccatttattaaattacagtnnnnnnnnnntctttttccgaattccgaggtaatgtatttggtttgaaaatgaaaagccccaccactggttgtattgtgttgtgttgtatgctgtgcacccattgttttttcttgggtgctgagaccaatcaatggtttaagaacatgaaactttgttcaaacaaaaaaaaaaagaatgaaaataaaatataagaagagggtgaaaaaaagagagtaaagtgccaattttttgcatggaattttcatccactgtagttttagtctttaaatttagggaaattaaaaaaaaatctctcaaattacatttcatttaatctaagtattaaatttaataatttgtttgtcattttattctataaacatgtattaatattattatttaagtgcatgttccaattgtgtttcattaatataatagaattaattgatgaaagatgaaaatgtcgataacgagttttgttgagccgattgtgaaatgaattaacatacaatttgtgggacccagaggttaaaaatatgcgatttaaataacggaaaatcaattattttaaaattatatttaaaatgattagaaaaatggaaacaaaaccatatataatttgatcattttgagccaatacaaaatcttttgaataagggacgacactatgtatgagattataattttggatatgaaagataattctaaacaaaaataatcaattttctttggttattaaacctactcacataagggtataatgatatttttgtgtctctatttaattttctcatacttatctagttcttttttatacaaaagttatgtcaatctcatctttaccaaagaactttcaaatattattttattccaattctcacctatttctcttaaatcaaacaacaacaaaagcataaactcgatctactctaacataagtcacttcaccaccaaaaaaaatgagtacttgtttccggacaaaacattttacttcatttctcttttttaaaattatctcttttctattttcatttattctatttctctcttctaaataaaaaatatacataattttaaattaaagtaataaacatatcataattgcaggatttttttcataccttgttaattctagatacttaaatgacaacaagtcacaatttcatgaactaaactcatcattcactaaaaaaaaaacaatacaaatcgggggccagttggtaataggcacattaatctctggtgtgtccagagaccaaacaagttttaactacagaaaaaatattttgataaaaaaacgactatggaaaaaaaatttgcttttcattttgagatatatttttaaaatgtatatgcccaaaaaaaaaacacagagatgattatatatgagtgtgagtgtgaaatgcacatataaaatgatcgtaaaaaaaaaaaggattaactacaataaaatataaaaaatgtaaaataatttgtatgtaagtatgtacatcaaaattaatccattatgtacaaaaaattaataatccatttattaaattacagtacttaattttagattgttgcattcttgcctctaaggacatatttttgtattcctccccgtccagggttatgtggtgagcgatcttaactccaaaaaaagtaatgatagattaagaaaactatctaaaatcatttttaaacaaatgacaacataattggatgcaatatattgtctaaaagaagttgagttacaggattcaagaaccaaaatgaattagagtaataagtaataagccctagaacaactttacctccttaaatgaaatccgtgccacttaactcgaattattcaaaatgcaatataatctcaaatactgaaggtttatggactattttttatatatagaatatcctaatacatatatagattgtactcctatttttatacccttaagaattattaaacgcaaccttgatatttttaagagaaaaaaagcttagcaaaataaagcaaactagttattaatcataatcacccaaaaaaaaaggctccatttaaaagtaaagtgtactctacaactaagtataaaacttgatcaaacagtccccaaaagaacatgatctcactttagggtaatacatggcccagtcccattagttctgtcttgcggatcacgatcctcagttactagaaaatcagacatctctttccattggacctaatgacatatagatacggctaaattgggattgtataaatttaaatcttatcatccttcattcttccaatatgtactaccacaaacatgaaatgatcatcaacaaagacacatgtattccaatcaatcaattacaatacaaaatataaaagtaaacccgtgtctgtggccgcaaagtaaaaaaaaaataataataatggaaaaactgtccgcaaagctagtgtcaagagtcacccttgagcaaggacagaccacatgtatattaccccagagcttaacaccttgtttttcctttttcttcattttggggtaacacttccatcaattccactatccgctacacccctttttcttatcctctttgagcagtgcagtgcaaaaccaaatatgggaaacaaacaaagaatgaatagcacaagatgagtagaacctagtaaacttcaccagccatactgctagaggggattctttgtcgtttctccacatatgcagaaggaaaccatcctgctttgccattgcattcgccttctgaccatcctgatgggctcacctgggtaagcatttggaactttggtaaacatggaggctcaaaaagattgagagattaaaccaaattaatcaagcaaatttcacgatgacatgacagtgatagaagcaacaattgatgactttatacaaacctttcgcacaacaacaaaatcgcccttagaaaagctcagttccttttctgattcagcactgaagggatgcgttgcctgcaagagacacacccaagatcagttgatgaagaaataatagtattagtaatagtgataaatgataatcatcacaataatcaactgaaagattaggtttaggaatttagcatacttcagccaagaagtacattgttttctctgtgccattctcagaaatacctactggaggggcagattctttcttctgtctatctgagaccatctgagaagaagttccaatgagatgaaaattattgaattacgaaaatgaacacaattcatagaaacaacaccacactcgaagaaaaataagcttaaaatttcaggacagttggttctcacctcagcttcaatttcaccaagaatagctgcaactcttaaatgaaaagtcttttctccttcaacctataaaattataagcacagactataaataaaattctactccctccattccaaaactattgatgtttaaggttagggttaaataagagtaaaatattaatttatttagtctataatacccttaattaatacaggatataaatgtggttcactgtttgttgaagtggtcattaaataggctgtaagtacaatattcctcttaaagatcaaatataattatttaaaatatgagtacattcaatagttttggaataaaaagaaaagactaaacaccaatagttttgggatggaaagagaaaaacaattacaatttggcataaaagtacataaaaaaaatcaagtgttatcataccatggcaacaagcctttgaaaagtaagtctctgctgttgtgcttcaacagcggccaatgccgctgcagcttctttacctagaactgccatgtttgccttcagctcctgcatccttgcttctgcagcatgcagtttggcaacctgttcagcagttggagcttcccgaacccgtgcttgtcttctagcaatctcctctccctgattgaattttaaaaccattccaagttatatgattaagaagaaacaagtatgaacaccaaactctgaagtgaatgtaaatatgtaatagataagaaccaaggattcaccaaaaataaaaagataagaaccatgttataaaatggtagtcttcaattcatcaggaaaaaaaaatgaaagagaaatgacaatctgtgacagcatggaaatcaaagcaaaatggaaaaggcaaagaaaagtatctctcagctaccaaagttgtgagcccaagcaaatggctgaaagattcccaaaatgcagtccaccacaacaacctctcataaaagctatttctaacacaactacatccactcaacaatcaacataacaacctcctctcatatttgaatcctatagtgtccactctttccttcttgaataaactcccatatttttggtccatggcctaattgacccagcacctgcccatatcttctttgggctcaacttctcaagctctatcaacattgttatcatgtaacagctatctggagtctttctttatcaataatttcaacatatattgtttctgcctttctggtttatcatgcatcaaacaaaacatgaatcataaacttcactattcattccattccatatatgagaatgagatacagagttcgaatcacaattaagttaaaggttgatccaagagcagagctactaatccattctaaactttgacttacttgtgcctctgcttcttgtctcatccgactatatcgttgagcaagatggcgagcatcctccaaaggaacaccattgatcatttgcctcaaaggatccaatacctggaaattgaaaccattggattcatgtttctttccttatacatttaaagataatgcaaataataaattacattgacctcccttgaggattccaaatgtcatatagacttcctctgtagtatcaaaacatacaaatgttccttagattttcaccttttctgaagggtttcaagagtggcacatgtttgatcaaaattaaaaattgcgctatgtatggcttgaaagtaggaggtcaatgcagtatttaataaccttaagagatatcagtataatttactttaacatataaaaaaaagtataagcaaattggctgtattctatcttccaaactatctcctatgttgaatgatcagtttgatactcataacctagagatccacatcagagtttttttaaacattagtgtcttgttcatctgaactaaaactaaatttcacactgaaaaggtcatgcaaagtaatattgaaatggtgacctggtcccccatgcatatcatacacaaacagtagcagaatatggctatttatgaattagaatatctaaatccagcctcatttatggtcaagaaacactatatactgaaaaatatagttaaaatagcaacatggagattttaaactcatctgtaggtcaatgaaaagattctattactgtttcatattttaagcaccaattctttatcaacttttttaaacaactacttactcagctaatcattcacttgacaattagaacacaaaatttggtcattttaggacttcatcttactttattttccagtagactcttcaatatgattaatgtacaatagaaaaaacatgacagtgattgcttacaaagaatgccctagaaattgtagtttagtacagtaaatatcaattgacaatattttaaaaaaatcatttgtatctggaaaatatagttatatgaaattacaacttaaaacttttcaagactggagttaaaaaactgacttaattgggaaaaagcacagagagtgatatgtaataccagtgcacagctaggaatactcatataaattaagatgtggctaagagataaaactaatataatcttgttttgaacttgtacacctgaacaacatatgaaaagtccacctgtgtagataaaagccgatttaattcttcgtgctccttttccacatgcttgcgggcatcaccatatactgatgcagccttagctaatatgttgtcactgttgttctctgctccatatttacagcaatcctcagaaagtttcgttcctgtctaccatgggtattgtttatgaggatttaatcaaatcataagtcgataaacaaaacttacaggtgcttctcattcctgaacacatgctatcaagacttgtcaaagtaaactgaatttgcaggaaaaaaagaaacaaaagctaattttcacctgtttcaatatgcttataacctatagctgtaaatgtttctgctgctttaacaatttctttctggaagtcctggatcagaggatagttttacgcacatcaatatacataaccaccacgaaaagacaaatcatttaagataatttttttttatgaatgttgtatgacaactactacaactgtggttcagaaaggctgcacagccatgtttaagttaactccacccccaggttaatttatacattccccatctctctctacatcacttaaggtaaagctgattaatagaccttccataactaacatgtattccaagagatataaggttaaatgtaggatatcaatgtttggggtaatgacagcagctacaagaaaatcattcaggataactacccccaacccttcttttccaaaacctctttacaaactgccaaatccaagcttgacataaaaaatggatttaaaagttgttgcaaaaaaaggtttaaaaaaaatgtgagtccataaatctggcaagcacagtaatgtcactcaccatgcatgaacattgaatagacttccctaataagcatatataacattctattttgagttaatatgaaataggaaattccttgctgctcaagcatagcaaagctaacaatcaatctaaacacaaagagaaattgcataccttcccagcacgtgtggccctgtacagcttttccagctggtggtgtctctgcatttcgacctcatcgatgaccacaacatctgaactctcataaccactactgctgaactgctttattactgcctgaatcacaagtacactgacaaagattacaaactagcaattggaaaacattacttttccctgttactataaaagtgtgaatctaaactaataaaacactatggttggttgatccgcaagaatgtgccaaacacaaccagggaaataataattcaacatcttgcttaagaaaatgagcgtctccacttaaaaaaagccataacattagtcgaactaccccattttcaattgcatttcagaacaacgaaagaagaactaaaacgtcaaaagttatcgccaaatactgggaatttggggtacccagatgcgaatttgagaagagaaacacggtacttgaagtgacaacacagaaaaagacaaccttgaagggaagtgagagcaaacctgttgctgtttggcaacttgctccctgagcttgctggcttgtttcctcagagcgtccatggcagattctttcagctctctattcttaattctcagaatataaaagacagacaacaaagtatgaaatcagatccaacgaatgttatctgagaaccccaggccccagctcagctaaacgttgtcaacttgaattatgtcactcttttcccctcttttttcttcggtaaatcccaaaaccactttttacaataatttatagcatataaaatggccatttgaaattaagaagacgttgctctaaattttacattattaatagttagttacgcgttttagaagattattttcattaaaatggtttccgcttctgaaaggtgttgttcattaaaaaataaccaattaaattcagtaaaataaataaacacaatcaaaagaaaacctatgaaaatccaaaagcagatcccagaaaaggtaatttgtgattttaattaatgattaccataaaaacaaatttgaaagtttgaaacttttctcggtgggaagcttgaacatgacaatgatatgacacgcttttcacaagcctaataattctctttgctgtgtcactgcattgcaacaatatatattcagagcacaggagaaacattcgtacatacatagctactagcagttcactttcagtctctgtagatttggtttgtgttcattttccccactgaatagtgaggggtagcatcgcaacccaccatcttatttcactctccacatcatgccttcaggtgctaggaagagaaaagctgccaggaaaaagaaggcaaaggaacacaacatcaacccatcaaccaacaacccccaaggtaccatttttcactcaaatgcatgtgcatctggcaattaatcatagatgggtccttttcagttgtgcattatatcttttttttggtctttttgttctattagggtagatggagttctgttaattattcttgttttgttttactttgatttggaatatgcagcagtgattcattgtggttggggtagtcgagttgggtacactggtatttattaatttggttgttttaattgataatagcttgattgattgtgtaaataataggaaatgatggtttgaagtcacgagatgagaaaggaagtgatcgtggtgagggtaattctcctgcatttcatgaacatggtgaccatcgtaatccattcaatgatggaagtgaagatctggaagagagaggaccatcagctactcaaccgtgtgcttctgatgtcgagaccctggaagaagtccctagtgatacttcaaaggaatcgtgttatgagaatgggaatggtggcgatacttcaaagggtgaatccctcgctgagaagaactcagaggatgggaattgtaattcagttgaagaggcaattgcaagtcatgagttggttaagtccattgattcttccccttttaaaatgactttgattactgaaatggcaccagttgaggagactgttgattcagctgctaactcttctgttaatttagttactgacatggcttctgtgtctgaggtggaaaagagtgatactggaagtgtgttactagagaagtcagtagtccatccggtagaagtgaccaacgtcgcaatgaagataaacgaggataacacatattccttaaccaatgagaatgtgacaatgtcaagtgcgggggagcctaagccaaaggaatgtgatagtaaaatgttaacttcactgtctactagtcctttaactaaatttaccaatggtgcagaacatattaaggattgtaagactgcaaaacgttctgaaaatcaggttttacattttctcacatatacactacaagtttttcatctcacaattatgatttgtaaattttttgtgaaaaactaattttaaatatatttttctttgctgaattaatttgcagcctcatgtagcattggctccaaatttggtgcaaaagaccccctggttgagttgctgtggattgtttgaagttttgtcaagttcaaatagataatttcaggtttttcctttgaagttactttaccttgtaaaatcatgtttgtgtgggttctctttcaacttaaaaggttgtgtttacataaatttgctaccctcatgtatgcttgcttatggttgtttttagctttagttttgcaatttttctaattggtttggtaatttgcgctttgtgacttttaaactattagagggaagtttggtggtgttttctttcactttttattgtttgtttgtctttggtgaatgcaggtgtgtcatgggtctttggaccaatttgtagatactagctttaatggtttcagtacaaatgaggatgctaaattattgtgactatcaatccatgctattatatttggtcatttggtgcatttgggaagagcataatgctcatattttttacgagatatgcttggctgagcagctattttggaatgtgattaagcaattagcatcaatttggttttaaacacatggtcttttaaggggatttctgtaacatacacggggttaggtaactttgctccattagtgatttgtatttttctgttattcattttccaaattctttgttatggaggatctcttattctccaattgtcttgtaattttattttcttcatctgattttcttcttttattattgctgacaccgtcttgttcatgagattcatgagcacaacgggagggtgtgattcttctatacctgtgtgtgtgcatatcattctgaaggtcatactctgttattattctagttcaacttagtctgagcgttatcaaatattcatgccttttggatatggatttaaataattaagatgtacttcttagttcttcatttggtatcaattggttttttaagttatattattcgttctaataatgctcattttggggattattgttgtagtatattgtgtatcagtatacaatcatacattttaaacttgcaaattacgttatgtttgacaacatcttccctctgtttttcttgcagaaatacaagatacaagcatcaagcgtgagtatctcaactgatgggtcaaacttgtgaagatttagaagaattttgtgatattttgatttagattctctcctttaagcttttcaaaaatatagcaggcaaccaggccaaagtgtataatccatacaacttttgtttacattacagtggggtttgtttgtagttattgtgctagcaacaattacagtcttttaaactgatttgttaattctgcgacatggaatttgtcacaatactgtttatttcgccctttctaattaatgtagagcagcagtgagacctagaaacttccttaagaaaattcactttgatctttttcatctaatgcacgattctcatgcataaagcacttagaacagtgtttgcagtgcagcgcactttgggtgcaactttaaaagtttatctttaatcagattaactaccagaaccataacgaagcaggactcttcgtgttctaacttatggtgcaatcatacctcggatgtgtccctgttcaaatgtccttagttagctatcatcttgagaacttcattgtagactgatgaaactttgttcttgccctggtcatggaaatgtccttctttgatatttggtttttcttgtcaaggttacggttcaaagattactctttcatgtttttttgctctagaccatcctgtggataccaactgaagatttcgtaattattgtgtgtgaattgcttttctaggaaatatatcctttaaaaagatctaaaaacctgtttgactttgcatacatggtctttgtgtaaaaatgtttgggttttattgtaccccatgttcgttaaagacttataaatgcttatcaaggttatgcagcctgatgtccctatcatgatcaatgctcacagcttactcctaagaaagttggaggaaaagagaatagaaaaataaagatagtgttctcctttattgctcttgtaaatggcatattcttgattcatacaaatccaaattccaatcattcaaatcaaaccacaatgctaattctcctttaacttgtatgaattaaaagtcttgattggaccgacagaagagaaaagaaaaagcaagagggagagaaaaacacaagcacaccaatacaatccttcttggccaacaaaaaaagaaattccttcaaccttcaagtttatcttctatacgcagcagcactgtgaatagcaactatgtagaaaagctgtgtagctgaaagtataatgataaaagcctccattgttttctgtaaaattggacatttcagaggcctgacacttgaaaatatactacaagaaagttattaagaaagtaaatgaatcttcctgtcttaccaggcgtgcatttctgatacgaagctcaatctctttccaggcaaagcttcattaatttaattatagttagataattaaaataataccacaaaattatttttttggaggggataaatagaaaatagaaatcatagagaaaagattaccccatggccaggagtgtaagagtccaagccattgtagcaactgaagctgcagatggcaagctctcagcagtccatgactggatatgattgattcctgaaattgctgatgcagcaccaaccactccagcaagcaaagcaaatgtgacaaagaatccagtggatgcattgcccattgggaagaacaagggtgaaaagtgtgctggtagttttaattctggacctgcatagtgcatagtttctcaacataagcaagctgaagaaacacaaagaaaatgattggttacatgagactatgagaggacacataggtacatttggacattttaaattttcatacctataataaaaccatgatctattgctctgttcatggcccatccactaatgcccaaaactatggcatacatgcagaagttcagccccaaaagaagagtggctataggcttcatttgctcattagccatctgtgttgctgtttgttttttggataaggaaaaagctgttttgaactagaaaagtactaggggatttcaggaacctaaaaagcagtgaaggaaagtctataaatccaaggaccaggagctgcatatctttggtacaaatgagagttcttatatatatgagaaatggataaaactgaaggttgggttcttttcttgacaaggctgctagttagctaaaaagcttcatgcaggcctgtaaagatgatgcttcacaatcatacttagacattaaaatttaaaatatgtatgattcttacttgtctcttatttttaaggtttgtttaactgtaaataccttcccaacaggcaacttcttaggagttgtcaattgtttgttctctgaggcaagtcatattctttgccactcctgaactcttctcattcacaacactctggcccaatccctattaaaaaaaacccttacactgtttctaacaaatttaattatatcgcgcaagtatttattatttagttttatatactaaaaaactttttatttttattaaaacagttgttactatcccaaaaaagtcagatatagaaaaatatgaaaattctaagattagttaaaaaaaatatattttgttatttgatatacaatgagacaattacataaatgtcttatattttataattttgttagtaataaaataaattatactatcagcgtttaacacacatttttgtttacaataagtgataaagaaaaatactcatctctgatatattaatatcaatatgattttttttccaaatatattgtaccccttcctttattatcttaaactttatacataatgcttaaatctataaatttatttaaatgttaaattgactaaatctgactctgaaatgtatgtgaacaaaatccaagttaaaaaagaaaagaaaaaataaactttacttgagttttatagtaactaccttgaatactaatggtgattcttaattgattgacgtgtaaaagtgtttacactggtcacgtacgacaattaaactcaaaagaaaaatgaaaactctaacaacccttaacttctcttaattctgtaatttttattttatctttaatgtgcaaaaaatcataatgccgatcgacagtattacatgactatgagggtatattccattcttctttataaggtcacaaaaaaaaaatgacgttcatcaatatttcttataagttggttaatactataattcgaaccatgcctgttgaaattaatttactttaagaacaaatatattttacagttttcataaagcaataaaaagggattatttctataaaaaaaggttaaatgctcaatcacaaaatcaaactcaaatatctatataaattaattgatataaaattattctaacttaatttgagatctcaagttcaatcgtgagtacgtaactacatcaaataatccgaggtagagtttatcgctcatagtaatcccacaagacttgaacaaaattatctccgtgaaaaatacttgtaattcatataaaagtatctcatcgcatgagattgctttaatttaaccaaatgtctcattcaaattttgagtnnnnnnnnnntatacaatgagacaattacataaatgtcttatattttataattttgttagtaataaaataaattatactatcagcgtttaacacacatttttgtttacaataagtgataaagaaaaatactcatctctgatatattaatatcaatatgattttttttccaaatatattgtaccccttcctttattatcttaaactttatacataatgcttaaatctataaatttatttaaatgttaaattgactaaatctgactctgaaatgtatgtgaacaaaatccaagttaaaaaagaaaagaaaaaataaactttacttgagttttatagtaactaccttgaatactaatggtgattcttaattgattgacgtgtaaaagtgtttacactggtcacgtacgacaattaaactcaaaagaaaaatgaaaactctaacaacccttaacttctcttaattctgtaatttttattttatctttaatgtgcaaaaaatcataatgccgatcgacagtattacatgactatgagggtatattccattcttctttataaggtcacaaaaaaaaaatgacgttcatcaatatttcttataagttggttaatactataattcgaaccatgcctgttgaaattaatttactttaagaacaaatatattttacagttttcataaagcaataaaaagggattatttctataaaaaaaggttaaatgctcaatcacaaaatcaaactcaaatatctatataaattaattgatataaaattattctaacttaatttgagatctcaagttcaatcgtgagtacgtaactacatcaaataatccgaggtagagtttatcgctcatagtaatcccacaagacttgaacaaaattatctccgtgaaaaatacttgtaattcatataaaagtatctcatcgcatgagattgctttaatttaaccaaatgtctcattcaaattttgagtanaattctacataaataaatttttctgcattatatataaccacttttatactaaaaaaaatactttcaataaatttacttgaggcgcaagacttacattttctacaaagctaagtgctaaccaccaaaaattaattcggtaaagtaacaaaaggaattagctattttaaagcaaaaatatttttttaataaacgttataagaggggggaaataacatattaaaataataaaataaaataaacttctcaaataaactaaaataatcttatatgccacaactttttaaaaaacaaaaagttaatagagcttaacattcttaccttaaaatagttttacatttaaaaaaagtctcataggttagaagtttttcaaattgggccgaatgtatcaatagacatttattaaatggaggagttggccaagctttccataaaactccaaaagacaacaacctaagccaagagaaactactatttgggattttttttattaattattatttgaaagttcgctttaaattattattcaaaatacaacaagcataacatctattataacttctgaacaaaaagtcataatcaatgttacttcttcaacttttttaattgaattcgtaaaatattttacgattttaattaattttttttataaatttactactttaaaatcatagaattaatttttttaattttttataaaattcataaattaatttacaacttctattttttaaaatatttttttaaaattgtaaaaaaaaaattaattaattaattaataaacacatatatttttatttttttagttttattttaatatttttatatattttttatatgatttaatttaatatatttatttttttaatattgttcattttatattttctatatttttgatatggttttatttaatattttcctatttttggtatattattttatttaatatattttttatgtttaattttatatctatattatctaattttttgtataactttttatttaatatattatatatattttatattttttttactaatgataagaattattatttgttttataaattaaaaataatataaaagacttaaatttaaataaaaatatcaaaatattttgttaataatattaacttataatttatcgaataatattaaaaaatttaattaatttttacaattatcattaagtaaattaatagtttcgtacaataatattaattaattttattttataaattattttaatattaataacataaaataatttaataataaaaatagttgttaaaataaaaaaaatataatacattaatataaaataaccaatacaaattaaacaaatacataaaaagtataaacaatattaatagtcaatttgcttatatgaaaaaattactataattaagttctttagttctacataataaacatttcatttaaatttaaatcttttatattattttttaatttacaaaataaataataatccttaatattagtaaaaaaataaaaaatattaaatatagaaaatatattaaataaaataatatacaaaaaatatttaaaatattaaataaaaacatataaaaacatatacaaaatattaaataaaacaaaaaaagtaaaaatacttttatttgttaaataattaatttaaaaaattatttacaaatttttaaaaaattataaaaaaaaataacagctttaaagtcataaaaaaattaatcatatgattttaaattcataaattgaaaaaaaaataaaattagaaatagtaacgtcgattacgactttaaaaagtaataataaatattatgacttattcacttttaagtaataattcaaaacaaatatccaaaagtaattaacaaaaataatcgacccggttgtttcgcctctaagccaacacctaaactgaattgcaaacatccgtagaggcaactcaaaatttgaaaccttgaaagacatgcacttaatttgaaagaaatatatctattacactcgtataatagattttgttattagaaagaaatgaactaatgagtgaatgatataatttattcatcagcactgaatcccattcctctttttcttcgttaagttttttggttcgggataaaatgctatgaaaccattttttttttttttcattcagaagaaacagtcaccccaccaaaatctacagtgtagtacaaaggcatgtttccatgcatgcaaaaattaacactaccaatcattatggctgataaacctcaggaagctgaagaccaacactagaagcagattttccaagagtcctttttacttcatctgacctatccacggcaatattgtatgaaaaaagtaaatcctgaaaaattgtcaacaacgatgcatgatcaaaaagccagatggacaaaacgtagtttttcttgaaaatatatttattcacaggcataaaatgagtaaaaataattatatcaatgataggacacaatctgcagaggatttctcccggctcggccacaccttggtgatgctgatcactagtcaaaaaccacatcctcttctgtgctttttaatttaactatatacataccttaactaaagctgttgagtgttgacaccttgtttttaactaaccgagtttgtgtaaatctcatttgaccaataataactgttcaatcaaacttcttacccacaggcacaaacaaatgactatttgaattttgaaggaaaaatgcatcagagagcaataccttgtgatggtgtacactgttaagaagaaaagtataatcacgagcaagctttattttctgttggatagccacattgtcagacaaatttcggttgttacggaactctgaggttacaaattctataaaatgtttcttgttctcttccttcccaatatgtttcttgaccgccttgagaagaagacgataaatgtgagctgtttggaaggcgtcggatctcatttgtttctatcaatatccactacctactttcctgcataggatgacaagttttaaatataaatatttataggaatcttgttagcagaaaaaattaaaattagaaacctaaatgatgagagggagaaggtatgaaagaaagaaatgctactatagagaataaagaaagattacaacagaaaaaggagtgcaaaatttcatcctaagaaggtgcaaagaaacaaagaaaagataaagaaagttgtatagaacgaggatcttcaattcctgtgtaaactaggatcaatcttgggtttggtagagttcctaattcaatattacactacagcaattttcttcttagaaaatcccagaagacatgcagagaagaagtttatcctatgtttatgtataacaattccattacaacatgcacttaacacaatttgttgcatctcagaaaatattttacaaatgatgcaactagttcaaaacaacttgacttattgtactaaatggaagccatgataattcaaatttgaagtcaattccatcaacaactgaacagtgggaaaatacttataatgatgccatgatcactcagcaagaaatcatcaactcttggcttgaatatgcagctacagctagcatatttttcagattccttgctctgtgaacactgtcacaatgcatatgcaagatgttgcaacaagaggcaactaaattcattaaacaaaaatccacgtgtgtatttgaatggtacatttgaaaatcctaggaaactcaattgcttccattgaatttccttcatttgtaaaatttgttagtctgaatgagtaatcaaattccctccattcataaaattcaatattaggataaagtaattaaatcccctcaataacaatgataattttgatatgttatgtataacttcatatggaatagacaacatagaacttagcctacgagaaactctagcaatatactgtgtcatatgatcatatatgtggtctaataaacaactgagaacgaaagcaaggggggtacgtcaaaagaatttgttgtgaacattttcattaataatattgatcatatatggggtctgataaacaactgagaacgaaagcaaggaggctgaaatcacaatttgtttgtggctccccatgtttcagaacacacatcaaacagtttgtgagcaaaatcaaatatactgcaaaagtaaacgcaacaaaatgtgaagcataatggaatgggcaaacaaagtaccatacaaggaaaaaataaataaaagtcagatccacaaacacaagtgggaagttagcaaaataaacagagagcaaataaaaatgaggaataacacagcataaaatcatattaagaaacaactaatatccatattttgcaactatgaaaatgcagaaagaaagttcattaacatttgtagaagaagtgattgaagtactgcaagcaaaacaacgaaaatcaaatcagcgttgcttacttcctttcttactcgctgtggacgatgctgaaatcaaagcgttgctagttgcaaagaaaggtgtctctgcctctagttatctaaacgaacaaaaacttgtttaaaatgaaatgaagaaaaaaaaatgattatacgaatttataactttcttcgaataattaattttagcttttatatggaaacaaataaacttaaattttttggaattcataatttttctcttttcatttaatttttttcactcctaattaattaatgtatgctagtctttttttatccaattaaagagagataatttatttatcttttaaatatatatcatttattgtaaagtaataaagaatatttgggtcaaaaataattaatggataagataacttgaaaatttttttataaaaaaataaataaactaaaaaagaatcttatatttaaggatagaggaagtatttttaatgatttatatttataaaatttatttataatatctcacatttaaacgatttgaatgaggtgtttctttatgtgtgaaaatatataattctaaataaagattatctttatggctcatgagatatttatagaactggtaaattttttctcttgattaatttgcagaaattattaataagtatgtattgaaattatgaagtgtaaatatatgtttaaaactgtaactgtaagtagaattaaaaatgaaaacaactcaataaaagggcatttatacgcacaaatgaaattatggattcacaaaatttatttataatattcattattttctaaaaaaaagtttgttaaatggaccaattaaaagtgtaacaagtccaataccggttnnnnnnnnnncaataccggttatatgtctaattaaaatgagttataaataattaagtaaatgaaattgatatgtgaaatctcaccttatatttatgtttagcaatcttctttcttaaatttcaaaactcatatttatgtatctttttatcacttgtatattgttgaagtttctcgttcatatctagtgtgagactttacctcacatttatatatcaacatttatgcatgaacttatctgtcacgaagatttttgatataaaagatcctcatatcatgaatctacgattaattcatcttattagtctaaattaattctcacgtcgaatcataaactctaatatcaactattaaaaaatcaaaactcattattattcaaaattttaaagttgaaaaatataaatcgtatcctcacttataattttcaaccttttcattattatttaatataaaattcatcccacaattatactctaacatcaagtttcttcaattctttctatttatatcattttattgtttgtcatgccttgtagatggatgtctaccatttttccggtgtacaatagctgcagaaagaattaaacctaaattctattgggcaaacgcttgattaatttaaaaaaataggaactgagtattggccaccatatacaggttataatgtcctataatttaagaccttctactgtttttggatcacctataatatcactttaaattaattatttttttttttatcaatttaccaattttcttgtcttactaaccatccttctaagtgcgccaaatgtaaaatggataaagtgataaaagtatgcctcgacttttgaagacaatgcggatcacgtcagaacgggcaccttcatgacaccaccacctcaatgcccaattgaaggagcaaataactcttcaaaaaataatcccgcaagtagataaatacaagatataaagagatctctttatatttataaaagatgtttcacgatcttatcaacaaagacgaagcaaatgaagatagacttgtgattaaaatttgtcagtattatattattgatttgtttcataatttggtggctctcaatgtgcataaaaatgccacgttgcgagaccaaagaagatagagcttgacatttgctgaggaaacgtcactgagcaaagcattaagaagtggtgaaaaacttatttataatgaaaacaagtatagaaactaaagaagaaagattatattcattttatataagttagtaaaagacaatttttatttatttaataaaagacaagttagtaacaaaataaaacttaattctataattcaaatattagaattaaaattaactaaaatgatttttcaagttgtctcgtcccatttacaacaaaggactcaaggtatccctatctgtcaatcgcattaagaggtcataattgctcaaaagtttatcgatttcacattaaaacttgaagagtgacgtcaattaaataaaagtaacaacttatagttaattatgagaaaattaaaaatactaagtagccttcagccgttaaaataaatagtgggtagaaatagaatcagaggtaaaaattgcatttgtctgtatcatactatagtagcgatagagagaggagaaagaagaaatgtcaacaatggcaatgcgtgtgtcttcttccacttcaacttccactgcattctctctcttcaatttcatgcatccgtgtaccttctctctctcgctcttcgccgccatcgctctcctacaccttcaatcctcttaggtactctccattcattctcatctcactctatttcactctttctctttctctcactttgcttttccgctttacgaaggtccttcatcggtcacgacggaatcagaagcagaagcgcagggtttcgtctgcattgctacgctcctgctcctctcactcctcccaatttgcaatggatctctaccatttcttcagtgtctgttcacttgcttttctctatttcatccttttactttttcaattccgctatttatttatatattatatattctgaacatttgatttcatggagttatagactacgcacttttaatattgtatattaattattcggttattttattccactgtctgacgagtggaagaaacatatattattgaataattatttatttctgatcttcgattaatttgccaaaaaaacagaaatgtttgttcatgcatgtaacttaatcttataatgaaattctgcgatgatggatgttcggaaatcggaacattgtttgtagggttttgatactggcgagaggccccgcggtgccgaaatcgtatattgttccgttgtttgctttgcaagcatctgcaggtgtcgtttcctggatcaagtatgtcgttcattcattctgatgttttgttttcttgttcagtttatatgctaaaactgaattgtttatttaacaattcttatttgttcaacaatattttgtagagtattattattcttaatttttacaccaattggatgtacagaggtagatatggtgtatggacagcattcttggcacttctgattcgtctattcttctatattcctggtatgttctcttatccatcacgtgaaatttaggaaatattgaaggagaaacaatttgtactgtagatctaaaagtgtaaaatacaccttttatagccctcattgaagttggtgtaaattaaagcatttttctaggaacctcaggctgggctctatatcttcttctctttgtataaactgcgaaacatgagaaagaaaatcctggttgtggagtgtaataataagaaaaagttgtgtattttgttttttcatacttgttggataatgattgaacattgaatgaaggaatcattttcttctgggtctttttcatttctaggtgaacttgagttgccatttctggcattgctcttggtgatggtagctccatacgaggctatgaaattaaggtaaacaagtccatctttttgggactttgggctgttgcctcttttacctttttcaaaaagtaaaataaaatgcttcaacatctttcttcatcagggatacaaaagaaggtgctgtgatttcattgttgattgcggtgtatctggctttccagcatttcacaagaacaagcttacatcaatcatttgaccaaggttcagttgttgccaccttagctatcatttgtatcactgttgtatctttgttgcttcttatctgagttggctttgaaatgatgtacactgattgtaaataagaacaatacttgttggaatgacgatataaaaaatatatggattatgttggatactcaatcttgtacttttcacttgttaattcaaataatgaagttggaatccgtatttggtatttgtcatagaaattgtttttagaacatgatgttctttataccttagttattaaaaccaaatcaaaccatccagttaaccataaaactgttttaataaagaactgtttttgaaatattcaacaaaatgaatattgcatttgaactgtggcaagttaagcattcactatgaacacatttaagtctaaacatgttgaatttggtgtttaaaagctagcatccgatgtaataaagtttttttggtgcttctctatcaaaattgtttaatagaaatagcaactaacaccatcaagccatgtttatgttgtgtgaccacatcccatgtttatatgtcactgttgtgaataaggtagatttttccaaagtagccttctgagcgtcctgggctcaacaataacatgttctagaccaaacatgatggtttttagttctttaatgtattttattctgtttagtaaataaaatggcatgctagctgatattaattacaaggattttctatggaagagaagctaatactgtagaaaaactgtctactacctataaatccttttggcttgatcaactaacagccatacatagatgaaaggtataagtaattttaattgcaagacttgttgactctgactcgttgaaattttgcaaaaactgctggaagactgattgaattccagcgcatcacataaagaatgactgaaccttgtttatcgtctagatgtaatttgatagtggaagggaagccaacaggccacatgtgaacagcagcagcagggaataaaatgcagatgtggctgtattggggcttcctgtaggttctgaaccaaagacagttgatccgccaccgggatttagcatgcctggtggagttggggtcatcactggagttggtggacttggtgggctgacaaatgttggtgctggtggtggttgattagtgctgcattggtgagataatatattaggatgtataggattgcatcttcattaatatagggtgaaaaagagatataggtgctgtaaattctcaccttgttgacttggacgatgcgtatttgcaattcccactacctgcgatggagttagatgttattttctacttttaaggtagagaagcacaagcaaaagacataaaacaaagtggaaattgtttacaggcgcagcctaatccccttaaaaaacaattaaataaatgaagcccacaatccttagagtcatgatgtaagaaaagtaagctaattgaggacattcatccgttgctgagaatggcgttcaacagacagcagctggaccttcatcagttgcttaaagaaaaacattactatacttttttggtacaaaaacattactatagttggtttcatggaaggggattcattcctgtttataaaataaaatatatattttttaaaatgacttcacttgatgccttgtcgcttgctccacaggtgaaagtatgagttcctggcctggtaagttatgggtaaggagagactgtacttcagaaaatcttagatataggtatgtaaagatatatggttatattttttaaagctacaaacaagggaagtggggtgatccaactagaaattattgagttatatagtccctcaactgcctttcaagttatataaagtttgcataagaatcttcattttatatgaaagaagaatagtgacttgagctatccaagctgtactctaaattcccaacaggtctgagatattggatgcatgatggtatgtataggatacttgctctgtgcctgacatgacgtgttacccttaagacatgtaaaacattttaaatatcatggtcacaaccaagaaaattatcacaagaagataatcatgcttttaagttcgatgaaattcttacttggatcattgcttgtaagagatgctgttcctccaaatacacagctggtaggtgctggattcttctggtagtagtcattgaatgcataggaagcatgatcacggacagtgttcggattataacagcttgctcctggttgtattgctgagcagtctgcacctccatacccacaagcatagtcaagagcaacctgtagagcagtgtctgaagctccctggttagcaacacaccattgaccacctgatgatgttggtgttgtggttggtgtggttggtgttgtggttggtgtggtgggtgttgtggttggggttgttggatttgtgtttggggctgtggggttttgccctgatgtgtcaggtgtttgtggagtgttagggtttcccatatatggatttcctgtgccaggagttgtgggattgacgatagggacatcatctaattgagtacccaattccgatgatgagaagatttcctgttttttgtcatttaatattttggttgttcctagacctggaaaaagaaacggaaatttaactccttagtaggacaaatgcgaataacttttgtgatgcacttaagatatatattaccctttctaaatcaatttacgcaaattgcaccaaatcaagttcattacagttgtacatagaagtgtgcatgcatgactacgatatcttagaactggaaactatcatcatttgtagacagaatttatctatcgaaaaatgattgaagtttaaagataaactttgatcatattttcgattgataaattgagtacaaaattttatggctcttgataattaggcttgggttgcatatcttctcaatccaaagttggttttgttataaatgcgtggaaaaaatggtacctgaaccaaagaaaagacataaggagaataatacgaggtgccagcttctagcattcattgctccaggtcggcttgtgcttggattgcaggtgtttccttaagatttattaaacaagggcagctccctgtctgttcctgtgaagaggaatttcattacttaaactttttatattttacataaaataaaatcatgaagaatcgtagctttcttggatcaaagagagaaggaagaatataggcaaacttgagaaaggaggcatgggataattgaaataagcaagcaagagaaggtgcaaactgaggggaaaaaaggtgcatgacaaaggaaaaaggtgaaaggtgaaagggcgatctgatgcttgagagctgcaatgtatatataattaatgtgacggtgatgtctctgcaacgtcctttctcttttgtgccactcttttctactgttttatgggactgaaccaaaaagtaaagcctgagcaagtggtttgccttttgggtttgtaacgaagaatgttgtctcccttctattgtttttatcctccacctcttaacacacaaccacaagtcattttctattccctgaataagtggttcctctggaatgttttcgaagtacgattcctttcctacgaaactcaagttatgctactgctgccttgtctaacaagaacttgggataatcttgtcatgcttaagcaaccttgtctcaaatctaagttgtctattgtaacaaatcaaaaaaagggtctattgcaaagcttaagtaacttaaaacatttctgctataatttttttttttttttggggggggataggaaattcagaatgcgatcggaagctgaaaagattctcaataattgcagtaagggcatgtcaaagtcccaacatataaacattattaataatttacttgcaacaatcatgaagagaatatcaaagagaagtcatagtactaatttttttcatatatatcaatatattttcatatacaatgtatttatcaattttttagaatattacagtatactaacaattcgtctatacatatttttcatataactcattatatgtataaacattttatacttaatatatatttttcatgatcaaactaatttatgtattaatatttgattgataattaatttattaacatgaatatgttatattattgttgattatatttgtttgaattaaaaataaaataatcttatttaatattttctgaaaaaataatataaaattgtaatgtgatctcatctcatacaacaaaatattctttatatatattagataataaaatgaaaccaaacgattttccttaaatatcggacactaagtttatttcctaaactcctcctatttgcttaagctttaaaataaagtaatttttaaacataatttcttcaaaaagcattttttataagtaacttttttattataaagaaaacaaatagtacaaacgcagttaacgtaagtttttaaatatgtcttaaataaaataaagattttcttaaaaaaaagaaagaaattcaaacaaactagcataagtaaggaaaggaggaaaattactacaaaagcagaggaaggagacaccgaagttgattttcctgaagcttttgaaccttgtgggtgttggtgtcttcagttcagctaatttgtaccctatgaacacgtgcttttactatttatttaaaatcaaattacttttttaaatcagatttcgaatgacttaataatcaattttccattgaataataaatcgatacattaatttaggcatgcaaacttaaaatctctctctctctctctctctctctctctctctctctttttcatatagctgtggaacaaagatttgaatttttaatcgtatgtgaattcataaaatacctattttttttcacgattagaacacatctagtggagccatgcgcaaattaagttcaaatcattcaaatatctaattattccgcgtgaaataggtttatggcttaattagttttttaacttttagattgcaaggaataaatatatattttatataaataaaatgtataataaaaaaaatgtttttaaatatataaattactatatttgtttaattcataggaattaaaaataatatcaaagaatatacaattaaaaataatatcaaagaatatacaacaacatgactatattcaaccaatttaattagatttaatcatgtgaattatttttgaaaagagtcatgtgactttttaaatattgatcgtccatgattaattatatgattcataataattctctcactcttatatagaatacatttttctcatatgatacatcatctatatgtgtaatccattaaatatataattattcttaccgaattttttataaaatgataaattagattttcttataagtgttcttcttatcaaaaataattatattgattgtcataatatcacattttgatcttttctaaatcctttataatataataaaataatttttctacattttatttattatactcaaataaatatgtcaaaagaaataattatcacattatatttcaatcttgaattttgaagaaagtaaaaaaaatcaacaaaaataaaaataaaaaataaaaaatggggtatcaatgcttggacatagaattataagaccaaataaagttcgatccttttcggccctattagttataacccatggcttccattgagtcatgtttgggtaacctattttgttacctaatacaagtataaacaactagtttttcaaatgtgtgtattttaacccttttattgccttatcaatgtgtatattctaaaccctatattataatagtttaatggtgatacactaacaatataaagtagttttacactatcatctaattacaaattatcgttgatatgatttttaaaataattttataaaaatcaacaaacttaccataaatgttgatttctaaatggatgatcctataaaactcgttacataacctttttttttcctcatattatagtaccattttattagaacaaaataataattaacaagtagttagtttgagtataatttaatttagatattttaaataaggtttcaaactcgagaattgttaatgaagttagctggggaaagatccaccagcattaaagatgatcaatcaagttcttctaaagatattagtcatcgacaaagcttgcgatacttaacacaaataacatggtttaaaatacaaaaaaaaaggaagataagagtaagactgcctacaatattcaaccttttactttcatatatagaggagtttatgggcagtgaggtatgtaattttttattttttatttttttaaagaaagacaagaatgaatccataaagattgttatattgacacatgttgtaacccttttattatcttaaagtatctttagtatcagatcttgaacaaagatcttgagtaaagatcttgagtttaagatatgatattcattatatctctcaataaaggaaatgaacaactctccaatggagaatgaattattatagaaaaatcctaaaggtttgcataatattcaagaaaggataattttttcccctctttccttaagatctgaaaatgagatctattactaaagaaaaaaatgggacatatcttcaatcctacgtgacactataagatccataaaaaagtagtctaaaatctcaatttagaatctactactaaaatgctcttatcaattctattaagtttattccatgtaccgcacgaccatattggagtgtataaagttacttcaatgtaaaaattaagtaaaatcaaacatgatacctgagaggaggaacacattccacataaaaatgaaattgtcgctacatttcaaccctaaattcaaagaatagtgaaaatagaagcagtaatgattcctgatttcctttttcgtcattgtcaatatgtaatgaattttttaccaataaagtggcatttttccatacacttgaacaatcaactaatacgtctgatacactgtaatattggggaggatgtggtgcgaggtaaaaaaaaaggaacatagtatcaaaaggttcataaaaatgtacaacaaagcttctctatgttagtatgcattaaacccaggtcacttcagttctgcactggctgcttgaatacaaactcttgcatgcgtcctagggtcatttcttctcatgtaatatcaactatacacttcatcttgaatggaacggttacaaatattccaagccaatcttgggtgttaggccaatgtacgttaaattaaatgccattgttgccaagaaggctaggcaggccattcaggcatatatctatattaacttgaaattcttgagatatacatagcagcttccagccagcagattcttcaaaagtttcaatttaaatgataaatccaaagcaatagattgcgttggaataccaaagaaactgctttatccctgttgtggcatactgcattttttaagatgtcggctgatatcatcccatgctgcaaaaatggggctcagatcatgcaccatattaccattttgactacggaggaaaaaaagaaaagaaaaaaaaaaactaattgtacctggaagtttctggaagtcaggctctattccattgccgtttatgtccttgtgatttggtgttacatacttcccaacagtgataaccacaccagatccatcatcaagctcaaatacagattggattagaccctgatagaagtattgcacatcaaagtgtcatgaagaggttgttacaactacactgaatgcatcacgtaattatacatgtgtaagagctaaaccatagcaaatatttttatttttattttttaataacaagtcactgaaagacatcaatatgattttctgctattatctccctttagtaagagaagcataatgagaaaagaaacccattttatagaagcaaagacaacgctgcacagtctttgtggtacactggtgtggtactccttcaaaagatatacacaagaaaataaagctaacgtgattaaagaaaaatgctttcagatggacatggggttctcataacaaagaatgcagattaaagtctacattgtttgaaccatacagcagtgatggaaaatattcataaaccttgccatatgtgcgttttccaacaagaacggctctacaattatcatgcagtgcagaagcaacctgaaataagtacaacagctatagtgacatcataaaaataagtggaaaatcaaacaaataatatattgagaaattgagctcctcactatttcacttgcactagcagttttgtcatttactaaaatctgcaagggttcaaaccaaaaagaatcataatccttgtcatgaagtcctcaaaatgagaattccattgatcaatgatatataatgaacactcataaggagactattttaatgttcgcttgcatgaccttgctcaatatgacgggaaaacactttatcacacagcaagaataaccttataaaatgatcaaacatatagatctcaacttaattcaaacttttagctagtcatgtgcaaggggtaatgaatttttccagaaaacttgagaatattctcagatgttctttaacttatgttatttataatgaatttgtggaattttctaataataaagccttatctcggggagtcagctatattgaccaaatgatgtcattggagaattggacccaatcaaaaaccaaattttcaataaatccatttttgaataatggtttcctaaatttttttcaatatatcccattggatccacttttagcatagggtcaccagttggatttctcctcagtcctcatattacccaactatccatcatttcctcaatgggcatgctccacttttgtctcaaatacacacttgttctttttttttgttttatgtcactcgtccacgttgaccttatcacctctaggctagtcttattgcgacccagtagaatatgcctttgaatttaaaaggcactttgtatacttaaccaaaaacacttggattcaaaagcttatctccacaactcaaatttagaaattcaactcatcaactaggaatatatcatctacaaaaaaaataaaaaattgagcactggctcctgaatgtgcaaattagtaccttaaggtgaaaagtttgtatttactccaatggtggcaataaatcattgacccatcatccataacatatccatcatagttttcaatagtaggaaattctgttactgctccatgggtttgcactcaaatcattacctatcatacataactcaccatagcttcacgcattgcacaaatctaaaatctttatctgctcctttatttaaagggaaaaaatccacaataaattcaatgtatcttaggttttttccctagcattgtttttggaatatataatgcttatcttaccaaagtttatcaaatgggcatctagaatcactatttatcagtcaaacaatcaataacttcatcaaatcagatgtctttgaattattcctgccccaatgataaaccaaaaaagaaattgagaagtagaaatagttccaggaagttaattcaatgataaaaaatcagatgtagaaatttttttacaacaacaggagcttgaatcaatggtgaagtatctgtaacaatagctttctgtaactgaggatctcttccaacagtgtagatcacctgtcatggagacattagaaaaggacaagtctaagaaactaaaatgtattcaaaagaacagttgaataattatcacaaaatagcagactttttaaagaccagtgtgccctacagtataataaaataaagcaacagatatatataacaatttctaactctgaattcacatgatagataacagatattgaatatgaaatcataaaaccaaaaaaggatgccaaagcaattggagatgttactacttcaacatgtaagcaactatcaacttggaccattcggcccagaaaaggctgactgttagaagcactaacgcccttcaagctcaacacttgaggggtcttggactgtcctgcctagaaaaagtcgaccattagaagcatccacaccctttaggctcagcactcgaggctgtgaacagtctggtcacagaggttgaccgaatatagtgaatggattgtccaatgtagaatgattgggtattctaacctttggcccaatcacattcaataaataggggtgaccccccttagtcacctcaagtcacacaaaaagggcttactagggtttctttgaggactccttagtatgctggacataaagattgtttttgacataataaagacctcattcatttgtaatttcaatagtcattgttttggatgtcacatgataattctattagatatttagtgcttttcttaagggagagtgtttttcacacaaaatgtgagggcaaggggcacgtttgcaccatttcaaaccctaaggtattattggcatgtgatcataaattgaaggaggtaagcaaaacttatcctaaccattacaatcagcaatgagcataaaacagacataccgtgtctccttcatttaggaaaagctttgcaatttcaattccggcctgaacgagttaaacataataactacattagacagttttaaaaagcaaagaaaaactacattcaatagaatgcagccatcatttatcttgtcatcttatgtcaaccaaagcatatgtaagcacaccatgacagaagaatacaaatttacttaaatttctgaaaataagagaatataatttcttgataccatgatgcagttgcagtaccttcctgcaaaggcaggtttccacatatgtacaatacaagttcttagaatgtgggtttggacctaactcaatcttacaaaaccagcttgtaaggtgacgattgcccctacttatatacactgttttgaccatatcactaatcgatgtgggatctccaacacaagtgaatagatataaattcaaattgtcctcaaagttgcacaactagtgactcaaaagtaaagagctccaaagctgcaaatcagtttgcaggttcttttgtggtagtgagacttaaatatatcaaattcaaatatatgattaatttttcttagagagctagtcatctgcaaaaaggtaattcttttaactatttgtgaaagcggaaaacagaagcgaaataggcagagtttacaaataggacagtcagcccatgtcaacctacaacaaattataggtctatatccattggcatatgcaccttatttgttacctgctgtgggggcaatcagatttttttttatttgttcatgtatataaaaaaaaaaattttgcccccataaaaaaatttaatctatcaacttggaccattggattttttttaacccaaaacccaaacaaacattagacattcaatacaaaaactacatgatcaagcccaaaccatttagccaattctcattactgttacaataaaaaaaaaaaaaacaaaaaaaacaccacactgcatagagcacaaataaagattatctttatttagataacgattatctaaagatatcttttagtaaaagaaaagatagattaaattgttttcctttacatatcttttttgaaaagatattagtataataatatattagattgaagataataaagaataagagataaagaaatattgattaaacaaatttcaaattatgtacaaatacaaggatagacaattcattttcctagaatcacacaaataaacagtctctcttgacattaatgggttactcaaggattgagaataaggaagaaagtggagaaattttgttgaggcaaaaataacgaagaagtcaatttacttgcttcaagaggtgactacattttcaaaacttccatggtatacttcttttatgagcgtttttcttttactgtgtttttgacataaagaaatcaagattaatgattttttagtgctgattattttaatgaaggatgttacattttacactaaattagtaatgacaatgaaaaaatcatagaacatttttaaagtatgaaaatgcgtagagaacaattgtaatttgtagaagcttaagtactttagattttttttatcatgatattatgtattttgtagtaacttgtggtattttacttttgtgaaaatattagaaattatttcttgctcccactaagaaaaatttctggatccgccactttctatatccataggcaaaataatgagaaaagttactatggtcaatgaagattacaaagaggaccccatcagctcatgtcaaccataactaagtcaatgattttatgttcaagacatatgcagggccatgctaaaaaaacaaatctaatccattccataacagaaatggtttaatgacaacttacttgatacaccatttgtgctacttcaaggttaggtacacagtaatatatttaattcataatttcatatacactaagaaaatcactactgtagtcaatttcaaagaagtgaatcaaaatggtaaaggtagatagggttatatgcaaaagcaacctgtactagcccaccaagattgtctctgagatccaatatgaaatatgaggcacccatgtcttgaagtcgtttcattgctgcaaaatccattatttcttctagtgtcacgtataaaaaagtggaaacaactaataaaagagtccagaagcaattataatacaaatcaatataaggatccaaaaaagcagcagccttactttactaacaatgtatggtattcattcttgcatgggttacatagcctagatgacaatttttttatactaacaacataaggtaaataacaaacccctggcagatcaatgtcaagttattcagaggcgaaaggtgtacttaacatgctaggggtttttaatgcttgaggcaagaagcacgaaaaagctcacatctgactagagaaagggattacaattgaaaaggaaaacaacaaaatattaaagtcattttacattgattttccaatatatccattattcaatcaaaacatttgccgattgtggtcattaattgacttctaagatagacttgataaaagcatagaacagaaccccatagtatattgtatttcatctccatcctttacaagtctgacttagaagtcaattttctctcctcaaaacaatatgtatccgtaatcagttggtctcaaaattaatttagtatcaaggaaggaaagggctgaaatctccatatctgatccagcaaaaaaaacctgaccttagcagctcagagtaagaattagtaaaagaagacttttaaaaaaaatgctcttattgagaaaacattattattttagttttaaaaaacacatatgaagctgagaaaagcttaccaatgactaagtcttttctggccaatgcattgaactctttgaggcgtatatacccaacaggagtaacaccattgtccaattgttccagccgataaaagactggggtacgagcaacaagttgccgctggacttctattgattcaacgggtccacagttgccatgcttgacctgacagtaatgattctaatattaaacttgaacataaaagtttaaactaaataaaactataaacaaaggctagagcagatgccaaactaacttggaattagaatccaaaacctgaatagtcacagatgttccattagggccttgcaacagggatgatacttcaaatgctgattttccctttacctccatgttattgacagccaatatttcatcccccttccagagaaacagaaaaaagtaaaggaaacatattatattattcaaaatagttctttgtgcctaccccatttgcttctaggagagaaactaaaggacagagtatattctgataaatggtaaagacagagaaagggaagttgttttgaatggttaaaagaagcaaaaaaaacaaaattgttcacctatttactgtaatggataccagagattgcttatgtagcaattataatgaaaagcatgactatttgacatatttatttcattgattaaaaacatagaagtgaaggcaagagagatgtatgtgtagattttgaaggtgaagaagatgatgatttgaagagctgcaaattattaagaatgttcatcatctttgtgtacctgtctaacaccagcagaatgagcaggaccatccaatataattcccagtacctccagtctgaggtctccgttttcatcaggaacttccttaaggtttattccaacaccagtcatgtcatacctcgccatcttggagaacttttaacagtgggaaaagtccatatgccattcattaagtaagaaacatgaatagaaatcaccacaatctatataatctcatacataagaaaaacaaataacagtgaagagaacaatgatacaagaacacatcacaagtttcttattcactgcaataaatgcaagggcagcaatattttggaagattcatagtgatgtgtgtgtgtgtgtgtaaatatttctgttaaaccatatagacatattaactgttagatttcatcttaaaatcagttggcattaagtgaaattgtccaacatgtatataggctccaccccaagaattgaattgagacgggctatatgggactttccaacactcctttagtatccaagcgtatcctagtagttgttttgtagcttattgcaccacacataattgggtcattatcgtgttatcagaccacctgataacgcaaatatacagtcatgcaaactagtatataagtggggcgcaacccttaaactatggagtagctttagtctaaaggattgagttaggctcaatcctaagtttagaccccttccatagatgtctgctagctaaaacaggtgatggcgatacacagagagaggctataacaagtaggcataaaagctgcaccccaggaattgaagcagacatgtgggtctttccaacactaatactattgattaacaaacacagtaaaaaggacccatgaaaaaagacctcatcaggcgagagaaagcgagtataaggatcggccaagctggagagcattcgtttgatgatttggtgcgcctttgatcttgtctgaatggaattgctcaaaatagcttccctcttcagctggaaacaagaagcgctatattagcatgagcgatgaagcaaccaaccatgagacactatgagagtaagagtagttgatgttagttacctgccaagtgtcctgggaccatctgtggcgaccagtgtcgagaaaggtgtcgttgacaatctgccatgcttcctcaacgaggccttggttggtgacaacctcgggagctgtttggagcgtctctagtaagggcaccacatcaggacatgtttgggaagcagagacagaggggaaggagaagacaagcccgaaggagagagcagcgccgaggagagtgttgcgaaccaagggaatgggaatgggaatgggaagatgaggagctttggagaggaaagttggaggtgctgagagtttcatacacacatagccactcatcttctgctgctgtcttttttctttgtcttgctctttaacattaacatcgtttcagcaatgtaggcgtcgccacttcactcgttccttatgtcatccgtaggtggatcccactcatcatccccaagacgataggaaaatgtatacttttaactcatcaaattttaaaattttaatatttttaaaaatttcaatactttttcattttctgtcaaaaatgtttattttcgtctctgttttaaagtttaaaataatcaatttaatataataacgattatcactatctttattttatttttaaaattataaaatattgaaaaaatattatcatccatcatcttcttcaaccttctaccatcacccaaaacctccaccccaaatagaaaaaatcataatccaattaattgattattccaaattcaaatcaaaatcctaaaatcatatttcaacttcaaatcaaaatcctaaaaagaatttgaaaaccaaagcttattctctttctctctcacacattatccatctttgttccagactttgtttttctgcgtgctttctccgttgtcactcatacaggtaactcagttgtgttgcttctacctcttcttccacttgaaccaaacaccgtcattcgatattatgttgacggtatttgtatgtatgatgtagccgaggacaatgtcaggtgttcctctcttcaacctcgctcctaatctcactgtctcaaggctctgcttaggttactctcagcctcattcccgaaccatgaaattctattcattcacttacacgacacttgtggttgtgggtggcaggaaccatgactttcggggagcagaacacgctggcggagtcctttcagcttctggaccaagccttccattcgggcatcaacttcttcgactccgccgaaatgtatcccgtgcctcagcaccctcgcacgtgcggcatgagcgaagagtatctcggccgttggatttcacaacgaaaaatccccagggatagcctcgtcattgcatctaaggttctcttcttctgtctccttcgttgctttgtctcttttctttagctcaacttgttcttattgcaagactaggttgctggaccttctgggcagatgacttggattagaggtggtcctaaatgtttggatgccgacaatattactgaagccattgataataggttacttcctctcttaattctttctcaattcacaccctacatgcagactaatcttttatatcgtatatgtagagagatgctggacaaataatactagtagaaactgtttcaggtcttttttgcttgaagctaaaatgaattgagcttctactgtaagctaaaattaacttacgcacttaacttttatagaagctctctcgtttaacttctccaaaagtctttttttaacaacccctccaaaaaaaaaactgtaaagagtttcatttcagctggactatagaataagaaaggaaaaaatgatcagaacaatagtgatggagttttagattgtgatggctcataatatacactcaagagaaacattaaggtgggggtggaactggagaggaggggtgcttgtttggaagagatataagatattattaagtttgcatcttatgattctctttctagtaacaaactctgaaagcttttgttattgaatttatgcagtttgttgcggatgcaaatggattatattgatctttatcaaattcattggcctgatcggtttgtatgtttttgttaatttgaagatttggacatttgtttacattgtttttgaatattacatgttcgtcgactttcttatttttgtcccagtggacgtgcaatatggattttaactcttgaaatgttacaccttgtagttatgttccaatgtttggagaaactgagtatgacccggtccaacaatatgcttcaattagcatagatgaacaacttgaagctctcagtgcagctgtgaaagctgggaaggcaagtggtatttttaaatagtttcaaattgtcaacctgtcactcttgtaattcctgaatcatgattcatgagtatgaaaatgaatgcattttttgcagatcagatttgttggtcttagtaatgaaacaccttacggcttgatgaagtttattcaggttgctgaaaaatatgcttcacacctgaagatagtatctttgcaggtttgatcacttaccatccaactccggcagtatttttgtttattttcatcatggaagcctcaccctataattccctctatgaaagtttatttcttacactaatttttttctgtttagtgacagaattcatatagcctgctgtgtagaacttttgattctgcaatggccgaatgctgccatcatgagaggtatttaatattattgttagatatgaaatcatttatgtgccttcacccagcaacttccttttaggatggttcacaacatggtatgattggtatcaaagcctctttgactaagtggtctagagtttgatctttgttgaccctattcttctagataaaagttaaattttaggacaaggtagggtgggctagtgcattgtcctcactttaagtccaaaggttgcagagggggacatgttagatacaaaatcatttatgtgtcttcacccaacaacttgagtttctaggatggttggttcacaacaattactaaaatataagtttgatattacttgattttggtcttccaaaaagaaggttatctaagatattctgagttgttattcggattgatacgaaatgttgtgggtttggggacataattgagagggcataatggatttaacattaacaagcagatttatattatataaatcagatttaatacaagcagagtcataaaattccatttaattcagatagatggaacattggaagcttaatgcatgaaaatttataatgtttactacatttgttggcctaaatcattctcctgcattttctatgaaagcctcattgtttgataattatttatcttttcagaattagtttgttggcctacagtcccctggcaatgggtatactttcagggaaatatttttccccaggcggaggtccaacagatgctcgtttaaatctttttaaaggttaattgacatctttatagatatgttttgtcttacctagctttttcacctcttgccctccttcccaacatgaaggaaggaaaataaatgttcctggtaagtatgagtttagccaactgatactattgttattattcccagggaagtattcagaaggagaatctaggtacaacttgtccaataaaattataaaggcagctaccgtggttagtggattcttgtcagcattgttgcagattgcaatgctaatactttgattagcttattggaatctgaatatcacatttccttagttttcaagacacatttttttatattttgattagcatatataaagttttcttaatttaagagcagatgatgcgatgtgaatggggaaaattgttttaatctgaactgatagccttagaacttaaaaacatgtgcaatagctagatgctaatatatcataggcgtggacatttaaaactgaacctcatggttaactgttgttaattagaaactctcgttcctatttatttcttctgtttactgattttaatctccatattcatatatttccccttctgcagaaataccttaatattgcaaaaacacatggtcttcatcctgtatctctggctataggtttgataatcttttcctagatcttcatgtgcaaccccgcatccccacccccttttatattaagtgatgtaatttgcatgactccaaacgcatcaaatattaaatcagatggctggtccaccatattggttgatagttgataccgttttacaaggaggagttgctaaattctaatacctaaagtagtttggtagctgcacttgtactgacattgcctttttttagtccccatgcatatgttttaagtaaattcataggtaatcaattacactgcgtatgtagaattcaataatggacagtctgtcaactgtcaacactgatagaagtttggtaaattgggataagtcatgccttcaaagttggagtttttgcttcttagtgatattggatgccgtacattggcttcttctaaataaacaagaatgttctgtttttttccttccttttttgtcttactattttaaaaggatgccaaaaaatggtttaatttagtagtatcttatcattgctggagatagttattaatgcacacgcataatgcaattttatccatcatttgcaattaactcatgctttttcattttttaaaaagcatccattgactatgttattgattgtggtccttgagcttatccattagaggttgtggacttgtggggcattagtttattttttaattttatcctaattttatttcctgttcatttttgttttgagcagcttttgttttgcgacacccccttgttgctagtgctgtttttggggctaccaaatcatggcagcttcgggaggttctaaatgcatgcaagattgagctcacatctgaagtaattgaagaaattaacaagattcattcaaggtttccaaatccatgtccctgaagaatacaaattattaattaataattatgacgaacatgtttgaaatttaggtaaaaaaatactttttaaaaggataaggattttttattttgctttcattttatttttatctattagatttatattaaaatgtgtggggcaataatttcaacaaatcaaacatttaccatctcattatcataaagaggcagaagatagcagtagtcataactcgtaatacattatacaataatcaattcgcgacccgaaaatacagaaggcgacatataaaaagagagcatgttgaatgatatattttcggcaaattgttaagtatacgcaataaatataatattagtagtatatcaattatcaatcatttgtattcttcgtggatcaatactcctgtgggtcccacttttactccatatttcaattgaaacccacatctgattattcaatgaacaaaagaaccaaaactatcttcatttggtttaacaaccatattttcttagttttttaaaatctttttattattccagaatagtgcttagtttatttgcatctatacgctactatgtctcgatgcatatgaaaataggagagagagagaaataagttaaaatatttctaaggttggatgtatttattcccctaaattatttaatannnnnnnnnnnnnnnnnnnnnnnnnnnnnnnnnnnnnnnnnnnnnnnnnnnnnnnnnnnnnnnnnnnnnnnnnnnnnnnnnnnnnnnnnnnnnnnnnnnnnnnnnnnnnnnnnnnnnnnnnnnnnnnnnnnnnnnnnnnnnnnnnnnnnnnnnnnnnnnnnnnnnnnnnnnnnnnnnnnnnnnnnnnnnnnnnnnnnnnnnnnnnnnnnnnnnnnnnnnnnnnnnnnnnnnnnnnnnnnnnnnnnnnnnnnnnnnnnnnnnnnnnnnnnnnnnnnnnnnnnnnnnnnnnnnnnnnnnnnnnnnnnnnnnnnnnnnnnnnnnnnnnnnnnnnnnnnnnnnnnnnnnnnnnnnnnnnnnnnnnnnnnnnnnnnnnnnnnnnnnnnnnnnnnnnnnnnnnnnnnnnnnnnnnnnnnnnnnnnnnnnnnnnnnnnnnnnnnnnnnnnnnnnnnnnnnnnnnnnnnnnnnnnnnnnnnnnnnnnnnnnnnnnnnnnnnnnnnnnnnnnnnnnnnnnnnnnnnnnnnnnnnnnnnnnnnnnnnnnnnnnnnnnnnnnnnnnnnnnnnnnnnnnnnnnnnnnnnnnnnnnnnnnnnnnnnnnnnnnnnnnnnnnncctaaaattagaaagaagatttgaacttttaaaggagaagttgttatcctattaacatcgatctgggctgcattaacacatcatttaaagttctaagtgaaattacagtaaaaatgatagttaataatattttactacttatttgtacacttggaaacgaatttaaccttttttatatatagaatttaatatgtcaagtttttttcattttacatttaaactttaaaattatcaattctaaaagaactttttttaaaaaaaattgtatataggtacatgcttaattctttttacgaaccctagtgaaggctggaaataaaattgtatgtaggttataatatgccgttaaagatataataggtaaaggaaaagtgaattttttttataaaaaaggtatccctttattttaattttttgaaggaaaagatatccctttatttattattagtattgtatggagtatattttgttattagtgttattatattgttttaattaattattaactatttagtattttcttaccaagggaattattagcatttttagtaaagattctattgttcataaacactataatccgattaaatgaactaagtggagtatattttattcagaataaacactgttattatcactcctctaaaattacgttaaaaaggatacacacacgcataaattaatcattgttaaaagcactaaatcagaaacaaatcccttactaacgaagattttcagtttctcacaaattgttgattaatggttatttccagaaaaaaggaggaaaaaaaagaaaaaggaaaaaactccgaagagagaagaggagggttttgtttcgtttcgtcctctttccgtttcgggtgcaaatcattgacaggagagagagagagaaagagtgcgtgtgagagagagaaccagcgcgcggagagatattttaaacgcggcggaaccctaacgaggcgagcggcggcgggggcggcggaggcagatcggagcgcgagcgaggaggatgagcggcaaaggcggtgggggccagaaggcagggattcctccggcgagtcggaagatggttcagagcctgaaggagatagtgagcaacatgcccgaacacgagatctacgccactctcaaagactgtaacatggaccctaacgaagccgttagtcgcctcctctcccaaggtataacactgcactgcactagggtttttcaatttcaatcacaatcactccttcgaacgttcctaatcttctgtatgttcgtttctcattgtgtagatacttttcacgaggtgaagagcaaacgtgagaagaaaaaagaggtgcgttttgagttacgtgtagttcgttttgcttttatttttgtagatgcttgttaggaggagttactcgagttagttaatactttgtttatgtatttgcttgtgatgctcagtgacgagatttttttttttattcttcagggtaaggacacaatggattccaggtctcgtgtggtaagcaatacatctagccgtggcggtggcgctagggttggcgctgaccgttatgttgggcgtggaggcgctactcaatttagtagtggtggtggtaagcggatgctgcttgctatttttgaataatgtttggattaattaatatgctcttaacctaatactttatcaagtagtatttcttatgtcgctattgttgttgtgttgttgcttttattattattgtttttgttgtcatcatcatcatcaccatcacatatgtttggaggtcagattctggtctcctgcagggaaaacctgtattcaaaaaggaaaacggaacacctgcttatggaggtcttactgctcctgcatctagcgcattggacaataatgtaaacaggcaactaccatcctacaggtatattttccttcaataattttgtgcactactggaggaactaaaggaattcttgtggttatgataaacaccagttcgtggttatgatctgtttggaaattcagactggtatttaattgtacttatttctggtatttattatgcttcctccagttttttctgaaaagcaagttggctcacttggttgttaaagcatccaatccaacttttgcaagctattttcaatgcagattcacttctattcttttctcagacagttggtgcattctgtaccacttattcactggattactctatggttctgctttatctcgtgggatgaactttatagccgtgcaaatgttcatttttctcttccaaagatataagacaccaaactgatcagaaatgtcttctatttgtaaatttttgaatttattataaatattttaaattggtcgtccaataaaatcaaattatctttcaaagtgatatacttgtcatcaaattggtttttggaggaagactctgatggcattagtgatcatttaaggatcaatatgatgttgcatatatgttgagtgggccaaagttagtgtttagttgtttactcatttgtcttatttttttcaaaaaagttttcccgtaagcgcttgaatactgagcacacttttagtatgtaagatagatggagcgtctcatgaatgttcaaaactgctgtagtgattctgtccgtgtctgtgatggtctatcttcatcacaacatggtgggttgcaatctcaatgggcggcgaacccaggtcaagtatcaatggctgacattgtcaggatgggtaggccacagaccaaggcatccatgcctaactcttctgtccacagtggtagccatcagaatgtttttgcaaccccagcagcttcacataccaatttgcattcattgcaaggtcatgcttccaaggtgtcagagacaaataatgaccatggctttgctattaactccaatgttgaacagaatgatgaatggccatcgattgagcatcaaccagctgtttctgtatcctcggttgtagatgatcatccaacatctgagtaccatacaaactcatctaactctggtgaagctaatcagcagctgaagacccatgtaaatgaatttgtagctgaagatgatcctgttgagaatccagaaaatgttggatctgcttctatatctgctaaaagtatatctgaagagaatcccgaaagtacatctgtttttgatggtagcttgtacaaggacttaaattcctaccaacctcatcggcatcctattgaaactaatgaaggtgactaggatgtttatcagtttgcatgtcttgtatgtttatttatatcgagcatatattttttacataaaatttgttaagacttagtgtggataaacttcttgataagcatttgtagaaaaagaatttgggaggtaaattaaatcaaacttctcccttaagttaaaagtaaactatgcaccttagcttttggaaaagtgaagttagatcaaagagcctctaaacaaggaaagaagtttgatttattttacctcttttttgttctcctataagttcttattgagaagtttgtacaaatagggtcataattatcatgtaattagagggatggtactggcacttccatataaaattgctttgaaattccttagttttcatgttgttatctcttttatccacgtatattctgatttgtttgattgggcctgaatcgttgaagtcatagaaatagcataatgaaagaatatttcaatatccttttacaagtcaatcaaagttcatcattgttgttattgttattttgttgttgttattattattattattattatttttgtttttattttctttctcatccttttaacatgtgaatagtttaaaaggagttattttattactaaaatagtcatgtgccctgatctctaatggtttagagagttattataatacaattatttgaagttcattcatgattatatcaaacattcgcctacatgtaagtcctaatttcgtaacgtctttctttcagctgaaggtggtgtttcatcagtggccgcgaacttagagcagctaaatttacactcaaatgatcaggggacagaacaagaggaggaaaattcttctgtagtaattccaaatcatttacaactccattctgctgaatgcttaaatctgagctttggaagttttggatctgcaaacgatgcttccctttctggatctgacccatatgcatctaggcccttgaaaagtaatttggaagatacatctggagcaaaggatgtttcaacaattgggtcctcagatgttaggcatgtgcttagacctcagtatactttgctgcactattctggtcatattttacttatgtgttttttttttcttgcagaaaccgtgactattatggcgatgagcatcttactactacctctgatgggaatgtagctcacataactggtgtggatgctgggacttatgagcattcctccatttcacaatcagaggctttaaaatctgaaccccctgaaactgctcaggaaaatcaatattcatttccttcttcttcacacgagtttacttacgaaaatgcccaacaaccggatgttacataccctcattcacagacaagctcacagatacagaacctgtctcccttctctagtgtaatggtaatgcataaattcttatatcttatgacttgcaatattcagcatatttcaaggctgggtcttattttgggtgttaagttaattagagttggttctaaaatgatttgagatcttatagtgttaaaactaggggatgatcagtgctgctattcatctctttgagaataaatcaaagcttattctctccaaacaatagaacttgtggtagagtactgttttactgtaataaatactttttcgaatggacatttttaagtatattttatgattgaattgggaattgggcatagaaatgcctccatttggatatttcattcatattgttgggtggtgtatgatttctatcacaggtaattgagttgagtgtgaatttcaatgctcagttgctttacttgtatggcaacttattactacagtaacttgtacttttttccagaaaactataatatggtgcaggaccatttattgctttactgaagtaataagccatatatattattgtagtttcttttatcttctaatattaatatcatgttgctattctgctatttgcactaatcttatagtgctattgtttagcaggcttatacaaattctttgcccagtgcactgttggcttcaactgttcaaacagcaagggaggatatcccatactcacccttccctgcaacacaatcaatgcctgcaaaatatagcaatattgcttcttcaattggtggtcccactataaccatgtcagaggtgaacttctgctctagcttattttagtttttctatgtacaagcttttgagacaggttgaatcataaataaatctaggattacagcttacagagtgttcaattattcttgttccaagaggatgtgtactggaatttgcatgtacattatgtttgggggctgcagttatataccaatattttggttaacaataagcactaaggatatgtttgcatgtacatgtattgaataccaactgtccagttgacttccatgtgacatcagttaaagatctgacttacattaagagcatcacaaatcaaaagattatatcttggttcaatcacttgtgtcaaaacggcattttgcatgttttggtttgagctacttgagtgattactgattagtgtcttcacatgagctgatattttgccaataactgttttctacatatgaacttacaaagtttatattaattaattaattacttagcaacataagaggatgtattggatgagataaggcatttggatttttatgcctatgtgtcacatcaattgtatcctgtacccattttgtgtttgattcaatacaagtatttctacactctgcagtgcaatcttgtttctttgcctgataaatggctggggatctatctgtgataaatcttgtgtgattccatttccatgtatatacattttattatactactactagacaaatccattcaatgttactagtcattttggtttcccataaaaatatgggtgaaaaatatgtagatgatatatgtatatataccgtgcgaaggtactggtcttggaatgctatagttatttttaaaaattaggatcctggtgagacaatatgtattaaataaaatgtttatatatttaaaaatataaaattaaatttatcaatatgtgattatcctatcctaacccaagtttcatgctttctcccactgtcaagtcctgtgatacttttatggttggcaagtactttgagggtgttctgtatttgaaaacagacggaagtctaaaaacacaaatatggatgtgtatgagtgcatcagtattgaatatggatttgatacaagtatctgggcattacatgcgtgtgaaagagaacacaggatttatcataattcctctgataccagttaatagaaactggatcagaggaattagaataggaattggaatgaacttttctattagaatttggagtaaactcctgcagcttacaatgtgattctttcgagggatatcacaacctcctagcactctcgcgtgatccctcttccttatcctcacttctatttctacatttcctgagttagttaactgtaactaactccttattctattaactaaacagctttattactatttacacctcctagaatatatctgaccccatctacccctatcataatatcaggtcattggtgcaatttatattgaaattgttttccaatgattacatttgcacaatttaatgttatatctgtatatatgtatcttgattttattgttttttattaagagggagaacatgggtatttggtatcattaattttatttgtcaactcgtaggctctaagagctaataacatctcaacacctcaacctaatccacaagccctgcctggtgccaatgttgccacgggacctgcacttcctcaacagcttgctgtgcatccctattcccagcctactcttcctctgggacattttgctaatatgattagctatccattcttgcctcagagctatacctacatgccatcagcatttcagcaggcttttcctggaaatagcacataccaccaatctctggcagccatgcttcctcaatataaaaatagcatttctgtcagtagcttacctcagtcagctgctgttgcatctggatatggttttggaagttccaccagcattcccggaggaaattatccattgaacccacctgctgcgcctactagtacaactattggatatgatgatgttataaactctcagtacaaggagaacaatcatatgatttcgctacagcaggtataaagatcttcattttaacgcacatttaactgttttcgttttccatatacagtttattctcttgggagttgagccaatttggtttcaacagtgccacctttacaaaatggagttatttgttagtttttctatttatgcttgtgtaaaaccatgatccttttaaaggcatgtaaacaaaagggttaagatgtgtttcattttgttgtcaacaaattactgtcattttttgttgtgagggaatggggtagactgattttgtgttttcttctgtcagaatgagaattctccgatgtgggttcacggacctagctctcgaacaatgtctgcagttcctcccagcacgtattacagcttccagggacagaatcaacaaccaggggggtttcggcaaagccagcagccctcacaacagcattttggatcccttggataccctaacttctaccattctcagactgggatttctatggaacatcagcagcagaatccaagggaagcatcccttgctggttctcaaagccaaccaccaaagcagtcccaacaaatatggcaaaacggctactaatcttattcacctcccggtttttaagggtcttgatgtgagtttgaaagtgactggtcacaggcatttccgcggtctaataattaaaatgtgccattgtttggtcccaagagaccatatatggcccgctgctgccctatgcgaagttgtattctatacaagttataattatgctcgtgatgtttaacttaggtatttaagtgtgctaattttgtgtacaacgcacagtaccctttttatcaacattcttctcatctggttatagtggaaagtttcttggatgctactaccttggattttactcctttcattcttgcccccttcccttttatatatgcatgtctgtcgtttacctgagagttaccttgtattactgtctttgttccttttaaatataatttaatgtttttgctttttattgaaattatctaattttgtattatatattatgtttaatgattattttgtcatttattatttatttttctctttaacttcatgatttataaattgtaatttaagtgaatggaaggatatgattaataaaatagtttaattttttagaatgacattctacaaatggtagtttattgttattattccttccgatcttatttataaaacacggttttggaaaacattattttttctataagattctcgcaataattatgttttactaaaatatttttatttattttaattatagttgattgctactcttaattgtttcttctctcttgaagatgaatagcttctcaatactattaaggataaaatttgaaaaatattataaatgtaggcaaatttaatgttaatacatgatatgatagaaatagaaaaataaaatatatcagtggagtgtttaaaatgtaatctcacttaaattttattgtaacataaaactttcaatcaaaatattacggattacggattgtgtaattttgttttgcaaatctaatttcatataatcataaatgagttggattgatttggattaattgggtttgaatatttaaaaaatattttttattttttaaaaaataatactttttaataataaattatttttgtctaaagttttttaaatatgtaatgattaaatacatttaaaaagactaaattgtgaaaacatttgacttatggattaaagattttaatactaatacaatattcttattttagatagaaataaaatataatattagtatgtgaaaatattaacaaaataaaaataagaataacttaaaaagaaagagaatcattggtgttttaatttaaaattttaataaattatgtgagttcaaaattattaatatgttttgtatttaataattaatttatatataataaataaaattgtataattttaaatatcttagaaatccaagtcattgagttggtttgggtcacgactcacgagcacaatgaagattcctaacacttataatcaaagtttatatcacaattataatgaaatgatacaaaaaaaattgagggtgtttttcttaatagaaattaaaccctaactagtattatttcaaaaaggaaatgattttgtgtttttttaaaataaaaaaaggcatacacatggtattgcaatttgaccgagactcaaggaccaccgctaccctccaccctaaacatagtggtgcagaacaaaaaaagcacctaattatgcatcacaaaaatggaagctaacaattcatagctgttctgttctgttcctatgggatactaccatcacaaaaggaatgaccgtctcatattattatcataattattataatattccattcgctaccttcatttttctcggagtttcaggacgtggctgcagtggtggtggtggtggcagcgacagcaatggcgcaaggcatggcgagtaaccgcaaccggaacgcgagcgcgcaagaagcgcgcaaggtgatggtggtggcggacccgacgcgggaatcggcgggcgcgttgcagtacgcgctcgcgcatgcggtgatcgagcaagacgagctgattcttctgcacgttgagaaccctagctcgtggcgcaacaccatatcgactttcctgaagatgccgtcgttgggaagctccaccactacgtcgctggaccttggaggagggggagccgcggcggatggagaagggttcgattttctggaggagatgaagcatgcatgcagtgtttctcagccgaaaatgaaggtgcgtgtgatgaaggtggagatcgatggaagagacaaggctagcactattctttctctgagcaaaacgcatggggttgatgtcgtagttattggccagaagcgcaatattacttcggcgttattagggttagtatactacttcaaactgctatttaattttctgctggaattattcattcttatcaaaaatgcattgttggaactggattataacgccaagtaactttagattaaggggtttccgctatagcccaacacgggaagcattcagtctttcttctatctcattttcatcccatttttttcttaaaattttcctatttctttttcattctatcaaccttttttcttttctctctatctctctattttccattccaattcaccccaaaatgggattatatttgagatctactttctgtattttcttaaattcttgtctcaatgaagagaaagacagattcaagtattgtttccatagtgtttgattaaagaaaaaggatttttaattttttttttatatatttcatttacaagtttaaacaaaggaaatagaagaaaaaagaatcaaaattcttcctctgtctcttttctatctctgctttgatatgagatttgaaaggaaagaaaaatgtataaagtctgtaaccttttgtgactggattatttttaatttgaatacttaatagtagaatttaattagaatgtactaagaacagcctacttttgtaataatttaaaattatttataattaatccattatattaatacaatattagttaattttctatatgatagaatccattaatttcacgtttggttcatgatcaatgcattaaaaaacttttaaaaggaatttacatatgtgcagtatgtagttgtagaatgctggtgtagaagttaattttatgttgctaacttataattcttcttttgtgtttgaaatttgaatgcatggcaacagatataagcgacctgctggtggatctatgaaaggggtgaaagcgatagacactgcagagtatttgattcaaaacagctcgtgcacctgtgttagtgtacagaggaaaggccaaaatggaggctttgttctcaactccaaaacccacagaaatttctggctcttagcctaaaggcttcacacaccccatggccatggatggtagacatttttcattacggcttgaacatatcaatttcgctgaggatagatttaggagaaacttttaaatagacatcatatcatatattattattacattattcattaggcactcaaatcattataactcccagaaacttatatgggtcacatactaataatttgagtgcttatgatcaataatgtctatctaaaagttattctagatgtagtgaaattggtaagatttccccgtaactttgttgtttggcaaatggtgagaatcccatggatgttatcccagattacctaaaaacaccgatctactcatcttaaagacgaaaattttctgcttatctcaatgtttccaaggagaaaattctgctaacaaatgtcataaaaatgttagttaaagaattaatcaatagatagattaaaaatcacagtgtgttgcttgataacattaaatgttaaatttttacaaacttttcactttggatttgttagcaagtgttcttaacttactagccagcaatctattatttataaaaggacatacacttaataatggaacaacactctcattctaagattcctccatgtatggaaacaccctcggagtataaaaaggcagaagcttatctgaaactcgccagatcacagttctgaaatagacgtggataaattttgttaaaatatttgcatattcattcatcagattctaaaagcaaatctgatataacgaggccccaacgcaaagcttctcttgtttaatattaataagcaaatccgtaaagtcaagccttctgtgactgtataaaagaacttcatagaagcagacaaagcaaaacaatccttatttcatttgatctcatttgaatataacagaactattgttgctttgtaagctatgagaaacaatttaatggaacgaaaaatttacttatccctttgaatctttgatttcaacctttcggttttaatttcatgttttagtacacgatccgtgatgagtactcgtgtatatcatatgagaaaaattcacatcaagagaaaattaaaagcttaaaaaaatacacttgccttcataagttcagtgcacacaatttaaagaataaacaagcccgttgaattcttcaatcttcattacgcattatattgacgctgttgatgaacaaatcatgtaactcattttctttcaacgggatcaccttcctccacatccaaatttccaccatatgaagttatgaagttctcaacataattgaagacgctataagaaaattcagctccaagattatcttcaggaagcaaaagttccaccaacactatgtatcactctatctgttgacataagaatttcatttttcaaaacacctacaggacgctccaaatgttgaaaacattccaattgtgtgcaacttacaccaacagtaaacaccttcgtacttatcatagaaaacccacaaatctaagtgtcgtgccatagtttcagattctgagctaataatcactgcaatagaatccttgtacacagcaagtttttacgcgtgttgaaagaaataatcatttcgttactaaccttgtcactcacctccatagccacccaaaaacaaagtttcctccaacgtcacactgttctctgtccaaaacaagcatccattcacagttacacactgattactactatatggatacacactgaatatttttcaactcgaacagcacaagtttggtgaaataaccaccaaaacatgcattgtttgtcttcccaaaagagtgaagccttacttaatcaccatcacttgtgttgaaatagaagcctatgagacaatgtggtggcatcttatgaggaagcaaagcgttttgtggttccatgattcgcttggtttgtcttgtagctgggttccaaagaaaaatggtagagctttggtccaaagaataatgaacgacacaaagtaaaccgttacataaacccaccaacttgaaacccatgtcagaatctgtgacttttggaacatgaagttgtttgagcttttttcttttgacatctagcagaaataagtgatggccgcagattttgtccttccagtgaaagcgatcgaggattagaagtgtgtctcttcgaatgaagcgaagaaaatggtttgagatgaaggacttgacactggtcagcaaggacttcattgatggacttttgagaatgactttgaatgtttcttcttgttctaatgaactaggaagaatttttcatctcatttagaagagttgggtgctaaacatgagaagaaacctttttttttttttttttgaattctgaattttggattatacagtactactgtatcagctctaaagaaatactactagtactaggcttaattttacattaaaaaatttaaatgagcattgaaatcaaaagggtagaatgtgcagaagcaatttggaatttcgaggctgtcttgcaatgtgagtcatattgctagtaattggtgagttgatttcatttgatgaatgatgatggcttggtggaagtggaacaggttttaagattagatcaattggcggaaacagtgaacctaattgatctctgaatgagggatatgataagttacaagttaacgatgattatccacctcaataccatacattcaattttgtttcttaaaaatgaaataatttccatatgttctccttttctcatgcagctaggtgagtaggtgcctttttcatcttgtgagatactgattgacttgagtagaatttgaaggaaaaaaaaaactcactctgctctgatcacttgagataaattagattagattagtttcaatattttttttttttctcaactaactcaatctaatcataatcaagttttaaatttagactatttagtcattaggttgtacacttgcacataattaactattttataaaaaaacaagattaaaaggagagcaaagtttcatactatatctatatttaataatatgtttaatgtttatgcaccaacggtataaaacaattttacattgtcattcaatcataaatcactatatgaattattttaagataattattttaaaaatcaatatacttatcataatggtgaattataattggatgattgtaaaaaaaattatattgttagtgtatagcccattttttcttcaattatttgtctaatttttaattttttgaaatcatatttataaaagaaaaaaaaaaagataaagataaaagtttggatgtgtgatcaagtttgattgggtctaacatgcaaatcttacctatttgattatattaagcttaacacaattgatctatataagattatgaaaaacaggtggtttgaatttttttatcaatttttttatcaattaataggatctaactgctagatcctattaatatatggatctaaaaaaatttcatcatcacaactagagggagatatcatccattcctcctctttgtgaagaattacctcaatgtcaattaaattgaaataattctagagaaaattgaacaaaatcataggacaaaggactagggagctaagtaaaaatcgtttgagaatcatgtggtaaggtaacaataaaataggggcctaaaactattaattgatcaacctactttatttctcaaacataaatagtagtagttatttagttatattattctacaaaaagattcacacatttcaaaaaggaatcaattatattagcaaaacaataatatcatattccgtaaaaaaggaataatatatcaaaagtacaaatcagatgcaaatgcatgtataaatacagaccttgtctccatggaaaatatcccaaatacagtatggagtaacaatgtaacatgatcaggaagttatacttcgctaatccagatcagttgtgaactcatatttcacatgtcacgaatgagcttcaattttcaaatattgcaaaagtaccaaaatttccattaatgtaccccagaaaaataactgcaaaagtacattgtactaaaatcatgataaagtgtagtagcgaaagtagctgataaagtgccctacacatacggctctttcattctatacatacgacaatttcatgtgtatatgttgtattgataaaatcctaaaatactacgactaaagctataaaagactacagaaaataacataaaactgaaatatttcattcattgattaataatatgtaaagagaatacatttatatagacctaagtaatgtcaattaataaataataattatgcaagtgttttttttttcctttactcaaaatttaggagaaagaaatgacgtcccaattcaaaacagaaaaaacctattttaacacaagtaaaataaaaattgtaatttataaaatacatatttaactccatcttacatgacccttcaatcattttattttgggcataaaatccattctatcacattgtcactgggttgtgatcaccgaacgcagcagttcgtctcctaaaatcaatctgactttgtttacccattgttctcgtgaaatattttgttcctgactccaaacagattaaattttaatcagttactgcaaatttttaccttacaaattaagcagtggataaaaaaacacaaaacacaataagaacctgaaagcaagacaattatttaatattgatcattactttgaaaatccggtagtcttttgagtaacatagacatttgtgctggtttcaaatggtttgaaacccttgccactatatcgggaaatgacacatatggtgattgaggtttccgtgccccatgtatctctggatctgcacaccaaaaccaagaaatgattaagccttgatccaagcacttgttacaaatttgaaagagaataactgcaactatgctttaatatactctttctaacatattatttattattaatttgaaattattgaacactataaaatcacaggcaagattatttaacaggaagtgaaagtcataattttcaatcaatttcagtaaactactaaaaaataaaaaactacttacctcattgttcggagggtccacgctatacgcagaccataactaaccgagagagatattgtactcggtcttacccttgaatattcaaagagactattttcaaattcgaatatccataaccaacaaatcactaagacacaactttactactgagtaaacaataacaaaatttatttaaaaaaatgaactagggaatattttatatactcttaatataattatacttgaaacttataatataatttggatgaatgtgtgtattcatataagcagtccatacaatatgtcttctaggtgctgatatatcatccaccccagtgtcatattgcttagaactaggttggctccttccctaatatcaccttgcatagtagcacatgcctaaaaccatgttcatctgccacggtacacatagcactgtgaattaaatgaacaatttcttagctctatttccacatagacataaaattagttttttttatagacaaatgttagtgtattagaatgtcagttttattagtagagtggataaaattcataacatttttttttatcttttcttctttcttaaccatcaaactcaccttatatcccctctcaactctattttcacatagacataaaattggtataacaaaaatagaattggttcatagaaaacattattgcacacttgcacctacctatcaatggaaaaattggcagcaaataaaggaatagcaataccatgacactcgtctttatcaccatctcgtaatggtttcgtattcttcactccttcaacttacattaaccccttcgtaatcgagttctctattggctgctgcatgtttatttatttatttattccgatacaataagatgattgatatgtaagtaggctatatttgttttgtgcacttgtaacctcaatatgcgattagcaatgcatgaaagaaagggttgaatatttatgtaatttgtcatgggcatgaacctggaccaagctaaagatgtttccgtgatgaaattatatttataatttcatacccctcagtttaatggatcctctctcatgtgaaaatcttcaccattaactgaataattaaaatgacataactaaaatttatttgatacgaaattaaaaaataataatactaagcaatatttttttgctgaatataatactaagtaattacaattacataaaactaaaatttgggaatttaatattgtaacataaaattttaataaattaacttagattttttagggaaaaaatactgcagaagaaaagtttgttaaaaaaaactattacaaaaacagacgtgttcaaaatgagaattttgaatttgtaatataagaatttttttaatttgtaatataagaatgaatatgttgataaatgaaaattgtgtgattccttgtcactatcaagcgtgagtgattctctacattggctttcttaaggctcaagccaaagcagtgatgataaacggtaacagcttccacattgcatttcacaatgcaaattgtgagcacctttttcttttctattatcagtcgtgaatgattttattttattttattgtttttcaccttcctagttcctacttatcaattactgaattgagttgtgaatccgttgtcaaaacaaagttgaagactcccattagatttttttcttttaattttgatgacgagttagcaatagcatccattatctggacgtctctctctctccagaaaaaaaaatttccttaattttttccttatgataaataaacaaaacctaattctcatcattgacaataaaaagtttcttatgatacttgaaatgattttatcatccttaataatgatgataattatatatttatcacatttaaaactatataaaaaaacatgcagtagatgtacaatttgctaatcatattaaaattacaagtttagataaatataattttactgaattttatcaacacagttgaacttgttaatcgatgaatcttaacataaaatgtcatcccgaattccattgatcctattcgatacaagttcagctatattcatctaacttactatttttgccgcccgtactatgatattatctatcatagccaggtactattgttacattaacaacaacgataaattatagttagcatgtattagatgttcttatatatatatataagaatgtgtaagaagatgttctgagctctcataatatggaagaagattaaatggcatcataatcccattcgcacacgtatttagttcttattactaccaacgaaacatcaaaatttcacaacccaaacactgcctcagaaagacatgtacaagcatgcaaccagccaatgcatgaccaaaaatgtttgcctaaaatttgttggaatataaaatgctaagatttaaataaacgctactttcagaaaaataattagaacatttttccttcaagaacaagggcattgaagataaaatgcagataccctctttaaatgcacaccagcacaacctgcaaaactctcccttttctaagcactgggaagtagatgcctcctagattcagttatactttaatcctcatttcgactttcatccttgacaagcttgatcatgtcatcaattcgaaggatagtaatagcagcttcagtagcaaactgggaaaaaaatacaacttatcagacagctgtataagaagaagctgtatcttgaagtcaagaactgttgatatttaactcaatacatacctgaataatttttactttgctcattgcaggctcaatgactccggcctccaagttgtttctaattttcccttccgaaaggtccaaacccatactggggggaaaaagagcaaaataataacaataattagcgagatagaaaagaatgccaaagtttatcaagcatcatttcatatgtattctccattgttacttttctctaatattcattaacgtattcacatgttggaataatacctgaatctacatattatgggcagatgcacaaacttattttacctgccaaattcaacatatcctgccctatatttctccttgcacacaacacccaaataaccaaaaatatggcacatgatattgcaaaatcacgtgagtagcttcatgtcaaatggttacgaagttctgagtgagtgtgtgcataataatcatatacgatgaattaccattccaacacaggttggaagaaatactaatgtttaaaatataatggcacaacaaagataaattcaacaaacagacccgaagctaggaagaagataaatacaaaggaaacaatatagttactattactagtaagcaaataccttgataaatgtttcttatcggctttagtttgtgctgaatggtggtaggcccgtaatttcgcgaccagctcagtggcatccttagcagcattaacagaaagcacctgcaccagttaagtgacaccaacatatacattgtcagtgcttaaatgtttggaaataagaaccaatcaattaaaagtgtctcaaaagagtgaaaagaccaaatatttaaatttaaatataaagtcaaaaagtaaattgtttaccacactaaccccacatgaaagtacactagactaaaattacagaatttaattattggacgggagatgaagacaaaactcaaactttacaccatgtgttcaactaggcccaaccaccctagttatttgtaaaataagcagaagacccaaaccttaagccattaatttagcttgtaacttaccttaggaatgattaacagagactcagcaaattctgctatagccaactgctcccgagatcctaacgttgtagcaaggtactccaaataaactgataatgctgcttcaacagcacctccaccagctaccacctgaattttatatattaaaaaaacaagcacaaggaaggcaaaataaaaagacatcatttgaaaaacttaatctaaagcaacattttgatttcaaccaaagtaggattaaagctacgtatgcaggataccatatttgattcaagagttctcttgacaatggacaatgcatcatgcagagctctatccatctcatcaagcatatggtcatttgcacctcttagaatcaaagtgacctacagaagaacaacacagaatcaggtgataccgcaagctatccacaatgtgcaccagataataaataataaactatcagtgtccccccgtacgagcatgcgtgtgtgagaagatgatgagtaaaaaatatcatatttcttaaaaaaatatttataaatataattttaatagatatccaaaactccttgtgcttttctgtctacaaataatctacaagttaataaaaaacttactgcacttgtagttttggtccctttgatcataactacagcatcatcagaaattcgctcctcaacaacctcatcagcagatccaagaaaagatggttcaaatgtttcctccccttccatatcagcaaatgttgagacctgtgtcaaagtaaaaatcaagtccaataataaacaaggaaatagtattcaaaacttctatccaaaaaagaggatactatacaagagactgatgttgcttgacaaaaaatataaactgagatattgttaacacagaagtttggcattaatttcaaggaaagtcaataactattaggggaaggataaaaatgcaaattgaaatgaatagaatcgaggataatgattacttctctggttttggcattttattaactacaaattcatccctcgtggttgctaattaagacacgaagctcttcttttttgtgccagaaggtatttaattacaaaagagaaaccaaaatacgattaataaaatgccctagcaaccactatttaagtaatgatcaggcatatataaaagagaaccatcttaaaacatcaagaaacttaaaatgcaatgaaattagaaaaaccattttactgccagaatgattaaaagatacagcccaaaatgaaaataaatcccttcaccaatagagacccccgggtaagacaaagattaatttagttcaatttaaatttgacattaacatcaacatcaacatcaacagcacctttaacccaaattaattggggtcggtggtagatnnnnnnnnnnnnnnnnnnnnnnnnnnnnnnnnnnnnnnnnnnnnnnnnnnnnnnnnnnnnnnnnnnnnnnnnnnnnnnnnnnnnnnnnnnnnnnnnnnnnnnnnnnnnnnnnnnnnnnnnnnnnnnnnnnnnnnnnnnnnnnnnnnnnnnnnnnnnnnnnnnnnnnnnnnnnnnnnnnnnnnnnnnnnnnnnnnnnnnnnnnnnnnnnnnnnnnnnnnnnnnnnnnnnnnnnnnnnnnnnnnnnnnnnnnnnnnnnnnnnnnnnnnnnnnnnnnnnnnnnnnnnnnnnnnnnnnnnnnnnnnnnnnnnnnnnnnnnnnnnnnnnnnnnnnnnnnnnnnnnnnnnnnnnnnnnnnnnnnnnnnnnnnnnnnnnnnnnnnnnnnnnnnnnnnnnnnnnnnnnnnnnnnnnnnnnnnnnnnnnnnnnnnnnnnnnnnnnnnnnnnnnnnnnnnnnnnnnnnnnnnnnnnnnnnnnnnnnnnnnnnnnnnnnnnnnnnnnnnnnnnnnnnnnnnnnnnnnnnnnnnnnnnnnnnnnnnnnnnnnnnnnnnnnnnnnnnnnnnnnnnataaaaattatggaggataagaataaaagaaaatataaaagattagaaactagagttaacatttaaaaaatgttatttcaagtagctttttaaaaagtgtgaaaagctactaaaaaaatttattttccgaataggcaaaaaaattcaattaataaaaaaattaaaaactaactataatattttaccaatcataaccttagtcttttttctcttttttaattctataatttttagtcttcataaatgtttttaattccatgttaatatattttgacaattttaaattatttttataaaataataatagtagatgatttgttaattatgctttactaatttcttttactaaatataacttaataattacttttaaatatatattaaatattgaatgtagtacattttaatttaaagtaaatttatattgttaatgtgatattttttnnnnnnnnnntcttgggtacctcttgcccaagcagatgcactgtgtcttgctcaccatctttaatcctcgaaaactcacacttcatatactccgtcttgctcctacttaccttgaatcctttagactccaaagtgcttctccacaattccaattttctattaacgtcatctttggtctcatcaataagtactacatcatctgcaaagagcatgcaccacggcacttcttcttgaatatgacattaacaatgttcatatttcagaatgcaaaagggtttcttgggatggcaagcttttaaaaatctaagattttaagcaggaaatattcagagtcatcaattgttagaatgcattgaatcagtcgcattcccaccaacccataaaaatagcaacaattttttgttcaactagtaaaaaggagttaaaaaaagaaggaatggagccctatctaatcaacactttattatgacaaatattcagctttactgtcaacttgctaacattgcaatttaaatttataaaaagaaaaaaggaaaaaaaaggctaccaatgttgcaccagtagccttggcaacatggcgcatgtcctctttccgcacacgtcttacagcaattgccccagcctcaacaaagtactgaaacaagaataaatggtcagaacaaaatgcataaattcatgactttatatgtcattcatcagtaaaagaacatgtatcttgaacagagaaccacaaaatccatcaatgcaaaaggaagaaaaccagaagtcatgtttaaagatccataggcacatatgtcaaaaatttggtgtattttcatcattctgaagttagtaaggtcaggcatttattccctaaaaatggaccttggtaactgaattcacacaagccacaagggttataacttcaaccttttgtaccatttggtcctcagttttaactatagtccaatacaagtaatgataccgcaatcaaaaaaaatgtatagtgaatgaaaagaaaattttaagtaaaaatcctatcttctgtcatgtcatgagttcctgggtgtaatgcctcatccgctaaaagtattaaaaactcccccatcaaacccctaatactcagcttgaatttcccctaaatcgataaattccatcaaacaccaaactccaatctaagatgtgaacttcacacacccaaacagccaccaaacaacccttgtaattgatcaggatgagtaatttatacaagggttaaaacatgacatgctcaactgtcaacagatatatattatcatataatacaaaaagataaagtcaaacactttctttgacagcctaaatgtaagattataactaaatcctcttgctcgaagaaatatatcgaagaaacataccttaagagccatgtcatcaattcctttagttgtcagaataacattagctccagccttcagcagttttccaatgcgttctttagtcatatcggcctctctgcaattagaaaaaaaaggccattagtcaaaatgtattatagatattactttatcttgcaagacgtatggatggagaattgtcccaaacaaagcaaaagcaaattcccacaatgaaacttaacataagctggcttacacaattagaacaatagtctttataagaactacacaaatcaataactaaccataatattttgagtatttagcttaacagggctttggattgatttcatgcctatcatccaagttttctatttatgcctattttatacagctcttagaatgtgggtttgggcctaactcaaccccaaaagctagctaatggggaaaggttgccccccacttatatattctgtctttgtcttatttctagccaatgagggacttgggtttttcccaataacagcttattttcaataagataatagatttattctcattatatttaaggaaaatgaatccacaaaagttgggtatcatagtaatatagaacccatataatcatactgacagtacctttgacgaattttctctagttccctaggatcagtaactaaaacttgaacacccaactgcatttttgtcttctgaagattgaaatcaagacaggcaattcttgcaggggcgaccctaagaggcattccttgagcagcacggccagtatttagagcataaccattcatcaaaaagctgtctctagcactttttccatgagctttcaagatattgattccctgaagcatgaggcacaaaagaagcaagaaattaaatcaattcaaatcctatgaacattaaagcaagtaagaagcaagattaaaatatatactacagatgttcttattgcgcaaattggcatctttcatccaggaaaagaactgaaatcacaggaattctactaccaaccttgattgggtatttaacttcacctcgagcattggtcatctttacagcttgcactgcgtctacaacctgtgtaaattgcacacataagtcaattattagtgactacctatacctacagtctacactctacagaccaaaaaaaaactgtcccaaaatagcagttatagcatctttttcgcaactaatccataacttcagaaaataacccttcataatgaaaaacagaggtttcaaaaatcacttagaccatatcccaaaaattcaatttattgattataaaaagtctcctagtaccgacaacaaagttttatttcagtttcgtgtgacagcacacatacttccaaaccaaatatggtcaacaataaacaattttacacatttaaaacacagtagaaacagatgaaatcaagaaatatttgaactcctttcctctaaagcagaaagaaagtgtcaaatctagtaaggttaggagattttttattttacaaaaatcaggattcaaatgagatgaggattgaaaagaatatagctttatcaatatcaagttttcaattactaatccaactaaatattgatacaagaaacagaaaatgcatataaacttcagtcgattggatatgcgctagaatttgcagaagcagcagaacatggtgtgcatcaatcatgtgatataaactctcaacattctatataaagccaatgcaattacaaacataccaaactggcaaagaagtcactatcaccagctatcaactttgaggacatactggtcttggcacagttaattagtgaatcctttcccagcttttcaacctaaaagtcaagagaaaaatccaactgagtaacacatgatatacaacaatttattaatatttagacataacataacaatggtcatatggtccaaagtaggtttttcaaaatataaaacagggaaccaataaccaagagatgcaagctttcgtcctcagtcctcacatcccaaacttcttttgcattagttaatgattgtatcattgatgcaaggaagacatgaacaataagcatacatattgataagtagtgtgatattattgggcaatgggcatatttaaggaaatctaatcataagaactcataatgagtggaatacagcatacaatgactctacacatccatgactgcaaaaaatgtgaaagaacaatcattatggaactaacatcattggcattcaaatattctaacaatgatatctatcgacaatcaaaggaggagagaagagaccagagaagaaaaggttcgggccactgataacttaagcttaaaaaatatgcatacaaaataaaaaagtttattaaggagatcttaccttgacagctagtttttcttctacatatttacaagcctctcgcatagcaagctataaagaataatcaacataaagagaagttagttaaaccatgcaaattcgcaattcaaatagcagaacagaaaaattcataatggtagctacaaagattaaatatagcaatagacaattaattaagtttaagaaattattaaaagacacttactctatatccactgataatcgaggtaggatgaatcttgttcctgacaaggtcatttgccctctgcagaaaagaacactcgcactcgttagttagttagttacatctgagacaaacacaaaaacaaagtgccaaccaaatagagagcgatgcggttactttgagaagctcagcagcgacaatgacgaccgaagtagtgccgtctccgacttctcggtcctgaagctcggcgagttccaccaaaacctaaaaagcaacacatgtgagtaataaaaagcaatggaacgagaaaacagagaaagcgaagagcgagtggagtgtggttcaccttagcagcaggatgctccacttcaagcatcttgagaatcgtggcgccgtcgttggtgatagtgacgtcgccaatgtcgtcgacgagcatctgaaacgaatcgcatcagacattgcttacttcgtctaagatctaactatgtatagagagagaaagagaaagagagagagtgagagtaccttgtcgaggccaacggggcctaaagagcttttgacgatgttggcaacggcttggcatgccacaactgcattcacagagattgaacgatgttagaaatggttgttacgtttttcattgtgaaaaaaaaggagagagagacggtaccgttttgggtgcgaacgtcttggccggactgtctatcgccggcgatgtcaggggtttgcgcaacaaccgccattgcgaagtgtgtagtagtctagggcttcagtcgcagagggttttggttttttcaacttcgcccttcctttacttttctttttatgctaagctatgctttcttttccctcctccctctttatttctttctttttcactttcaactccaagtgcattttttatttaattatgaaaaattaacaataataattatattttaaaatgagtttatgtagattttatcagaaaatttataataatttacagatctcaaacaactaaattagaccctcttaatgtttatcttatttatttattcttttttaacatgtaataataatttttacattcgattaaaaaataaaattgcataatatattattaatatatcttgagagtaagaaatttaatgtataatgattttttttaaataaggataatgatttgataggttatgatttaaaaatatatatatttaatttttctatttatatataattttttttaaaccaacattctgttatatacttttggacatgattttcactcaatttctcttattttacaatattaaattcttaaatttacataacaaatcaagtgacaaaaattaagtttgttttttatatattatgtaatttgtataacacggattttttatacattttttgttttgtttctattttataagatattttatactaataatttatgttcgataaaattagttaaaaaattaactgaaaattataaagttagttcaaaaattaattggtagttgaaaaattaatttattaatttataagtgttagtaaaattagttgttgaagtagttnnnnnnnnnnnnnnnnnnnnnnnnnnnnnnnnnnnnnnnnnnnnnnnnnnnnnnnnnnnnnnnnnnnnnnnnnnnnnnnnnnnnnnnnnnnnnnnnnnnnnnnnnnnnnnnnnnnnnnnnnnnnnnnnnnnnttttatctatgttatataattaaagtagtatgattttaaagtaggtaaatatttttaattctatatattttaaaaattattatacatttatctggagttataaggtggattggatcattaaagaaggaggaaagcgagtaaagataactgagtttgatttcctgcttgcaaaattaacagttctacttctaacaactaatattttttttttcgaaaaaattattatttatttttatattaaaatgtgcatgaacctaaatgaaaaatatgctcttgatccttttgttttatttcttacttcgtactattattttggtagaatgactcacaacattcttatgattatgtttaaatattgaaactaaatgttatggaaacgacaaatattcttctatagnnnnnnnnnntaaaaattatggaggataagaataaaagaaaatataaaagattagaaactagagttaacatttaaaaaatgttatttcaagtagctttttaaaaagtgtgaaaagctactaaaaaaatttattttccgaataggcaaaaaaattcaattaataaaaaaattaaaaactaactataatattttaccaatcataaccttagtcttttttctcttttttaattctataatttttagtcttcataaatgtttttaattccatgttaatatattttgacaattttaaattatttttataaaataataatagtagatgatttgttaattatgctttactaatttcttttactaaatataacttaataattacttttaaatatatattaaatattgaatgtagtacattttaatttaaagtaaatttatattgttaatgtgatatttttttaacttgtttttacttccaaacaatattgatattaataatcagagcttaatggtatgcataatgcattgtaactttttacatcgtgaatcaaccaaaaatattgttaaaataacttttaaaataattgtatcacataaaagtcaacaaattcagaatactattatgatttatagataaacaatagtacagtataaaatattgtgtcctatcattaagtaacttatttcctcaaataatggtctggtttagctttgggtgagccaaggctcgtggatctacttttgagctaaaagatggtgattcttaacgttgatccaaaataagactagaattgaagtattttcaaaagcatttcaacactcattatgtgtttggtagtgttaaaaaaataaaaaaaactaatgaaataaaattaaggaaaaatatttaaattaaaataatatattagaggtgtgagactcgcactaaattttgaaataagatatttttgtaaaataaatttgtgcaattctgtttcttctcagttatatatataaaactgattttatctatgttatataattaaagtagtatgattttaaagtaggtaaatatttttaattctatatattttaaaaattattatacatttatctggagttataaggtggattggatcattaaagaaggaggaaagcgagtaaagataactgagtttgatttcctgcttgcaaaattaacagttctacttctaacaactaatattttttttttcgaaaaaattattatttatttttatattaaaatgtgcatgaacctaaatgaaaaatatgctcttgatccttttgttttatttcttacttcgtactattattttggtagaatgactcacaacattcttatgattatgtttaaatattgaaactaaatgttatggaaacgacaaatattcttctatagnnnnnnnnnnnnnnnnnnnnnnnnnnnnnnnnnnnnnnnnnnnnnnnnnnnnnnnnnnnnnnnnnnnnnnnnnnnnnnnnnnnnnnnnnnnnnnnnnnnnnnnnnnnnnnnnnnnnnnnnnnnnnnnnnnnnnnnnnnnnnnnnnnnnnnnnnnnnnnnnnnnnnnnnnnnnnnnnnnnnnnnnnnnnnnnnnnnnnnnnnnnnnnnnnnnnnnnnnnnnnnnnnnnnnnnnnnnnnnnnnnnnnnnnnnnnnnnnnnnnnnnnnnnnnnnnnnnnnnnnnnnnnnnnnnnnnnnnnnnnnnnnnnnnnnnnnnnnnnnnnnnnnnnnnnnnnnnnnnnnnnnnnnnnnnnnnnnnnnnnnnnnnnnnnnnnnnnnnnnnnnnnnnnnnnnnnnnnnnnnnnnnnnnnnnnnnnnnnnnnnnnnnnnnnnnnnnnnnnnnnnnnnnnnnnnnnnnnnnnnnnnnnnnnnnnnnnnnnnnnnnnnnnnnnnnnnnnnnnnnnnnnnnnnnnnnnnnnnnnnnnnnnnnnnnnnnnnnnnnnnnnnnnnnnnnnnnnnnnnnnnnnnnnnnnnnnnnnnnnnnnnnnnnnnnnnnnnnnnnnnnnnnnnnnnnnnnnnnnnnnnnnnnnnnnnnnnnnnnnnnnnnnnnnnnnnnnnnnnnnnnnnnnnnnnnnnnnnnnnnnnnnnnnnnnnnnnnnnnnnnnnnnnnnnnnnnnnnnnnnnnnnnnnnnnnnnnnnnnnnnnnnnnnnnnnnnnnnnnnnnnnnnnnnnnnnnnnnnnnnnnnnnnnnnnnnnnnnnnnnnnnnnnnnnnnnnagacccacctaacctgccaactgcgaagcacaagatctttaaggatatataagtaatgcaagttatctcatacaatgattgacatatatcgctattcccctttctctagtaaagagacattatcaagatgttctaatatgtcaataccacattatcaaaatgttctaatacgtctttctttaatttttttcctattaagattaactgcaaaaacattactggttctctttaacctcaagcacattccaaataacttagttccaaatacacacattagtacaaacttttagtcccaaaccttcaaacacaacaaaccataaaataatacaatccaagctattttttatcgagtttcttgcaataaactaaagaaagacaaataaacatttatttttcacattcaacaggaattcttacacgcacgaaagaaaatatctaagaaaaatactcattagaggcagcaaagatggattgcaatcgctgatacacctcgttgtttgtccactccaacacatcccaccactcttgctgccctttaatggactttaagttgactgcattttcactgtctagtggtaaagttttcaaattaggacagttatgtatccttaacagctccaaagaggaccaagccaatgtatgagttgagcatatagttttgaagttaggcaagttaaccagcagaagtatttctagttttggaagcacatccctttctctttcaatgttttctccgataagtacttcaatttttgaacaatcttcaagttttagattttgaagttctgaaaaatgttgaattgctccattgctgaaaatgtcactgagtgatggacaattattcaatgacaaaatttgtaatttggaaaaggttccactgtgcaagggacctctaaaaacacgtcttaaattgagcaaattttccaaatataattgctccaaatttggtaagatgactcttgtttctatttggattccattcatggtgttgctacttgtatcggctgacacaattgttaaaactttgttacatcttgtaatcaaaagaccacgaatgcgttccaaacacactatgccagcaaaatttgtcaatttttttatatctttatggcaaactaattcaaatgcatcagtttttggtagtacctcaataattgccaagtcatccttctgtccaccattgcagtacctcaaataattagtaattttatactcaaaagattcaagtatttgaggtcgccttgtgttttggcatcccacaaagaatttaaatgaatttagctgcttacaactccatgatttacttcttgaaagaaattctccaagaatgattgaggagggaaaacaacatatgagatgtgctacattttccagagaagccacatgttgtaaaacaaattcagcatcatcgcaccattgttcataggatatgacttgaatggttaattcttccaacctatgcagctttgaaatcacatgaacattttgagcttcattatcttcacttgcaatgaatgggattcgcaggcatcttagattagtcaaacatccaatttgtagaggtatgaatgttactttagtatctcgtatgtcaaggacctctagaaattgaagtgatccaatttcagatgataatgattccaagagctcgcaattgttcaagaataaactccgcagacaagtcaattttgataaagacgatggcagttgtgtaatcatgctattatacaagtctaacagaagtagactgctcatgttctcaaaaaaagttcgtggtattgtagttagttttggattttttctcagcaacaatgtcaaaatcatgctgcaatcttggcttgttggaaaatcaagcagttgtctcatagagacccacctagccttctgccaagctcttgaatttgagagattttcagattctccaccatcttggaggtaaaagctacattcaggatctttagaggatatgtgtaatgcaagttgtctcatacaatgattcatgttgacatatatcattgattcccctttctctagtaaagagacattagcaagatgttctaatatgtcaataccacaattgcgtgcactttgatatgaccttttgtcatttatatcaccgagtaaaccttgtgctgcccaacactccactaaataatcagtgtaaaccttgctatttgcaggatacagtgaagtgtataaaaaacatttctgcttttttttatctttgagttcatcataacagaatttcaggcatgagtacaactcttctaaaccttgattttcaagttctggccaaggcttaagatcttcaagtcccaccgaccaacttgaagcagactctttcaatttaaaagaatttgctatattgtaaatgagaagtggaagacgagagcaccttttgcatacaagtttggctataggttgaatgtcaagggaatcaatattaggattaaaggtatgaacagtatctctgaacatcttccatgcttcctcaggagataactccatgactttgatgaccctctgcaccttattcaacttataaactcgagggagtcgagtggcaattaccaccttactgccattgttgacatcactaggaattcccaactgctccaaattgatggcatcctcaacctcatccaaaatcaataaatacttcttcttttctagctctttgtgtattcttcttgcaacatcatcgctatgctccttgtcggtttctatgtccagcatcaaccgatcaacaattttctcttgaagcttatgatcatcagctgtggctttcacaaaaatgacaatttcaaacagtttagcaacctcttcattgttgttgaggttctgcattattgttgttttccccaccccttttgttccacacactccaacgactttaatcttattattttttagcaaacccagcatgttttccaaggcaccttgaagggttggatatccacttatctgtgggacatttaactcctttaagacaggctctggtggtttatcaacaagaaaatctcttaaacattcatccttcttaagttcacgaacacagttgcacttcttctccatctcttcactcagatgtgaacgtcgttgaatacgccaccagggtagcattttctcttcgtatttagctttcagcttctgcacttcttctgcagcatctgataccctgtttgtccacagtttgtaagcattagtggtatctctgtggttgtttctttgaacctccctctctttatccttctttattgcaagtagcatctccatctctttgagcagaatgttgtagttgtcatcaaggtttctggaagacgcaattttagatgcaattgtagtatgtaattctccaaccccatgcgctcctacctctccaacaagaggggctacaacctcaagcccagacattatgaaacttcaaagcctacaatacgttaacaaagaaaataaaatgaaaggttatattcatataatacaccaaatcaacgtatagaaattctagacatcagcggtatagaattttgaagcatacacaaacataggcgctttattcaatatgaatatgtatgtaacacccaaagccaaaacttcagtatgtaaaaactaatgattcaaccttttagtaacacacttgatcattatttatcttttctgtttgacagtaaaaacattttaaatatagacaattacaataaattcttaaattctaaagcaatgattacgaaacacaaaacacaaaaagaattgtatatgtgtgggtgtatagtatatataaaccttgagactagaagtagcaccatttaaaagtagtaacttattgaaactcggacggatccaggaatgcatagggatcggggggggagggggggggggggnttctaataaataattatgtaataaataaaaaagtttcacagaagtatttattattaattttatgcgtaaaactagaaataaaatatacttctagaaaaaaaatcaaacaaacatgaactcaatactcgatttttttattcattttttattaagaatattttctttttcttgtttctcaatccgtccctattgaaactgatatacaaaatgattggaatgtatgtgagggggaatcaggagcaagagttaagtaagaaagattcatgtgtacctctgctgctaactgttaagaattgagatccatctgaagggtgagtgaggaatcagaagaaacagctaagaaagattcatgcatatctacctctgccagcagctcttgtgcacagattctgcaaaatgatgggtaagtcaacgcatgagcagctccaaattgagtctctggtgtccttgttcaatactagtggaggacaggcaccaaccagaataaatactactgattaagatacatttgattattctaggtctgtttaatctataacatctacatttttaaaaaatatacttttgactacaaaattaaaaagaatatttataaatatattcttcatatcattttacatttattattagttaattcaataaatacttttatctaacgtttctaattaaatgatctactttaacaactttgatttcaaataatttgtcatctttaagccattttttttttaccaaatataatatatctgtttgataagtcatttcaaataattaagaacttatttaatttataagtttgttctaccttaattactttcaagttttagtttaaaaaatcacttttaagtattgcgttaacttagaattttttttgtcagatatagtttcaaagctattgaatatgaaatatttagtaaaattatctaataaactaattattccatatatatgttatcagcgtgtgtataattaaaaatgtaatagatttagatagatacggattatttagtattattaggtataccatattttataaaaaaattaaaagagaaaaaattaaatatacaaatataatttgttgaaaatacgagttttattaattaggaaggagtaaaataaaatcatttttggaaattagcaagacaaaataaaaagacaacaatcataaaacttttgtgttataagttatatatttggaaattattgtattttagagaaagatgaaaacaaaaatagaagacaataaattaattattccttaattagttgaaagtgatatacagaatcaaactacataagacttaaagagtggtcagaattgagatccatttcaaggatgaatgaggaatcagaagcaatagttgagaaagatttatgactatgactgtgtgcctctgcgagtgcgagcaaccgtagccgacagatcttcttcatcctcattttgcaaaatgatcgatcaagtgtttgattatcgcttgctctgtttgtttcacaatggattcaagtcaacgcgtttatcacttcggtgtgtggtgtcggctcgataccatccttataatactaatataggaaaaaaagtaaagataaatgctattgcctattgatgattttttaaaggcaaatagtattgattatattaaattaaaaaatatgtatacaattacttttacattttaattcaatataatttttatcatattattaatacgaatatctattaattttatttataactaatcttcataaaaaaaatctaactaatcacatctttacaagattcaaaatgaagattttgtttaccagtcaaactaaagagacttcatcaaatacatttgattatatacgtgaaatatatgattaaaataaatatatttaaaaaagatgaatttattttattatttaatgtgttcaaataaaattgatcttttgtttatactgtgtttaaataaaaattataattttgtttttcaataaattgatctgtataaaaatacatctttttatattttaatttatcagtcagttaataacgaattttacgaagggtctattgccattatcaactgaaaaagttaactttttttttttttaatgaaaggggctaaaaccccaaggaaaaaacactaaaagccactaggaaagatcatggaaatagcataggctaaaatattaacatgtgaccctccgtagtattgacataatttcattaatttgctagcaaatccacaacttgattggcctcgtgtaaggtatgagaaccggaccaactgaaaagctaacaaataaatgaaaattaagcgagagttgaatatagtgtttgacaagtaattacaagtaactagttatattcctcatgaaaattcctttcatctaaaacatagagtaacagaatcacagagagtcagagacagtattgattcttacgatattcttttagtaattttttttttataaaaaaagaccaagacatgtaatgatattgcaaaacgattattatctaaagaatatttgtttctattttgctaaatcaaacattaagtgaaaacgaagatgtttacagccaaggctaaggcatataaataactctgtttaacaattagcaatagcatgtactcgaatataaacataatccaaaagaaatttactactaagattgtaatatatgaaccagaaaggttgtaattgcatccttctctttcctaacccatgcgatatttaattaattctgatctaatatctgttaccacatcctctgcctcatggagtagggcttcaagctctacgacctttcttttattttttgatgaggtctctgcttcggttttctattgataagacagcagtcattgccattttttgaaacaagaacacgacagaggaaaattttaaagatggaacattcacatgaaatatgaaaaacaaaacaaaataaacgcacacaaagtgaatgcataatttaatatgtatgcatctaactagcaagtaaataacttattctgttagaactgggagaaagtgagaagattcaagaaagaaatcaagaacagaaatatctaattagtaatatcctcaccggacaacataacacaaatactagaagagacgagtacgtttagtgataatggaatggcatgtacgttcctattaccttgtgtcgcaaatttatatctactcgaaacaaacgaaaaggaaacgaaaaacaatctatgttgtttcttttttctttttatgccttatctgatttgatttgtttcgcatgcatgtgttatatactttgattatttacgttatatttatattgaattgaatcgaattgtaatttttattttatatttgtttcaaataattttttatctaaaaattgaatcaaacttcactgcaaacactcctatccggctctttgcatgatgcagaccccaacgacaacattgcttatagagttatagtttcgttactaacttggtattatcctttggtaactagttttttttatctttgcatcaacggagcttttaatgttgagtgaggattataaaagttattatatttaatttatatcttttgaaaatgattttttataaatgaatatattcgatagagttttaacaaaaatctttagaattattcatatttctataaacatttaactatttaattcactgtctttaatagagcaaattttgtttcttttttttagttaaaaattataatttcttaattaaattatttttatcacatataaaaatatgacttttgttatcttttagcagcaataagacaatacaattttaactaattatataaaaaatattattttatatcatataagaaataatagtattagtttttaattttaaatcatgttttacaatttattttaagtaatctgtattttacaacaaaatttagtctaaaaataaattcaaatttgctaggcccggtccgattttgaaaaagaaaaaaaaggaatgacaaataaaacaaatgtaaaataaaggaataagaaaatgggattaaaaaatccaaacccatgcaacgtgaaagaaaaaagaaaaaagtgtcttctttacctttcaacatacaattttaaccctagtaaacttgactatttttatggaccgtttgcaaggagagaaattttttaatttttcaaaaaccataggataagaaacttgattttccatatttgatatacattttagaaaaataacctcgaaaaatgatatttcttgaaaatgttttttaatcaattttttatgaaattttttaatgatagagctgaaaatcttacttttttcaagtttaatttttgtctgttataaaaaaataccatattattttttattaaattataatgtaataataattaaaattattaataaaaatatgtataactttttaatttctaaaaatcttatataaaaattattaatgttgaatcaaataaattttatttattaccaaacagattcctaagaatcataatatccggaacctcaaataaccccgtaactaagaatgatgaatgtttcatcattccaactccagcatttcatttcatccacgttttgtttacggaacagcttgtgaatatcttcattttcattgatgtccatctcttgtcggacacctcctaaaccaactatttttctcctccatcgtagcacaatcttgtccaagattcgaactgcccaagtgcccatatagattgtaatggcccctcacatgagcctgcccaaataaattagaaataactaaggttgaatatcaaagcatgcaggtgcatgcgtagtgttctgatgtttgtgaatagctagaaaagatgctgataatttaagtttggatcaagctctttcttaaggtatttatatagaagaaatatcttcagaagtcgatcattatgtacaaagtgatatttaatcagtgaggtgaagtgtgtgaacagtgtcaataaaaataaaagagaacgagaatatgtatattttttcctctgcaagtatcccttgtttataatgtacttaattcatggttagttgtggatttcacttaaggtcaacagtccactatttttcattgtaccttatcactaaacacttttaaaattcgtaacagataacttgtctataatcaactgtttttttgtttataaaaaaatcaaatctctctatatatattcactttcagggtatctttaagtgctagctatatataaattaagaataatatcttttttttttatcagccaaaatgataatatattaagaataatatccatgtagcagtagctcttggaatttattttgttctagtcaaactatgaagttaacatctgttacctgttccttggctactttttgattttggcgcaatgcaaagaaatctttgcgacctccatatatcttccgaatcaataaagcgactggcacgaggctagtgtcttgcgcgacgaatagcggataactattactcgtatttgcccgctctgttatcattgcaaatttacataattgggtaatttttaaaatagatagtttttgaaaatattgtataatattaataattcgtgctttaaaataaaattttctaaaaattgtattttaatacacaactttaaaattataatttattttaaaaaatactaatgtcatgattcaaatacgacttcaatattttatatttttctaaaaacaaaatagtaaaattgtattttaaattactacttttaatattttatttttaaaaaatattaaaattgatatctaaaataaaactttactattttttaaaaaaaattataccattctaaaatcatgttttaaaatatgacttttttttataggaaattgtgttttaaaataagacttaatcatatgtataatattttcaaaatctattaatttttgtaattgtttttaaaaattaccccatgtaaatttgttgctatcatccctactcattaattagacttcgtatcaaatggaaataaacttttccaatctcctaatttgaaaataaataatgggcaaatatgaaatatgagtttcccaaaaataaaatatatgcaatataattatcttgttacctcctaacaaatgtggcgatattttttgcaaactaatattcccataaataaataaattgtgaaataagtattccctaatgttttgataatcttataagtttttattccttgtactttttgaagacttgaacttggttttttaaattttattttgtttatgattttaattatttttatttattttagatattaagtgatgatatgatatttattttattattattttaatttaaatataaatatattttttatatttgaattttttatagttcctacacattatatttgttttgttttttttatctttctgaaattttagataatatttttttatggttcaaaatattatttaaaatactttaaaaactaaaaataaaacaaatataaattataatgattaaaaaaaacaattgtacaagaataaaaagataaaaaaggataaattataagtaaaagaatggattcaaatttttagttattacgttttctgacggccaaaaacgaacagaaattgaacgaccgaaaattttaaaattatttcttttttccactttggccagagtcattttctctgctcctatcccctccgacagcggcctcttcacgcacaccgagttgagttaatgaagagaaagcggaagcggtggggatggctttgaagagagatgttcaatgccagggtcatcctcttcggtgacgtcgacgtcggcgaccaaacctccagatctggtttcactacattcaattccaatcacgtcattgtcctctgcggtggcaactgaaagtccccaaaaactgatcgagatgctgggaaaaacgaggaaagtttcggtgcgtggcaaatatgtgacagctaactacgcctttgcttcttacacgcatcaccaccaccaggggctaccctcccttgaacaagtttcagaagaagttcaccgagctctctgaggtgaacaaggaagacaacttttttttttgtgacgaaaaaaaaaaagttacagatgtcaagttttctggaacatgcaaatttcacacaggtttggattgccggccaaaaagtcacaatataaatttacgaggacgaataacagataaaattttataaagattaaaaatgaactttgagcattttgtatagacaaaaaacatattttaagtcaattaataatttctggttcttataatttcatattaatttatcatgaatacttttgatcccgccacccctctcttcaaacatccaaaaatctatttttttcactacattttgatggtaaaatcatttaacccaattttcccccacttgttttgccttgtaataggaggtattttttgtcttgttatgtaggcaacctttgatgatgacgatgattcaacaagagattacatgcattgtaacaatctttaattaacattcattggatactagcttgatgttttgtatgttccaagtttagtggattaccagtaacattttttggatgaaatgtatttataacttgaaggattgatcactagtctttttgttcaaacttgcctcatccccgctcttaaatgatcaaattctgttctttggtgcatgtatgtcttccttggtacgttatctcaattattgctgggttttcgtctaacctttgaacttgtttttttgctaggcacccttgtacagatccatatgcgcatttgtaatatcctctgcaatgcaaacgactagttttgtcaatttttcggcaaaactagaaaataacttctttttatgttcttaatataaagattaggctggcaaacttagtatggtacgaacatcaaataaaaatattaatagaaacccctcttgttttaagccttgataaggaagttggagaagaaacctacattctctttttagttgctgtgaatgttatagtatagtctatgtccaaaaacaaagaatgagatgttatctggagtttgtggttgttctcggttttaaattttcgtaaaggtagttgtcaaatgaacaagtttttgtcgagaatgtcaataacaagtttccaacagaaagcactaatttgggcccatttgaaaccagctgacatggtcctttagttaatttttcaaattgcaggtcattttgaaaacactgggggcatagaaccattaaaacaaggaaagagaactcattgtacatgcatattttattttccccattacgcttcattagctaattggctactgattttccagttaccaggcctaaggcctctggtattaactaaacgagaggggtgaaacttgtacgtcaataacctagagggagaggggtgaacctttctgtcacattctaatcaaatggcaattatataaacttatactacgaaaaaaattgctaattaaacttgtttaatttatcacaataaaaagttaaatgagaatagaggttttaactaaccttgaaaacttagctccaagaatactcttttgcccatattttatccaattatatccatcatctaaacaccatttcacattaacgcttagaatatctttaatattagatcttggagatagatcttaagtcgaagatctaacattttccaaattcagcaataaaaaactaaaaaaaatataaatctccaaaatcgagatcatggagatcaagatctccatgttgaaaatccagttcttcaggaaaaaatgtgtatatctgtacagattccaaacaaaaaattattcatcaacaacattaacaataaaacgcgggaggtaacagatccattagaatgaagtaaaaacacaacaaatataaatgaagaagaagaaaaacaaacaactcattggaaaaaaaaaaaacatatcaggtaaagggggcttgcatgtgtggaggaaaagggaggtgggggttgcacacgcagaggagaaggagaaggagaaggtggagccgcggcaaagaaggaagaagaggaagaagaaaaagtgaaatgaagagaggagagagggaggaggaaaaaagaagaaaagatagttttggaagttgaagaagtgaaaagaggagagagggaggagagaaaaaagtgaatagtgaaggaaaaaatggaaaaaaaaacaaaatatatttaaatatttaaaagtgaaattcatgtgcaattcattagaagttatttaagatttcaaaaaaatacctcttgagatatttttgactcaatactatccacatttgaaacatggattaaagatgattgtgtagaacttgaaattccctgaaaggaaaacattcaagtaataaaatacaaaaaatgaagctaagagggtatgatcataatagcaaaagcaattcatacagatatacaaaattactataattataactctagctcatatgacccatggttggagtttgatgagtagggagataaatatgaacagacttgtttatttaaatctccaaaattaagtatgatcataaagtgcaggaaaaaaaattgccacaatttttaaagcaccaagaagaattgttgtgaagttaattttgttttgacataaaaagatgctcattaagaaagagatatacaaaaataggaagatatcctacacatgaaaacttatcatagttattaatctcacatagaagtacatagctttaaacactatagcaggaagcacgatggtcattttttaaaatattataatgcaagctaaatagtttatactacatatatattaaaaataagaaagaaaaaaaatccaaaattaaagaaattcatgataaatattatttttaaaataatatattttaaaataatatataatgcaagcacgatggtcatttttttaaatattattttgggtggttcaggctctggattgggctccggattcgattcccggctagggttcaacatcaacaatatattttaaatattatttttatttttagtaatgcaaacttgcaagacaagtttttttattcaaacttgcctcatccccaatctcaatgatcaaattctgttctttggtgcatgtatgtcttcctcggtaggttatctcaaatgttgttgggttttcgtctaacctttgaacttgttttgttgctaggcacccttgtacatatctatgtgtgcatctgtaatatcctctgcaatgcaaaccactagctgtcaatttttcggcaaaactagaaaacaactttttatgttcttaatataaacattagactggcaaagttagtatggtacgaacatcaaataaaaatattaatagaaacccctcttgttttatgccttgataaggaagttggagaagaaacctacattctccttttagttgctataatgctatgaattttatagtatagtctatgtccaaaaataaagaatgagatgttatctggagtttgtggttgttctcggttttaaatttttgtaaaggtaattgtcaaatgaacaagtttttgttgagaatgtcaataataacaagtttccaacagaaagcactaatttgggcccatttaaaaccagctgacatggtccttcagataaattttcaaattgcaggtcattttaaaaaaactgggggcatagaaccattaaaacaaggaaagagaactcattatacatgcatattttattttccccattacgctccattagctaattggttactgattttccagttaccaggcctaaggcctctggtattaactaaacgagaggggtgaaccttgtatgtcaataacctagaggggtgaacctttctgtcccattcaaatcaaatgccatttatatgaacttatactacgaaaaaatttgctaattaaacttgattaatttataacaagaaaaagttaaatgaaaaagagcttttaactaaccttggaaacttagctccaaggatttccttttgcccatattttctccagctatatccatcatctaaacaaccttccgcattgacacttatcttttctgtccgaacttcagtttgaactgttcttagttcacgaaccttttaattgccatgccaaaatataaaaaccataatagtcttttattcaacatgttaggttcatgaaatttatttttgtttaactaaagactatagagacaccgcctacggacacatcttcacattggaactcagcaacagtatttgatctcgattcatgaataaaaccatcatcatcatttttcagttggggaagtagcttacattgtgttgaagctaaagattgatttgcaatatagagaatatctaccttctgaatcttttgtggtataattgatgcatagtcaaattagagaacaaacaatttcaagttgcaggcatataactccctacttatatgaccatgcatcatagcttcattggaatgagacatttccaaagtgatgttttccttttcttttctttttttcgtgacagcaatgaataacttaagttgctgataaagagagagactgagattagaatgacttccacgtcttaatcttgtattggtagattaaagaaagagttactttccttgggaaacgatgtaacaaaactcaatcgaacgattaaatatttaattattattattattatttaaaaaagaagaaagaaagggctatgtgtcggtcatgcaggggaagaaatggaaaacctgctaataatacatttactttttgtttttgccttttctttttgtttgtaaaaataaagaaagaaagaaaacatagtcatctgttgcgtaatataatttattttcaaaagctgaaactcctctctttattctttttttaattgtcaaaactcaaaaataaaaaagccatgaatgaaatactatgttcgtactgcatatagtttgttgaggtttctgctcctccttcattccattccttcacttttcatgcactattttcattgtgcaaaggtaaatataactcataactcagattactgaattaaagtttatgtttttttcattatttgtattaaactgagtgcactttagagaaggaatctaggcatagttttcagcatagatggtgaaggcacgaagtggctatgagttgacataaccaaaattatttgcctttggtttgatatgattattattcattttgaggtgtgggtggtgaaggcttcttgtaattgacacatgaaaggaacacaaagaggtaaaaaaaaaaaaccagggaattgaaaggaaatttcagtggccggtgtgacttgcctcagatctaggaaacctctcttatttcctttgctattttttcattttcaatgaccccattttcccttgtctccgtttttagagagggacaaggcatttaccttgtcaattatttggtgctgcttagtttcttgaataatctattgtctggtttttccggggatcgatcataaggaggaagaaatacaaggttttgggacctcttctcttggcttataaaaagtccaaaacaggtgaattcagaaaggatcttgtgggctgttttgtttgtttgttctagtctttgagaataataaaaataaccttagaattgaattttgttacactgtatttgactgtttccttaggaggttggttctaaactccttcaatttcttgccgtaggagccttcttggtgttttgatgttgattggaattatatcatagaaaggaggaggcttgagggaaaagggtggaaaaaaagtggttaaaagggacagcaacttattggatactggaggataagaagactattgctacaaggcaaagtaaaccaattgatacaatcctaagaccaagacaagtgaatgaagacttggaattacacatggaggcacttcctttggtgattaaagagccaatgacaagggctagggctcaaacactccaagatcacatacattctagcttgtatctcttggagaaccatgaagaaggctacaaaatgttgaacttatctgttgtaatcgattaccagtagcctgtaatctattaaatgcacttgtataaatgttagatttgtaaatagttctgtgataatcgattacaagtcctatgtaatcgattatatgatcatcggtagtgtagtttttgaacttagctctattataatcgattattccgtcttgtaatcgattacgtagaagtgtgagttcctgtgataatcgattattctgatgtgtaatcgattacctggttttgagagctcctgtgataatcgattacctggtgagataatcgattattttgttcatgctcaatttccaggactgatatgagcaatgtaatcgattgccaagagatagtaatcgattatttgattcaaaataatcgattaccattcgaaataatcgattattaccgtttcagctgcagaagcgccatttttagtttttaaacagctgtttggatagcttcccttggaagcaacatttgtatttcatttaggacacatttacatttcatttggctttaaattcgtggtctatataaaccacaacacaacagattgacttttggttgaatgaaattagattgcactttgtatgtgagaggttgagagttattctcccttgttcttagtgaaaaacttcttgtttcttatcaatagcttctgagctattgtggtgattcttgcaagacttattggaattcctattccatggtgtcaatccaaatcctcttctaatcttcttccattgatccatttctcaaatcacaaaacctaaaaacctgtaaaaaacagagcacttcatactctgttttattttccattgaagaattgattccattgcaaggaagattggggcaaacaggacttgaatcagtttaggagtccatcaccaatggaggaaatatcttctactgttgcagtaccttttacacttggtgttggaaatttgattcaaaaggagtctgcagtgacgactcacatggagataactgggctaaagctcatggcaaatacagcagcggctgctttgatgttaaatcctgcagtggagtgtttaaaggataatcaagttggagctgctcttgtctcagaaatggttattgaatgtgagagtaattgggtcttgagtgaacgccataaccaggcaagaaaggaagatgaattaatgctagcagtggattttcagtgtatgcacagttcaagctctcaatctgtggctaatgggaaaagtgatccttgtagggaggaagctgcgttgttgaagagtagtttttctgaaatagattcaccaatcatcatcaaggttgatgacgatgttgatggtaagtccagaataagcgatctgtgtccatcaatgaagccagtggaggacacagtttcttttgttatggatattactaatgaggatcaaagtggatctgatgagtctgatcctagaccatctgctgtgcttcttgatcagttgccaggggagaataaaacatggagaacaagcaacccgaatgctttgaaattgaatagtggccctctctggggttgttcatcaatttgtggaatgagacaggagatggaagatgctatttctgttaggcctcaaccttttcaagtttcttcacagatgctgattaatgaccatgtgaatgataatgaaaaacagtcactagcccacttttttgctgtctacgatggacatgggggccttcaggtatggcttaaaaatactctatcaaattacacaaattgtattgttgaaattagtgtttcactgatgaggtgttttgtttttgtaggttgccaattactgccaggaacgtcttcattcaacgttgattgaggagatagagactgcacaatcaagttcggctgaaacaaatcggagagatgattggcaggaccaatggaagaaagcattcatcaattgttttcaaaaaatggatgatgaggttggaggaattggtgcaagtaacagtggaaacaacagtcgtgggtctgagtctaatattgaaactgttgctcctgagactgctggctccactgcagtggttgccattttaagccaaacccacatcataattgcaaattgtggagattcaaggactgtcttataccgcggtaaagaagccatgccattgtcttctgaccacaaagtaaggcatttcattctaattttatagtatttttggtgaatttatattagaagctgaagatgtctgatagaggaaacttgacttcctgttttgcatccaaatagagaggatgagcgggctcggatagaagctgcgggaggaagagtcatacattggaaaggatattgacttcttggtgtcttggcgatgtcaaggtctataggtatgtgtttgttgcatgatctctagaatatgattggttttcttgcaatattatgtggttatatgaaactataatcaaatggtttagccgttattttttcagttctacatctctactacaatacaatattattaatcactagtttgtgctgaagttgaatgtgaggacatacattattcttctatgcaagtgttcttttacaagtaaacaacaatgtatgcaatttttacattgccatccaatcacaaaatgacatgtataataagtttatgaacttaacaatagccattttaaagttttgtcttacctatcatgattgtagaaattttgaaagtgctagtacatagagcataaactcttcttttattggtacactagtttggtgacccgtgcgaacgcacgggtccgcttcgctacgctccgctatatttttataaattaattataatttttatctttataataacaaaaaaaatatttatttataatattattgataaagtaatttaacttaattaactttaattttcttataactaataattaaactattattttacaataaatatagttactaagtattattacgatgattaacgtaataattgaattaaataaaaacgtttaaaaattttaaatattcatttaatttaaatgataaaacaaaaaatattttgttttaaatgtcaatttaattttactgttatttacacattttttatatgttgaaatattaaaaacaaataatagatttaataaaaataaataaggttgattgtttgatatgtaaatgtgttaaatacttttaataaaataacagtagaatgagaggaagtacattaaggcattattaaaaaatgcaaaaataatattcataaaggaacaaaaatttgatagagaccactgaatcaaaatagtttaatacatcaacatggacaatatttgacacttgaggagcaatctcttcagtccaataattatacttagacaaaaaagttaaagaagccaaggcatcaaccgctttgttacccattcttttggcgcacaacaaacttagtgagtcattttgctgcataatttagctattgaaagtcacatataatcacatcaaaataagtaagattatgtacatatctctttttccaagcctgtgaaacctttgacagtctgtcttataaataaataacataatgaaatccaaaaaagtagttatctcaatactccatctcagtgctagggttcaacttcccgaatattgtaagaatgtggaaggaaattagttgttgcagccaaaatttggcctacattatgcaaaggttgttccattgtcacattattggttaataaaaatatgattcacagataccaacttaccggtgaatgaatgaagttatgacatcataaatgagaaaaataatgaaggatttatataagattggtatttactatataggcagccccaatgatcataaaaacatgattggaatagtattctaaataataaataaagtatgaatctttataatattaaatcaagtttatttgacatgattggaatttatccgatcactgcccttgatagaggttcaaaacaaaaaataaatacacaaaaaataacatgaaatgcaaaagctaccgcctttatcacgcagaagttacatttgacacattccaaaacactgtggatttcaaaatttgagttagatccacttagcctaaatcagaatgtccataacaaaaggtcaatcaccgtaaaataatagtatttgtgatattattgatttggtttattaaaataattatctttgatggtattataacaaagaattaaactattatttaataataaaaatattaaatagatgttattatgttgctccgctacgctccgcatttttttaaaatgattttaattttatatatatgataaataaaataatagtatttgtgatattattgatttggtttattaaaataattaactttgatggtgttataacaaagaatcaaactattatttaataataaaaatattaaatagatgttattatgttgctccgctacgctccacattttttaaaaatgattttaattttatatatattataaataaaataatagtatttgtgatattattgatttagttcattaaaataattaactttgatggtgttataataaataatcaaactattatttaataataaatatattaaatagatatgttgctccggtacacttcgcatttttttaaaatgattttaatttgatatatatgataagtaaaataatagtatttgtgatattattaattggttcattaaaatgattaactttgatggtattataacaaagaatcaaattatctttactataataaatatattaaatagatattattatgttgctccgctatactctgcatctttttaaatgatttcaatttttatacacatgataagtaaaataataatatttattcgatttattgatttaggtgaaatgttagagagagaaaaaaaataccaacaatgttccttctctagatgaaataaatagcaagtataactcctaaagtggcaaatgaaaaattcccgtaagggttttttttttttacaaattaattttaatttttatctctannnnnnnnnnnnnnnnnnnnnnnnnnnnnnnnnnnnnnnnnnnnnnnnnnnnnnnnnnnnnnnnnnnnnnnnnnnnnnnnnnnnnnnnnnnnnnnnnnnaattaattaaatttggttatcctataacaaaaaatgaaactattattttttaataaatattttaactaaatgttattatgttaattaatgtaaaaaaattaaattcaataaaaagagtttaaatgaagcaattaggcacacattgactactttagcatgctgttaatttttcaagacatacattgaactgtaacgacaccgaaaagggagtcatctccacatcttttagttttgataattggtttagtattctttgaacccttgttaggctttttcttcaaaactttattctttgataaattattttcaaacaaatatattaactaaatagtattatatttttatagtaagaattgaaattaaaaaattaaaaattttaaaatcttgattaaatttaaataataaaactaacaataattttattttttttaaatgtcatcactttattttactgtcattcatccattatttaatatgttaaaaattttaaataaaataatgtatttaataaaaataaatattgttaactattgatatgtaactaaattaagtatttttaaaaaacattttccatttaacagttcacccatgatgacctagataacaattattttccgtaaatgatgattgtagtttctatcataaataaatgaaattaaaactaatttacattatgatataatgagtaattaatttaaattctttttgtaacaaaaattattttcactaactaatttacattatgtagtaagtttcttttattccacctccttcaataacgtttggagcaaaatgtgacttaagtaagcttccttcaatgtgatttcactctacaactttttttctacataaatttcttattcaaataatctttgttgtctaatttttcttcttgcccatcaggtgatagatacctgaaaccatggataattccagaacctgaagtcaatattgtgcgtcgagagaaaaatgatgagtgtcttattttagcaagtgatggtttatgggatgtaatgacaaatgaagaagcatgcgaggttgcaaagaagcgaatccttctttggcacaagaagtatggtgacaacgacacaacaggacgcagtgaaggagctgatcctgcagctcagtccgctgcagagtatctaactaagcttgccatccacaggggaagccaagataacatctctgtaattgtgatagacttaaaggctcaaagaaaaattaagagaaagccataaagtgatgtgttttatatctggcatatcttcatttgaagctattgatttattgtattttagagtcattggcactttttagcccgtcagtttttcaccagggctaagctaagttatatatgctaatatttgcactgtacaaggataccttcagcttggatgagttatcactgtctctgaaaactttccaagcataacaaaggttttttttttttttttttttttttttttttttttttttataaaaaaaatgttaagagccaatatgttgtgttagctaatcaattgataagctcattgtctcttacatacgcaccttggagccactcttaaattttattttattttggttacgtaatgagaaaaaacagaaaacgaaacaacgcagcaactgaagactacagatgcggatatggcattccctagggcatcacgtaacaaaatggttcccaagtcttaaatttgattagtaattgcaagcaatgaaaacccatcatcaatcaggaaatttgacaagctttaaccaaataaaaagtctcaaatataacttgaggaactgttcagttagcgtgactcaaaatgttcatttgggacagcttgacaaaacttttatttcatgaaaatttgtacatcagatcatattatcagcaactcaggcaaatccttgtgatacgttttgttgcaatcataaatttcaaacattttgttgcaaaagcagcccctgatacttaacttcagcattaaagttcttgcatatgtcaactattgcaatttcttgacccttgcatctgagtttatcaacaaattgaactcaaccactcaacaactaaatacagaatccttgaagtgactctaggagctggttcttcaactcatctgcaaacgcaacagaaatggaaaactacagttacaaataactccgattgtttagaaagaaggtactcagattatccagaaatattaatatctaaaactggatggttgcatgagagcacatcctatcatcgtaatttagaaaacaatacccttagtatcatttacagaaccaaaaacaatttcttaatatagaagaaaaaatacttctacttatgataaaatcaatacattatatagggatctacattcaagaacacctgatagattcgcaagtaaagaacaaacgaataaccttttacttaaattaataatagagtccaagattggaacatacaaacttttataaggttgcaagaggagaacctgcattcgagaagtaagctgaaagatccacctccaagtcatcatacatgttgacaaaaggatgtgcctggagtttcaatcaaatatatagcatcagaaagacaattttacatggtatgtgtacataagcaagatttacacataccattaattcctgagctgacagtcgatcctttgggtctttctgtagactaaacaagattgaaaaaaggaagatcagtagacacataaaaagcacacagtgaaatagagtttttggcaaaacaggcagcagaatagtgacggaaggtgctaatatttatacatgtttaaatggtttcttcgatgaaattatgaaagataccttaaaaataagaataaaaaatgaaaataatggtttgtggatgtaggtagggcaagtgcattacatttctattattgttttgtcaacataaacaatcagcaaatcaaagctcctcaagcatccactcactaatttcaggatgacctttaagaaactgctaccgttatgttagtgttctctgtgtgtgtgtgtgtgtgtgtgtgtgtggttgtgttttcattttcttatggtggattaagactcttgactgcacagaactagtatcacatataacaattaccatgctgagataaatgagcaaaattctgtagaaaattgttcagatggaggactaggaggaggtttatcgacaatagtttccataagctcaaaaatgctttcccatgtttcactttgatcaggcggtgcatatggaaaccgacccaaagcacactcgagtaatattagtcccaaactccatatatcacttttgtagttgtatcctcgctggcttccaatgattctctctggctataaaattggcagagtgaatgttactgtatattctaggcaacactggtaaattttggtggtaaaatgataaatatacttgcacatattactcacagacatatagttgtaggttccaatgaaagtatttgcttgaccagatgtactttccataattgtactcacaccaaagtcagtaatctttacttcaccaatatgatttattaacaaattagaaggttttaagtctctgtggataatatgcttttcgtggtggagataaactaaacccttcagcacctacatcattaaaaaagaaaaaagaaagagatcagatcttgtttgcgattcagtgaaaagaattatgggtactagactgaagggaaattccttactccatacctgcttacagatggcagcaagataatcctccggaattgttttaactttcttcagcagatcagctaaggaacctccatccatgtactctaagaggattgatatgacaccgttttcatagaatgattggtagcagacaacaacataaggacattgtgcttgttgagtaattttcagctcttgtgcaatctgcttgcgcatagactcctcaatattcatctgaattacctgaattgtgaagaatgcatacatagtgacaaatgaaaaaagaggaatagatttaaatgataacattaaggttgggaatatatcagaacaaaaggaaagtaattagtttattagttcaaatacaaatactaaactgttaaccaagcaagagggaaatttaaaattgttaaaagcaggagggaaaccaatatgggacatgttacccaatcatttctgctctattttcaaaaactagtaggaaaattaatagaaaatgaattgacaaaagactgaacatttcaataatgaagggggagggggggttgaagaccttagatgttaacacaagtttaaatttgtcttgttcaatgattgattaatatatacaagttcctatggaagagaaccattttcaatcagtatgttaaacacaattcaaatgttcgaagttgggtgaacaaaatgatgttctgttagggtataaggagatgggaagtttagaatattaatcagttagttagaggggataattagatataaataggggaggtcagatagcaggattcggggaataagttgtcatttgtaaatagagcattagttcttttggaaggggaaatccttggagtggagacccttggaggagagatttctttcctattcctggttcttttcatcctattcaataaaatctttctttcctttcccattcctaattcttggttcatatcatgttctgacataacaaagaaagaaagcaccagcagcataatagtaatgagctaaattactatttgaatgaaaatgaaccactcctaatgaaattaaatcattaaatgttgattgaaagaaataacattttatgaaacttactaataatgactttgggtgacactgaaattccaagagaaaacaagtttcaaacatccttgctcaatgaaatggatgtaatggagaggggaatgacattatcaaaaattatgtaatatgggtagacaatgccaatacaaaaggataaactaactaaaaatgagagaaaagaccatgcaaactcaaagcatggtatgcaacatgcagcaagtgtaccttcaacacaaaaaactgacgagtccatttgtgttgcaccaattgaactacccctccatttccctctccaacaactttgattacatctatatctgccaaagttaactggttgtctgtcggcttgatttgaggtggctgaaaaaataacatgaatgttagaatcatatacaacatattgtcagaattcagccagcaatgtattgtgtattgtgactagataaaaaaaatatgcatgaatttcaacattcaactcccccttgtcctgctctttttataccataagccactggttggaatgcacaactatagatatggggagtttaacaggaataaatttaaacttagtcacttataaatttgggtcctcatttaacatggctatgtatctactatcaactcattttgtcttctaaaatgtattgaccatataagagtatgcataggaagttttccaatataattagtcagattattttttattttttttcatgattgacagtgtaatacatcagaaattgatgaaagtgttgaaagcctccctgagtcccaccaaaaaaaaaaaaagacgtaggaaggaagaagaggatccaacattaactcagaatgcaaacaattttatgcaacaaacttcgtttaagagtagaaatgaaagactcaatttgtttagtggctcatgaagtggatgacgtatgcttagcacaatttcatttcataaacttgcaacttgttgtccatttgattaaagacaatgtaaataagataagaaatgcataacctcgttaacaatatcaggttcatttaaaatccaatagcaaaggctaggaaaagtgaaagtagggtcaataccgccgaaaacacacacacaagaaaaataatggccaaggagaaacagcaaataatccatctcataatttttttattcaatttaaatcatataatactccacttgggtatggtaacctgagaataaggaatctacagaaaaatcatgaatcccttgttatcttatctatcaggcatttcatcagatccaaaagatcaaatgcaaaaaaacaaacaatggagcaatcggactggacacataatgaaataaacaaattgttaacaaacaaacaattacaaaggcaaagaatgcataaaaaagtgagagaaatatgttaccgcttcgacatcattctgagagacaattcgaactccatccctgttgacaagcagatccccatccttaaaagtcccacacatcacaaagagagagagagagagagactcacaggaacttggcaaaattagattgatcggacacaggaactgagagtttgagaccaagccccaagattcctttcttcatgattaaattgcactaaaaatggagagaatccgtctgttagcactttcagacccctctaagattcacttctaactagggctgtggcaaccaaaaggccatggccagttaagtagttacctttagccttaaaaaatgtatacttttcgaaaaatatttattattaatttgaattattaggtgataaattttataatgacatatattactatttttattattaagactgtaattttaagattgtattaattgaacaattgaaaactttagatgaagatatggattgaaaatacttttaagttctactaagaattataattttgaaaatcttgatttattttcaaaataaagatattgcaagaaggatagacaaaaaaattcatatttcactaaaaacattatttatttaaaaaattgtatttttctttcaaatacatgcattgtttctaatattattaataatacttgtaaatattattattattattattaaaagtagttttttaaactaaaaatactcaaatcttttttaacatactaaaaatcttatttgatatactaaaatcttatttgatattgaaataatttgaatgattttgtcattttatatattgacaataaaatgctagaaatactttacactttctataaaactttgatcaataatttcgtaattgataaaaaaataaaataaagtatgacaaatattaaagaaaaatacagaagagtaagcaaattataatattgaaaatcttgatttatttttaaaataaagatattgcaagaagtatagaaaaagaaattcatatttcactaaaaatattgtatttttctttcaaatacatgcattatttctaatattattaataaactagtaattcttattattattgaaagtagtttttaaaactaaaattactcaaatcttttttatgttacatactaaaatcttatttgatattaactatgttacgaaataatttgaatgactttgtcattttatatattgacaataaaatgctagaaatactttatactttcttataaaactttgatcaatgatttcgtaattgataataaataaataaaaatttgacaaatattaaattaaatgttaaagaaaattatagaagagagcacaaaacagagagatgaaggatctttattagagagatgaacaatccaaggacagaacagtgaacagagcacggcagcaaaggtcgcggttggccagaaacagtgacaggttcgccagaaaatggccataaaggtcaggaatgaccggaaactatggagaatagaggctgcagaggttggggatggcaaaaaactcacagaagcccccaaaatgcagggaaatgccaaaaatgttgccagaaaagggtgtgcaggtgggaaaaggataacaatgtcataacagtgtgtgcaagtgattgagaaagcagagtttcggttgtgattcaaagaagggggcaaaatcattgcccactaaaacaccccaaataaagttgtttaatggttaaattaaaataggtttttttgtgacccactccaataaagcctgctccaggagcaatttcagctattttgctagatatggcagctgtgatggtcgctacttcaaactgatacacttttcaattttcatagcatgctctagcagctctggaatgcaattctgcgctagcaccactatttgttgctattggcaactagtcatataaaaactgaaaataattctttacgtgaaatatgttgaatacattcagcacattgatgatactgaatgaataaagcagtaactacttccctatctgaataattaaatgacaataatttcctttggtgtcaccatgtttagcatctaaatgttttaagttttcttaattaaatgagtttttcagcacttaaaattataatcttttcaagcaaaacacattcgacgtataattttacaggtttatcaaacatgcctttaatgtaagtaaaccaactcgtgcatataagaaaaccaaaagcaatgaatcacgaacggtgacaaggcatctcaaacctgctttattaccttttctgatgcatcttgaaatatttttggctcagtaacgactttccgcttttgggcttcaatatttgaactacccctacccacagatgaaacaggggctgaaggtgacaaaacaggtatttccaaagatgactttgctatcgactgtgtagaacttgaaattccctgaaaggaaaacattcaagtaataaaatacaaaaaatgaagctaagagggtatgatcatattagcaaaagcaattcatacagagatataaagttacagctgtcaagttttctggaacaagcaaatgtctcataggttttgattagaatgacagattaaatatgaactttgagcatttagtatagacaaaaaacataatttaagtcaactaataatttctcgttcttataattttatgttaatttatcatgaatacttttgatcccccacccccctcttcaaacatccaaaaatcaatttagtttcactacataaaatcatttaacccattttttccccacttttttgccttgtaatgggaggtattttgtattgttatgtaggcaacctttgatgatgaagatgattcaaccagagatacatgcattgtaacaatctttgattagcattcattggatactagcttgatgttttgtatgttccaagtttggtggattaccagtaacattttttggatgaaatgtatttatgatcatattaaataatgttatttactgatattttttttactgaaatgtagataacatcagcaatatattttaaatttgtctatttttatttttagtaatgcaaatttgcaagacaagtttttttataacttgcaagatttgaccactagtctttttgttcaaacttgcctcatccccactcttaatgatcaaattctgttctttggtgcatgtatgtcttccttggtaggttatctcaaatgttgctgggttttcgtctaacctttgaacttgttttcttgctgggcacccttgtacagatccatatgcgcatttgtaatatcctctgcaatgcaaacgactagttgtcaatttttcggcaaaactagaaaataacttctttttatgttcttaatataaacattagactggcaaagttagtatggtacgaacagcaaataaaaatattaatagaaacccctcttgttttaagccttgataaggaagttggagaagaaacctacattctctttttagttgctgtgaatgttatagtatagtctatgtccaaaaataaagaatcagatgttatctggagtttgtggttgttctcggttttaaatttttgcaaaggtagttgtcaaatgaacaagtttttgttgagaatgtcaaaaacaagtttccaacagaaagcactaatttgggcccatttgaaaccagctgacatggtcctttagataatttttcaaattgcaggtcattttaaaaacactgggggcatagaaccattaaaacaatgaaagagaacttattagctaattggctactgattttccagttaccaggtccaaggcctctggtattaactaaacgagaggggtgaaacttgtacgtcaataacctagaggggtgaacctttctgtcacattcaaatcaaatgttaattatataaatttatactaggaaaaaaattgctaattaaacttgtttaattttataacaagaaaaagttaaacgagaaaagaccgtttaactaaccttggaaacttagctccaagaggactcttttgcccatattttctccagctatatccatcatttaaatacccttccgcattgacacttatcttttctgtccaaacttcaggttctgtccaaacttcagtttgaactgttctttgttcacgaacctgttaattgccatgccaaaatataaaaaccacaatagtcttttattcaacatgttaggttcgtgaagtttatttttgtttaactaaagactatagagacgcctcctacggacacatcttcatagaggaactcagcaacagtatttgatctcgattcatgaataaaaccatcatcatcatttttcagttggggaagtagcttacattgtgttgaagctaaagattgatttgcaatatagagaatatctaccttctgaatcttttgtggtataattgatgcatagtcaaagtagagaacaaacaatttcaagttgcaggcgtataactccctacttatatgaccatgcatcataggttcataggattgacacatttccaaagtgatgttttcctttcctttttttctttttcgtgacagcaatgaacaaaataagttgctgataaagagtaagcaaattccactaaaaatggagagaatccgtctgttagcaccttcagacccctataagattcacttctaactagggctgtggcaaccacaaggccatggccatttaagtagttaccttaagcctaaaaaatttatactttttgaaaaatatttattattaatttgaattattaggtgataaattttataacgatatatattactatttttattattaagactgtaatttaatattgtattttaattgaacaattgaaaactttagatgaagatatgaattgaaaatacttttaagttctactaagaattataatactgaaaatattttctttatttttaaaataaagatattgcaagaagtcaacatcaatatcaacatcaacagcacctttaacccaaattaattggggtcggtggtagatgaacccaatgataaatcgaaaataaagcaaaagagagaaacagagttaaatataaaagaatggtgagaggagaagagaaaagaggaagaaaagaattaaaacaggaaacaactggaacatagaactactaaagggtttaaccctccatcagacttatagcttttctccactccgtcctaagacataccgtccgccaatctaaatcccactccattaggtcttgtttaactacctttccccaggtaagttttggtcgacctctacctctctttgtatctagctcttggtaacatactcttgttctaacaggagcatctaatggtcgtctcataacacgcccaaaccatctcaatctatgctctctcatcttttcacatactggtaccactgatacctttcnnnnnnnnnnnnnnnnnnnnnnnnnnnnnnnnnnnnnnnnnnnnnnnnnnnnnnnnnnnnnnnnnnnnnnnnnnnnnnnnnnnnnnnnnnnnnnnnnnnnnnnnnnnnnnnnnnnnnnnnnnnnnnnnnnnnnnnnnnnnnnnnnnnnnnnnnnnnnnnnnnnnnnnnnnnnnnnnnnnnnnnnnnnnnnnnnnnnnnnnnnnnnnnnnnnnnnnnnnnnnnnnnnnnnnnnnnnnnnnnnnnnnnnnnnnnnnnnnnnnnnnnnnnnnnnnnnnnnnnnnnnnnnnnnnnnnnnnnnnnnnnnnnnnnnnnnnnnnnnnnnnnnnnnnnnnnnnnnnnnnnnnnnnnnnnnnnnnnnnnnnnnnnnnnnnnnnnnnnnnnnnnnnnnnnnnnnnnnnnnnnnnnnnnnnnnnnnnnnnnnnnnnnnnnnnnnnnnnnnnnnnnnnnnnnnnnnnnnnnnnnnnnnnnnnnnnnnnnnnnnnnnnnnnnnnnnnnnnnnnnnnnnnnnnnnnnnnnnnnnnnnnnnnnnnnnnnnnnnnnnnnnnnnnnnnnnnnnnnnnnnnnnnnnnnnnnnnnnnnnnnnnnnnnnnnnnnnnnnnnnnnnnnnnnnnnnnnnnnnnnnnnnnnnnnnnnnnnnnnnnnnnnnnnnnnnnnnnnnnnnnnnnnnnnnnnnnnnnnnnnnnnnnnnnnnnnnnnnnnnnnnnnnnnnnnnnnnnnnnnnnnnnnnnnnnnnnnnnnnnnnnnnnnnnnnnnnnnnnnnnnnnnnnnnnnnnnnnnnnnnnnnnnnnnnnnnnnnntttgcatcttttctcgctactctaaatttttgcaaattctcctcattaggacatttatgcaagaagtatagaaaaaaaattcatatttcattaaaaatatcgtttagttaaaaatattgtatttttctttcaaatacatgcattgtttctaatattattaataaacctagtaattattattattattcttgaaagttgcttttcaaactaaaattactcaaatcttttttatgttacatactaaaatcttatttgatattaactatgttatgaaataatttgaatgattttgtcattttatatattgacagtaaaatgctagaaatactttagactttcttataaaactttgatcaataatttcgtaattgataataaaataaaatatgacaaatattaaattaaatgttaaagaaaaatatagaagagagcacaaaacagagagatgaaggatctgtattagagagatgaacaatgcaaggacagaacagtgaacagcacggcagcaaaggtcgcggttggccagaaacagtgacaggttcgccagaaaatggccataaaggtcaggaatgactggaaactatggagaatagaagctgcagaggttggggatggcaaaaaactcacataaggcccgaaaatgcagggaattgccaaaaatgttgccagaaaagggtgtcttggtggaaaaaggataacaatatgtcataacagtgtgtgtaagtaattgagaaagtagagtttcagttgtgattcaaagaagggggcaaaatcattgcccactaaaacaccctaaataaagttgtttaatggttaaattaaaataggtttttttgtgacccactccaataaagcctgctccaggagcaatttctgctattttgctagatatgacagctgtgatggtcgctactgatacacttttcaattttcatagcatgctctagccgctctgcaatgcaattctgcgctagcaccactatttgttgctattggcaactagtcatataaaaactgaaaataattctttacgtgaaatatgttaaatacattcagcacattgctgatactgaatgaataaagcagcaactacttccctatctgaataattaaatgacataatttcctttggtgtcaccatgtttagcatctaaatgttttaagttttcttaattaaatgagtttttcagcacttaaaattataatcttttcaagcaaaacacattcgacgtataattttacaggtttatcaaacatgcctttaatgtaagtaaaccaactcgtgcatataagaaaaccaaaagcaatcaatcacgaacggtgacaaggcatctcaaacctgctttattatcttttttgacgcatcttgtaatatttttggctcagtaacgactttccgcttttgggcttcactgtttgaactacccctacccacagatgaaactggggctaaaggtgacaaaacaggtatttccaaagatgactttgctatcgaatgtgtagaacttgaaattccctgaaaggaaaacattcaagtaatacagtacgaaaaatgaagctaagagggtatgatcatattagcaaaagcaattcatacagagatacaaaatagtaaaaataagaatcaactcattagtcattggaaaataccaacatgccaataacaccatgcaatttgaaaagaggataactaaaaattacctgatacgtcgtattgtgatgttcatttagtcgagtctcttgaagtgcagctagttggttcatcatgtcagcctcctcgttaattggtgaaaaaattcggtcaaaataattgggtcgaccagcatctccccactctgctacattccatttcaatgcttcccaccagatgctttctcctttgatgatcttcaaagatttgcttgacaactctgatttggaaagactttggagacttgggcaataataaaatatcatttcttctataaaaggtccaacatgtatgccattgaaaatgttgaccaattcaggaagatagagaagcgatatcattctcaacttggggaggaaaaacactggtttttgttctggtgtggcatgacttatcagggtggttacttttggacagtcttcaataataatctcctccaaaaaggaaagttttttaagagaatctaaggtgaagatggtggttaacatggggcaagtgtgtaatgctatagactttaagcagagaaagaagggactactcccttcgcagacgcttcttaaattcttcatatagaatacactcaaaaacttcaacattagagaagctggcctatcaggtgaattgcttccactgacaattgtttccatttcattacactctgccaatatgcatacttccaacccccataaattcctcaaatcgaaatcagagagactcttgatggtcatatgtcggtctaggtacaaggctttgaagcgtccaagatgcattttcactccatttggaacattcacaccattaacaaactttatgctatagtcacagtgtttaaattttgtctccagttcaggtggtacacgcgatatcaaacgtcgcatatgttgaccaacaaccaatctgaaattgagagatttttgggttggtatgaattccaagaggtcagcctttgggacatatatactcaacctctgcaaattccataatccaaaaaaaatttccctcaagacgctaataacattctcattccatcgctcatcttcagggtcaacgttgatgcttaaataattcaattgagtaagatttgataccaatcctggaggaataattgttgacctggaagttccatcaaagcagaggcttaagctttgcaggttgatcaattctcggatctctattggcagatgggtgatcaaagtcccatcaagatcaagctctttgaggttctttagctgtccaatctgatgtggtagttccatgaagagatcacagcctctaagataaaatttctgaagttgtattaatttagagacagaagggggtaaatcccttatactagtgtaggataagtccaagtgttgaagcaggggcatgtggttgaaaaatgagtcagggatatccatcaaatcaacattgccctgcaacaacaacactttgagtttagggcaatctggagattgtggtaattcacatattttattgtccatcaattctatctgaacaagactatgccatcgtccaatgtagggtggctctgtcaatcctaatgcaccatgccttaggatggaaggctttgaggtgtgcaatgattttattatatcataggtttctactggcaaatagacatctccactttcatatttcaacaagacaaaacggtcttgaagctcattgatgtaatgttgtaattgccttctgtattcaccaagttcttgtgtgtatcctgatattatcttagcccaatcagacaccaagatatcatctctcaccccatttttaatgttgtgaacaggcaaactgagttcaaggcaaagcttttgtgcatcatcaatgtcttcccaaataatatttacgaatgcattgaccatgactctactaatgccaattcgatcactatcttgataatcataggaaggattcagactgcttaatttgtcaagtgcaagttcccactgtttaaaatcttgcacatacgtaagatactttgccacaaggacaatggcaagaagatgaccatggcattccttaactatttcctctgcaattttctgaatggccattgatgaacttaccatgctactgctgatacaactgccgacatagctgcagaaaactttccaaggcaatagatgatcctgggtccaaatattcaaatccattgtgcatgcaattctaaagtcaacatccttctctgcttgtgttgacggctcagttgttatcaacaccacaattccagttggaaaacgcaacttttggaggtccagcttgttgttgctatctgcatccactacaattaccaactgcccattgcttcccatgtcatcaacttccatcatcatattgatatcgatttgttcttgaactcgaacctctgcatcagtctcatatgttgaggcattgatccatagggctctaagaaaatctttgtcaattccaaacatggtgtgcttatcttcaacggctgaaactattgtgtccactacagatcctttttcagccaagtttctggttaacagtctgatatagcgtgcacagtaatccccagaaaacaaagtttgaagtagttggttaactgcgagatcaacagattgttggagaatggcttctggtattgcatcaacatcattatggctgaagatggatctctcaccactttctactttacttattatttccattggcataaatcccttcataggtcccagtgccttatcagttagtacacaccatggtttgtccatcacagtgtcatcaccagtggacaataactgagctttccattcaggaaatgcactaatccaagatcttaaaatattttcatcttctaatttcccaggataagtcaacacgaggctgataaaatctcttatcctcatcaagcctgacagctcattgtataaaacttcatctttatctgaagatgttccctctgcttcattttgaagagttgaaatattaggacccaatatagttattatatattgaacaaattcttcaatctctgtatattgtggcctgaaattttaaagaaaatgaagaattcgaaatcatcacccaagagaagcaaaacaggagaagataatagaagagtagttttcaacttttaaataccatttgcatcaaacatctatattaaatttggacccaatttgcaagttacatctttcatgagatgagagcgggttacttacttatttgggatataccaaccagggagattggccactcgagtcagagcttttctccatgtccgcacttcctccatcctctctttatctaccaagaatctttgttcgtgtttccaaaaggcttcctcgtaccatccagtctgttctcgcacatctgatggatcaacatcataaaaaataggcagaagacgtcttggcgaagtttcaatgcaattgaagatgtgtgctagttcacgcaaacaccgagttgaggaagcatagttctttgaaaggaccacaatgaaaaggcgggagccttcaattgcatgtaacagctcgggttcacccttttcgggaagtgtatgacctttgaaggcgacgatgccttttcttctgagagcttgaaaaagaaaacctgtggagttgttgttgttgttgcgtgtgtcttcaccgtggaagctgagaaacacgtcatatgcagaagagctgctctggacgctggagatagaagccattggaattgcgaaagtggaagtaaacttgtttgtgaagaaggacagaaggtgtaaattaaggacaagtatttctcgattgctggagttgggataaaatgggatccaatggaagaaaagctgtggcctgtggcgggaactactactagaaaaaaaaattaaagaaacatcaagtcaatactctatttttcttattcattttatactagtaatattttctttttcttttttctcaagtatatataaaggatcttgagggagggccaaggcccctgcttcccccataccccccaaaatccgtccatgttgaaactgatatacaaaatgattggaatgtatctgaggaggaatcgggagcaagagttaagtaagaaagattcatgtgtacctctgctgctaactgttaagaattgagatccatctcgggggaatcagaagcaacagttaagaaagattcatgcatgtctagttctgccagcacctcttgtgcacagattttactaaatgatgggtaagtgaacgcatgagcagcaccaaattgagtctctggtctccttgttcaatactaatggaggacaggcaccaaccaaaataaatactactgattaagatacatttgattattctatctctgtttaatctataacatctacattttaaaaatatatacttttgactacaaaataaaaagaatatttcatatcattttatatttattagttacttcaatgattatttttattgaacacttctaattaaatgattgagtttaacaactttaacttcaaataatttttcaactttaagccattttatttatttatgagtcttactaaatataatatacccaagaatgtgtttgataagtgattttaaataatcgataacttatttaatttataagtttgttctaccttaatgacttcatttagttaaaaaaatcacttttaagcattgcaccaacttagaattatttttgtcagatatagtttgaaagctattgaatatgaaatatttagtaaaaattatctaataaactaattatcccatatatgtgttagtctgcgtgtgtataattaaaaatgtaatagatttagatagatatggattatttactattattaggtataacatatttataaaaaaaataaaagtgaaataattaaatatacaaatataatttgttgaaaatacgatcgaattttattaattaggaaggagtaaaataatatcatttttggaaattagctgacaaaataaaaaaaaaaaaaaacaacaatcataaaacttttgtgttataagttatattattgtattttagagaaagatgaaaagaaaaatagaagacaataaattagttattccttaattagttgaaagtgatatacagaatcaaactacttaagacttaagaggttagatttgagatccatctgaagggtgagtgaggaatcataaacaacagttaacaaagatttatgatgatgactgtgtacctctgcgagtgcgagcagccgtagccgacagatattcttcacccagattttgtaaaatgatcgatcaagtgtttgattattgcttgctttatttgtttcacaatggactcaagtcaacgcgtttatcacttgagtgtgtggtgtcgactcgataccaatttaggacaaaaagtaaagataatgttattgattatgattttaaattaaaaatatatctacaattacttttacttttaatcaaatacgtttttttatcatgttattgactattaaaaaatctaattaatcacatttaatataatcctccaaaaattcaaaatcgataacttatttaccactttgatcaaagagacttaatccaatacatttgattatatacatgaaatatatgattaaaataaatatatttaaaaatctgaatttattttattatttaatgtgtttaaataaaattgatcttttgtttataatgtatttaaataaaagctataactttatttttcaataaattgatctgtacataaatacatctttttatattttaatttatcggtcagttaataacgaatttcaccaagggtcgatctatttccattataactgaaaaagctaactttttttatatgtgtttgcttaatatttttaaaaaatattaacagtttgcttaatatttatctcttaaaatttattaattgttctttaagtttttatttatttattttcatttgactccttctatccttcaaaaattttgtttttgtaatgagagaaagacagaagaaaagaaaacctaaaatttgaatatgaagaaaagtcaaaagaaattttttgaatttttgttttttaaaaattaactttttgcctcttttcttttctttctagctcttcgttcttatttgatcacctccttataataataaatattatttgttttatgatcacattgattacaaacttgagtacctgnnnnnnnnnntttgttttttaaaaattaacttttcccctcttttctttatatttttctccaatccaattagagaaaaagatcgttaattatctctgttttcttatctattttgtccttcaaaccaaatattaatcttatacattataggtattttcttttctttctagctcttcgttcttatttgatcaactccttataataataaatattatttgttttatgatcacattgattacaaacttgagtacctgagattatatattgtatacattattttggcatcttctttctggtaccatggccatagtggatttatccttattagccttctttcctatcttcaattatccttctaaactagttcgcacttcatcatgctttctttcattaattctcaagcttaatctcactctcgtgttacatgatttgatgagttaggaaatatgcacgcccgcatgcaaattgtttgacaagaagaagaggcaggacaaacagtaaatctcaaagactcacactagtctcataattctctctcaagaaagaaagaaagaaaatggttgtaaaatcaagaaacaaagatggtacaattttgagatttgagagacaattgtgaacttaagtgagtctctgtgaccacttgagataactgtttgggctgtttcttcttcttaccaaacaatttgaaatttgaagaatgaatattagagaaagaaaaaagaaggccagggagaaatacaggaagggaagttttaatttgtcaatgttcaagatgagagaaggaaaaaggttagaaaaattcctccaaatttacacatgtttatttcaataaattcttttatttcatagtttagaatagaagttaagagatctcttcttaagaggaaaacttttttaatttaattttgattttgaaggaaaatacgcacgagtttttcgtgcaataacgcatgaaccggtggtctttgtcaaaattcattcagagttatttggtatgagaaaatctttacaaaaatgagtacaaagcgatagaaattcataaccacacataatggtccctataaaaattgattttaatgtatctgcaatttaacattttgagtcaatcatattgtttggttaaactttcatgaatttgggttcgtacaatatagcatttttcattcatttatatgtgtttaatttaaaaaaaaaaaaacattggtccacatcattattaatgcgttttgtgccttatgtctttcgtaatgaataatattactgaattttgatatacttattagcgtaatttttttatactaccaattaacatattaaaaatcagtttagatattattattataaaaagtactggtttttaattatatgaaaactcattattagatttacttttgaattttagctttctcaaccttcagtatacttttatttctttcacgtttcttctctttcaaataacagaaattgattactattatatatttactaaaatatgtttgatcttataaatatttgaattttatatttatattctaataaattttttctttgttttgaatttttaataaataatatttttttgttctgtcactattttttaatatttgataaattaataaattttatgttttttattttattttctatacattattaatgtataaatatattttttcgacgttggagccaacgaattctgacataaaatgatgaaaaacatatcaccaccttccttatatctcattttttcttgtggatttcaaactcatctctttcaattcattcaccggtatttttattctcttctctttttctccgtaatctatctttacacgctcaattattagtttctctctattctgttcattttcttctccttccctcacgtgaaagaagattcgtttaatgcaagcattattttctttgaaatttatttttttcctaacacccagattatccaacattttctggcagtttgacgagcattttcgttatcctccaattcattgtaaccgaagatatcttaaatttaaggttggttgctgagaaaatattgtggtttcaatactttatttttaatgaacattttggggggtttcatcacttggaaaatgaaattgggaggagggggttaccccatattcttattatttatttatttattatgaacgaataatgtacgtaaatgcttgcatttatctaattaatacaagtgtaaaaaagttcaatagttaacacacgtacaacattgcaattttgatgtctgctgataataccaaaatttgaccttttttcttaatggaaactggatcatattaatttattcaaaacaatgtcagcaatacatcaccgaactgatagagaccagctaaagaatttgcctcctagctaaactatgaccgacagaatttgtgtgtctcataacaaagcaaacgctgaaatttggttaactatgaagcaagttatgacattgatcaattattttttaactcttattttttatgcttgatctatctatctatcttccccttaaagattaatcagactaatctgcaacggagttattgttgatcatgttaattattcaaatatatttttgtttttttggggggggttgggggagagattaaggaactaattaaggattattgtaccagaaaagttttgttattatagcatttcttgagggatttattttgttagtctataagaagatatttctttctttccaggtagtttagcttggctgctattactgaagttgcagttttgaacgattgctggcttcaagggtgccaatgaataatcaacggttggagtttgggaggcctgtctcaagtatgctatgattcttaatttcatactctcatgtatttaactgatttccccttattaaaatcaatcatttactttcttttctactaatttactccccctcttaaataaggataagaataaataatgattaagggtaagcctaaaaaatttataatcaatacttcattggttttccatttgttaatgtcctaaagcacattcaacccaatccatcgatagtgtgattgaactgaacgtccgtttgaagcttcttaatgaaacatcaaaatacttttaatagataaaactccggaggatttgaatccatatttttttattgaagttggaatgattgatcctgatatggtacttgaatgactgttgggtcacgtgatggcttatgcatttatacagtttttctctggtgtatttagtagttactaacttcatgatccctgatgagtggtttttcaccctaccagagggaatacttaaagcaagaatatttttccatctttattaggttgcatttttgttgtcaatgttgttgcctagtatttttaatattgttttattattttggtgcatgtaaggtttctgggatttcaaataatgactggatggttgtgactggaaactgtctctataccaagctttattggaatatttagtcttcttgtcaattgtttggactcagagagcttgattttaagcatagcagcttaagattatttagaaattctattacttagaaataaagggatgtttcaaattctaacagctcatcaatatacttataaagtttattaattttatcaatatattacaaaaacattttcaacatattgtatctcttgaaaaccaaggcttagacctgctggcttttgtaaaagctacaatgcaaagtaagccttttaggttaggccaagcagaaaacgaatagcctatttcttataatagactggactcatactttatgtttgaaaaacaggcttaatctgtttaaggtagatctgatgttgcttatttccatgtccaattgtcaatgtaaagttattttcacttatttttcttgagaagttgaatgattggcaggtttcttacaggtaaaagaagagtgaaggatttattgcttcaaaaagataatcgcttttgtgctgattgtaatgctccagatcctaaatgggcgtaagtgtattcaccattgtacatttttttgccgtgtgtgtgtgtggtttatggtcatggtcactgattgtaatactcaaaactggagtctgagtgttgaatattttctgggaagaatttataaagcatccttgtgattaaattgtagtaaactagctacatgaattttcctaaattgataatgtgaaatgcatattacctcttagttgtgaatccatttttctaactgcttctacaggtcagccaatattggagtttttgtatgcttaaaatgctgtggtgtgcacagaagtcttggctctcagatatcaaaggtaactattcctaatccactttacttaagagtttagaaagaagattttcactttactaataaggaatttaaactgagttccttcttcaattgtctacaacaaattgagaaactaatatacctatagatgtggctaattattttttgaaatgggttcaacttgatttgatgagaaaagaatcaaccactcttatatgtctatactcatgaaagagtccggtgaactttgctttgtcaggggtgcattattttgtttcagttttactgccttatgttgtgggggtttgcagggcagccttattcttagattccatcccacaacatgctgtgatatgatatcttgtgaaatttagacaaaagaaacactaaaattagtgatctgagactagaagtgaaaactttccaaataaatgtttcttttcaatgtactatttatttatcctgtaatatagctgtaatcactaatctttcaggaattttcattgttaaatgaataatactggtaggaatggaaaataatatcttatggatatattattacaaggtatctcttttcatgtctaattatgaaatgtgaactttcaatttagtgatgccctctgccactggatagtgttatttgagtttctcttggtctttattgtcaaatatgcacatttttctttacttggtttaaaataaaaattcagaatttgtcaacttttatattagatacagggtgctagtgattttttacatcaaagcagatagaaccaacaccttaataaccatataagtgaattagacaccacaccttaacccaaaaccttaatgctcaggtttatgagtcttttcctcacttatatggtgtttaacttgtctattgctatccgatgtggggactttaactcacacttgtactccaacatgctgaatttatttatttatgcttggtcttgtcatgcattaaaaccttgggacattattttcttactttcaggttttgtctgtgacattggatgaatggtcaagtgatgaaatagatgcaatgattgaagttggaggaaattcttctgctaatttaatttatgaggcttattttccagaaggatatacaaaacctggaccagatgccagtcatgagcagcgtgcgaaattcatccggttagatatgttttcatctaactttacactgtacatctaccattcttagcatcattttgcttgttttataaatctattatatattatatttatggtcattacaaaatgggtaaaagctgtagtcaactttatatgatatagataggaacttgtgtgccctcattgcaatttttttcttctcatgtttttcttttttcttttttaccattttgctttgctgagtcatttattttcaagtttctgttttattctggtactctttttcattgcagtccattgtcctaggttgataatggactaaccggcatggcgttgggattactcatggtagcatcatctatgatagcaatctgaccaatgctcaagttaagagtggcattttaattgtggcaatttttactgcaggttaaagtatgagcgtcaagaatttttgaaacctagtttgcgcattgtgtcaggaaaaagcaatcccccatcaagtatatccaaagggattatggatagttttcaaattactagtgattcacagcatatggtaattttattttatactttagttcctttggatggagatgtatttgtttgttggccacatgttgatttagcatatcaaaggtaaccgagttaaattgatgttgtacccagatgaaagccttctaatcgagataattatatatatatacggcacttgttgcatgcatccaactttactacttggtagtaaatgaaacgaaattattttcgtgagtggtttacttggatgtttaactgatatttatggttaaaacaggaaggaatggtagaatttattggaatgttaaaggtgaaagtgatcaaaggcacagatttagctgtcagagatatgatgacaagtgatccatatgttatcttgaaacttggccaacaggttggttgttctcagttctcattagcataaattatttcatgggaaactttcatttttaattgaagagtagtagatgctgataattttctttctgaattgactttggtgctatatgccttcagactgttaagacaactgtaataaagagtaatttgaatccagtctggaatgaggaacttatgctgtctgttcctcagcaatttggaatattgaatttggtaaggttcaatttcatcttgtcttgttagaaaatggaaacaaattctgtgatgcttatttggtggttggatatttggatcttcatatgtgatacttctatttgtctctctgtgtgtttgatacagaagatacaaaactcattctggtgtaaaaacatggaactttatgctaatggtttggtacattgcattgcagaatgtatttgattatgacttgttttcggctgatgacataatgggggaagcagatattgatcttcagccgctgataacatccgcaatagcgtacggagatgcaagaatgtttgatgatatgcagataggaaaatggctgaaatcccatgacaatgtgcttatagatgatagcacagttaatattgttgatggtaagattaaacaagacatgtcaatcaagctccagaacgttgaatctggagaattagacttagaactcgaatggatacctcttgattattagaattgaatgaagcattcttggattgaatggggaacagtaattccaaatcaataactgcacggcacgtcagaaaaaagaatgctagaattgctttcattagaatagttttcgtgtaaatgcggtgtgaattcctacctttctcataggtattggtttgaatttctcgacattatttctctcgcttggtggaaatattaatataaattctcctccaagaaatcctctagcactaggttctgaaatttaaactattaacataaactttgaagattcatattaatgatataatatgttatactaatatttgatgtattgataatatataacaatattttatattgtcaaaatttgttaatataatagataattttgttaacataaattcttaatgtctctataacagtcttacactagtttaattttcagtagaaaaaggttatactaacataacctaattcagtactaacacatttttattgaataatttaaaagaatagtaaaaaaaaattatatgaagatttataaattttctcaatgaagctgtttttttttacgaagctggtggttgaaagtggtcacaatttaagttttgtcataattgacatcaaaatataaatgccacatatacattcattatttgaacattaaaatattaatgccacatataatcatttttaactcttgtatttttatttttcatagacccacgttttgaatgtatatcccaaaatcaaatatatgtttttacagaaaaatcaaatagattatttaatgataatgagaatgattataatcatacatctactttctcttctacttcattttcgaccttttttccttatttatggtaattatctacttaattatcaaaataaattgtacgtgtattgtcaaaagtaccagcaacaagagaattagtgtaatcctagctagtacaaatgtagagcacgtttgtaattttgattcatattttttgttaccatcttttactcatactcgcgttaaaattaaagcttagttattttgtcaaaatggctaaatgaaaaactaatttgagtaaaaaaaatgattgaggaatgaagggaaaaaccacaaaggacactaaaaatcgcaaggacaacagtacaaaataaaaaatgcgcaaacgatcatcaatagagtgagcattatttgctaaggtgtctgtcacctgattaacttatcgcagcgtatgactccaagagaaatcaccatttaaggtttaaactccgttaatatgtattcctaaaaaaatacattaatatggagtatgaggcagaagaactaatgaaaaagattgtctctaaaaataaaaaaaaaataaaaaaaaattaaaactttgacttccaaattccaatgaatcttttttttagaggaattccaatgaatttattacgtgaactcttactatatatttttatccgaccatcacatgataccatattattaacaaaagaccttttttttatgccaacaaaagcccgtaaacaatacaatgtggacacattaatcccacatttttcctaaaaaacgaatatggtttctaatttttcaatcaatgcgacaattcgtagtagatatataacaatagtgcactttatacatgaagaaactcaaaattaaggctttgttttaaatttaagatttttcttaaatgaagttgatgttaaaataataattcatgtttaaacaccaccttttaaaagtaaaatgacaggcattaatttacgtcttgttcaaatggtaaagtaaaatacattttatactataaacataattattttggtcgatcattccagtcatcaaaagaagcacaagatgaacagaaaaaagtaaaataattaaataaacaaataatatcatataataaagtcataaatctagaaccgctaccctttacatgcatcatggaatcatatatagaacactagctagctagtgggaaacaaggaaaaatcataatcaaaatcaaaatgatagcaagaacacacaacactcgctcaagggttgcgtaccaccaattgcaacttgttgttgtcttcatcatttccaccttcattctcattctcaccgcaaaacgctgcgtttaacttctgctttctgtttctgtttctgtttcggttcttgaacaaatagatcaaacccgaagccactagcagaaccgcgccggccacgccgcacgccaagctcgccaccgtaagcaccttccccaggcctttgccggagtgtcctctgacaggttgccaccactccggcggcgaggcgtctccggagtccatggcccggggaagtgccacgtcggaggaggaggaggacatcgacggcgaggagtcggcgctgttgaagaaggatcgcatctccggcgaggaatgcggccccgccggcgagaatgtctggaaggtgaggccgtggtccgacggccggagctccctggcggaggaagctccggcgagaaagagtggcacgaagacagcgagggcgaaggtgactacttccatgaagagtgaatttggagtgacggttggaagaggaagcatatatagagagaaagatggaagtgtggtggagaatacggtgtcgttttgaaatgggagatgatgagagtgggagaggcttaaacttaaagaaagagaagaagagtgggttttgttttgtctgagtgtggaaaactgtctgttttacattgtgtcggaggaaaagcttacttcctcttccaccctcgccgctctctcctttgtctttttactaactcactttttcttttctttaagcttggttaataatgggataagtattctcctcaagtttattaattacaaattttttatgtttttattttcttctcattttatgtatattaaaaaaaacaataagatctgataattaaatggacacaaacatagataaaggaagtatatagtatgaacacatgaccatcaactttgttaagttcgttaatttaatcataaaatggatacaaacattactacagtctacagtcagtacattagtgaaaattctatttgttaagccaacaatttcttatcataaagagaagattttgaacacgacaagtgcgagactgcaaagtcatgtgtattataaagagttgtagaaagtgacgcaagacaatcaatctaaggtcaactctcatagtctcattaatgtacgtagatataccaagaaatctggcgagtttgtcgttgaagaaattgtaatttattcccatttcccatattagtaattgacatgcaatatagtttgcgttgttaaattagattagtggtgcgagtgcgactatatatggagaattttaagcattaagatgataacgtaatgggttttaattttatagggatgcgactaatatatgagttcagaacgtacgtgtgtgtctcatggaagctgtttgcgtgttcaagtttaaggtacctgagatctgtaattcgaatctgaaaatttaatgtttagcatgagagagacggtttgaaaaagagaaaaccaatttttaacggttaccagttatcaaaaatcatctaatatatatatatatatatatatatatatatatatatatatatatatatnnnnnnnnnnnnnnnnnnnnntctaaacatttttttaaaagtttttaaatgtcaaaaataaattccattaaataatttttttaaaaaaatacacatagtaacgatcatgtcatcatttaacaacaaaatctaacagttgcaaccaacacataatggaatgaaagttctagaactaaaaatttaattaactattttctttatcctaatcattaagtgagttcttaaagtttgtcgtgaaataaagtcaactttgacgcaaaaaaaagtgtgctgtgttaggattaaatccttaatttttaaattttgaaatcaattatacatattttttttattttaaatatttttatgttgactcattaccaatttttaaatatgttagtaagtcgtttcccttgtgaatgaagttttcaatactaaatcaaatatttaatttacatagaaataatttatgaattaattggaatgtactatcaatataaaagttttttaaactaatattcaactataaattgttgtgtatgatatataattacttaaatagttatataaaaatagtttctaatcagttgatacttttcatccacaatgcatccaaactaaactcatacttttcttggtgtagctttttcttttttatatatcgatcgaggttcttcttgttcagctgatttgtttttctatactcttgtatatgggttcttggtacccctcgtacctagcaatcaatatatttttattttctgatataaaaaaatcagctttaaatatattgttttgggtaatgggtacaatttcaatactaattatacgtgcatggaaaatgttagcaaggaataatttccgccataaccagaatgtaactatgtaagtaggaacctaccgagaagaggaaaaactaaaaaaagtaaagcaggagtgtgacaagaaattccaaaggaaaattccgaagatgctgccgggtttcactcctgttatagaattgcttttgtgaagaaaagtcgtagatcgaaggaaggaatagtataaaagataaaagaacaaacaaataaaaaagaaaaagtaacagggcaaagacatattcgaatgtgaattaaaaagatacaatccatgtatgtaccggggggaaaaagagaaagaaaaaaaaaaaagataaactccaagttcaacaacgcttgttttagtgtaattacaagtattttttgcagattatatgcttcatctataaaagctgtctagggctttattccacatggcccttgacctacgctttcattattcatcatggagtgatcggtgttcatgtactccaaaaagaagtaccgaataaagaattgatccatgatgtgtccctctccattccacataagacttcctttgatgaaaagggaaagaaatacatctaatatatacacacgtatatacagagaaagggataagatgagtgaattttaaccatataattcatatagatagttaagatgaaaatgattaaaacaactttgatcgcgctcatgtataattatgtgttcaaaagtcatcatgtattttttttaaaagaatggttatataacttaatcttaaatattcagtatagttgtatacaaatagatttactctcttaacttttatatagaaataatttttctactaaatatatctcacatatagagatcgagatggagagaatccttttaatcaaagtatctagtataaaattcgtatgaaagatataaacattcgatataaattacaaattattaaagaatttgattatcattaccattagtttagagatttaacctttttaaatagtgtcaagaaattattaaataataatcttttttgtttctcataactattctcacttaaagaaaatttattcaagacatactctgaaattaaatatgatcacctcttctaaacctagttcttcatgaaattaattcctttcactaaatccaacctccattgatcattaaacaataatcataaaaactatacaaacaagacatcaaaataaaattaattaattttgtattagattagagttctttttaatcattttattagtgcaaaatatccattaacttgataacgattgttctatgcaaagaaaccttataggcttatattatcatctattttagtcaataagtatctttgaaaatttcacgattttcttgtatcgtgacattattatttttaacagacaaataagataattcaacaaacattcaccaattttttttattaatctaaacatcatagttatatgtttgatcaaaattagtagtgcatataatacttcgctgtacgttaattatattcaataatgacattgattcaaaatttatttcccctacttcgtcttctttttttgtttcttttttctcttgaaaaccgtgtcaagaaagaaacttgaaatttacagcacaaaaataaagcaagaacaagacataagactcaaatatgcaataattattgttggttgggaaacgatcattcaacatatggagcattgcttaattggttttgttatgatgcagaagtttattataaattttctcatacaagcctcgtgctgctgattatataacacatggaagggcataactaaagcttccatgcattttcgcgccaagatgatgtttccttgtttctatgtgcatggaggtatacttggggtgctgaatcaacctcttctaaagtggtagatatatgttgttgatatgagagaacacaaccccatgcagagggaatgttggtggtgtcttgatattgatgttgttgcttttccatttgcagttttgcattgcacctactagtactttgaaactaacttattctcacaaccccaacattcctttcattgaaagattggtagggttgaaaggtagttgggccagaaaattttagttgttcgggatgtgtacaaaagataaattatatgtagctcaattttgaacatttatttatataaataagagcgagataaagagaaaaaaaaaaaagagagagagagatagctgatgagatgagtgatgtaatgagaaaaaataaagtgaaaattgaattatgaggaatgttgtaagaataatatattttttgtacaatggtcacttttttgtacctatatattttgttggcacaaccaccgggtgggttcatgggagatggattgtattccacttttgcatcattctgttcttctagtacatcagcagaacagagaacaaagtgggccctatatgtgtaaggccagcccaacggggaagcccacaatgtacattctttagtctttcaaaaaataatgttacttattaatttactatgttttaaagtaaacaattaattgataaattatttataaaaaaaaaaaaaacacaagaacagcttaacattgtattgataaaaaaattcaagggtcttgacagaaaccaggaaaactgttataagagagtattctctgtgaacaaattaattatgctattaaacactgatttcgaacaaagtttaccattaaagacaaaaataaaatagtcttggtaagcttcctggcgtaactctgatttctcagaaacttgggatccattcctttggttgtggtggtaattctgggtttcttgatgccattttgtgggctttggtacgacaggtcgtaggcagttgcttcctgcacccctcagaggacactaatacccttcttgtaacccagcaccccattgagcggccacaattcacccagttactttatttgtggcattggagcctaacgatgtaatttgctctcttggtttaaatacttttttccgaaatttaacgtttttttttataattttcgcccttttaatttttgtgttataatcttgataaaatgtatttattttattttttatttttacactattctgaacagtaaaaaaattaaacagtaaaacaaaattatctaaaagacttccaaatttaaagataaaaaaataaacacgtcttgccataactaaaacgataaaaaaaattacaaaaacattaaattaccgataaaaaaaagtatttaagcccttccattggtagtataaaatttgactcaattccaaattgaagatcggatgaaggggtattactaattattacacgtaggtggaatcataaaaaataatgatttttaacaatactagtagagaatattggttggcgaatatcgaaccataagagaaagagagaaaaggaaaaggaaaggaaggatctgttggaaattgggagcaaaaaggaaagaaagatgcaggatctgatgtgcggatagggagggtccaggtagtactacacaacacattctgctaacataacacaacataacaccgacttttctctcaaacgaacgacataattcaactgctgcactgtaaaggttcatttccaatctctaaccctaattttcctccctccaattcacctcgaggaaccacgaaacaaattcactttttctattttcgattggtttaatggaattcccttgtttaagatgctattcaaatgttccgttatctctttctctgcttgtattgaaattgggtttaactatgccctgatttttcttaatcagattgaaacttattttgaagaatgaacgtgggttttggttttgtgcttgggatgtgaattttttactctgttttatctgtatagaatgcacccgaaatacttctaaattcagttaacaatctctgttctggttccaggtttggacaatgttacgtgcttcacgaaacatgacctctgcgcaggacattactggtattttacatgaacaatatccttgatccattttattgttttactgtaacttttccatttataattagtggcttacccgcatgttttaattttagttaacaaaaaacaacacatggagcaatatcattggtgtttttgtgtctaatggaattgttacaacaacaatagccttgtcccagtctaatggaatttttaatggagaaacttctattcaacacaaattagtaaagttgaagatggaaaagatgaataactactgttgtgagtgcagtaaaatcttcttttatcttgtattttgtgtgctggaattattccttagtgaaaatcataagaaatggtaaaaaaacacctttcttaaaggaaaaaaatgtttgcataaaaactcatgtttcttactgtctagtaacttttaatgtttggctacaattcataggcaactacactggatgtttccttttctgtattggttgccttgtgaaaattattattttgtcataaaattattttcaccactcagtgtcatagatctatagctccctgtcttttgggtttgccaatgtatcttttaatcatttaagtcattgaacccatactcttgctcagaagctgcataaaatgatttatgccttatcttcatcctcttcttttgcaattacgttgtgtgtaaaccccttcgcagtccaccctccagcaaggcagaaagaggaaaaacatgaaatagacatttaggcttcacttttaatcacgtgtttgctggttttctgagaagcatcttatttgtatgtcttgcctagggactgcaatcaatatatcctagctattttatttttcgttattacgcacagcttcaccttacactatctttaaacttaaagtatcttattttagcttcaaaatttgaacttcaaaacttatttcaactttaataagtcctgtactcctctaatcctgtaactatttttgtttttaactaactcctgcactggccacccgtctgacctacaaaatatgtcaatatattgttattgctttgctgttcattagagtagaacctatccctcagcaactctagtgtactctagattctaaccttcactgtgaaaatggtgaactgtaataactaataactatgaatgtgttcatatattatattggaaaaaattcaagtctcacattggctagagatagtgtcaagacagagtatatcagtgggaggcaaccttcaccccatgagttagcttttgggattgagttaggcccaaacccacattttaagatggtatcagagtctatcctagattcatcaaaaaaggtcacctaccatattatccacgcaccaaactaaaaagtgttgggcgtgaggggatgtattggaaaaaactcaagtttcacatcggctagagatagtgtcaagacagagtatataagtgggaggcaacccacatcccatgagttagcttttgaagttgaattagactcaaactcacattctaagatattatatgctatagccatactacgatactaatacctggcacaagtgaagccaaaatgtctatttcatgtttttcctctttctgcctcgctggagggtggactgcgaaggggtttagactttagatagtattagtctttaggtattattcatattcatctacttattgtgattactcgcctttcttatttctgctttatctatatcagttcccccttaaagttgtctctttgaacataagactcctttgcattctgacttggtaagaaatgaagagtcttttgtatctattgcttgagaatatttatgttgctttccctctcctttgtatttctttttccacctttgtttatgattctctgtcttcttgactgatctattgaattagccctcatccaggctaattttttaaaaattcataaagggattagttttagaatgcaggagtttgaagtaatatcttgttatgtagctgaggaaattattttctagcaaaaaaagtgtgcattaagttgaagataggtaaatttaagatgaaaggaatgaaattatatgggctcacatgtttggtagttgagagatttgggcagaaaaattcacttcaaaataatgttttttgacaatcactgtttcttctgtatttacaaactcaacataaatctggagtttgtgttcctattgtgatatatgcttctacgttctgattgctgctcatgcattataaaacactaggttcgtttttaagatattgtgttaattttttattgagcttctttgctattatcctatgaagcatttcacttgttccttcactccatcccaaacacaaatttactgtctaaacctatgtagcaaaatgtctatccagataatgaagatgatggacagcggcagtcagaatcaccaatgcagtccccatctgcaaatggaatatttgatccaggtattagtacccagaatgtcaatgtacagtatgcagcacctggccagcttggaactgggcatgcaatggtatgaacttcaagctcctttgggttctcttctgattttgtcttggaagaacaaaatatgtttcttcaatgatttgacatcatcagtccaatttgaatcagcgtcctaatatttaattaattccagaaatactaaggaatattttgttttgcaaaggccatagccattgtatatcatccaatgtgtcttgcctgttgtaggtataagatagacacacattgccgttgttttgtcattgaagcaaattgactctgaatattagcaaatcatgatgaaaattttccccaggtttattcttcctctaattcatgaataaattggctttttttacatttttcttcccgtgaaggtggcattcctattttgacacagcaagctaatttgaaagtagccattaaatttcttgatcttgtaatagttaaaactgaatttcttaatcagtacctactttagcatgcgaaaacttaaggcttctggtcaggcaaataatgatgcaatctgaagtttttcttataaaagtgttctttagaggttgtgttgtggtgaattaaggttgatttttaagaaaacagagtttttttgtcatggatattgaaggcaaatgaataattgcccgagtgagtactggtgtcagttgttatttagatgtgatattaaagtttgttcagaatcactgtttgcactagaattgttcttggtatttgattttaaaatgtaaatttcttacgcattgtactaatttatgttactttcttatctaattgaaggcaccacctgtgtatccagatcctgacccttactatagaagcatctttgctccctatgatacacaacgttatcccccacaagcctatagtgggcagccaatggtttgctctaattctttaatgttgattctattaatattatagtggcttcttgtgtctttttccgatcctccaattattaaaccttatcctgtgctaggtccatcttcagttaatgggaattcagcaagctggtgttcctctgccaactgatgcagttgaggagcctgtgtttgtcaatgcaaaacaatatcacggtatattaagacgtagacaatcccgtgcgaaagctgaatcagaaaataaagttataaggaataggaaggtatatcattctctgcatctttatagttctttcttatgataccaaaagtagtgttgttattgttgtaagctgcttgcttctcttctctggaagtacttacttgttcttataataaatcttgcagccatacttgcatgaatctcgacacaagcatgcactgacaagaccaagaggatgtggtggtcggtttctgaattcaaagaaagacgagaatcagcatggtgatgtggcatcagctgacaaatcacaatccaatatcaatctcaattttaataaaaacgatcaaacttcatcagatagggcatcctaaactacagaaatgatgataccttagacagtggggatctattttatgtcacaagatcaataatacctgctttggatatcccacttttgcttcattctggctttgtacaacactgtaggtggtgtggtaggtagcgttaggatgtcgcacgatgcaggtaaaatgtaaattgttgttattttatcaaatattgtcctttggtaggggagatttttatggtgatcattcctttgtatttggttctgtagagaggttagagattggtgttttgtttggttgaatcgtatttatttaccttgctagtgacagttgaagaagtttcaaccatgattggtgatggatattgatagttgtttttgttcagtgattaatagatagataaataaggttcacatgacttgctgatattggaatgaatcccgtctttggttagaatttgtcctaccacccttgcttgaaaaaataaatgttacatatattttatatgattcttttatatctatatatatctttttaaaaagttataactaaaaaagcattttaatttttttacctgcattaacacgttaaactcaattatatcactattttataaccatattgtttatgaaaagaaaactaaatttactaatgataaatactcaattatatattttataaaaaaacattcaaataagttaatttaatattattatataataaaaatacatttatcatatttattattacataaaattagacatgataatatttataattctaaagagcagtcaaataatgtaatgacaaaatccggaatatttctttaaaactttcataattataaaatactttaacataaaaagataaataaaataaagaatttagtatttgttatcaataactattattttgtataaaaaactaataactattattttgtataaaaaatattaataactattatttaattcattaaataattataaaattatattccannnnnnnnnntttactaatgataaatactcaattatatattttataaaaaaaaacattcaaataagttaatttaatattattatataataaaaatacatttattatatttattattacataaaattagacatgataatacttataattctaaagaacagtcaaataatgtaatgacaaaatacggaatatttctttaaaactttcataattataaaaaactttaacataataagatgaaataaaataaagaatctagtatttgttatcaataactattattttgtataaaaaagtaataactattattttgtataaaaaatattaataacttatttaattcattaaataattataaaattatattccaaattattatcnnnnnnnnnnttattgctatctatatctatatatgtaatcttatttttctatttttaaaaaaataacaccgtaaaaagtaggagattaaattgagtaactcatttaatgttggttttaatctttatcatttatttttatgaaatttaataggtaataataattatttattataataattagatttcaagaaaatttaattataacatcaaagagtaactatttatctatatattatatctaaaggaagtttgaacttttgtgaatagtcggatcgaaattttaatttgtcaacaatcattaattgatttgatgtataaaaaaaagtttaaaaatttatctannnnnnnnnnnnnnnnnnnnnnnnnnnnnnnnnnnnnnnnnnnnnnnnnnnnnnnnnnnnnnnnnnnnnnnnnnnnnnnnnnnnnnnnnnnnnnaataaatatatatcatacttaaatatttgtgagttattagatcaagatttgagttccacaatagccattaatttgactacactacttccactcaccctcccctccttaagaattacataatcttttctttcatctctccattcaatttcatcattttttgcatcctctttgtgaattctctttgcatcttatttatcttgttaaaacaattatttttgttacttttgcatcttttcttgatgaattttctttatgtgaatttatatcttatttatcttacatatctttattttgtgtgcatgtacatatttttgaattagaaaaatgattctttagtttgtgaataaatttgaggaatcatccttatctttgaaattgaacaaccatgttatctctaaaattgagttataatctttatagtgtattttttcttcttcaggtgttatgacaatacttgatctgaaacatagaaaaaagtaaagcaatgagcaattaattgatagttttggagattcagaaaataaaaataagcatagagaaataatttactttgatcggaagagggaaaacaaataagcactgagacacgcgaagagaaaaaaacttttgcattttatagacttttttattgtgttttctttttacgccttcgttcttttattaaagacttttgttatgtatttcatctcttctcctttttgtataacgtgtttattctttttgtgtgttattatatgtggtatcatatatgtcatgagtatgttttatttcaatgcttgtatgagtttattaggttcatttttaattgtggaagttcataattgtcatttctcattgtccgtgtcttataacgtgtcttttacttgagaacccatcatccactgttgacgatgcttgccaccaatgataccccgggtactttttcataggttcctgcaatggcttggtttccttgctttatcgagagaatgaccaacctatcccattaaaaaaaaaaaaaaatctaaatatcaggccagttaaaataaatattaaattgttaagcgggcatagtttaaggtagaaagagaatattttattggagggaatagtaaattatttacaggttcaataaataattgccctcactttcccagatcgtatgttatctttttaataattgctttcaattttccataaagtatgttatctttttaataactgcttatccttttatttttgtaaattttttcaactaaattgaatgataattgacagatttttattcaaaataatttaaaaataaactgtattgttttacaaaattaatttagttaataaaattaatttttaattaaataaaaaaatatttgaaaataaaaatacagttagaaaatctatttaaaattgatttaattcttataatcaatttaaactgattcaaaataccaatttttttgttcaaaatgatttttaaaaaaattatattattttacaaaactaatccagttaatagaaataattttcaactaaataaaaaaatatttgaaaataaaaaaaatagttagaaaatctatttaaaattgatgtattttttataataatcaatttaaaactgattcaaaataccgatttttattcaaaatgatttttaaaaaattatattgttatagaaaactaatttagttgatagaactgattttcaattaaataaaaaaaatatttgaaaataaaaaacaattagaataaaattattttgaataaaaatcattcggttatcatccaatttggtttaaaaagatgcaaaaataaagggattccacatattatggaaaagtggggacatttatttattgaactttaaatagttcgctactccctccggcgaaatattctctctctgccttgtcagtacataattcgctgcacagaatagagaactatgtgtatgcatagttcgttgggatgtctaacgaactatgccgcgtggcagtttgatatttattttgactgacgtggcatttagatatttttttttaaatggggtaggttggtcattgtcttatcattctcgttctcttgttatacatggatccactgaatacccggtccggttttggaacccggccactaggatcatgtccctaaatttgtctcacttaactttccattcatcccaggatcatgatattggctttgggtttggtaacgattatttgagtgacacatacaaggtggtcgttctccttttggacattaaatcaaacaattgggaggttagggtttgcaaaacaggttcagcccgctaggtcagcccgcttaacctgtaaaaaaacacggactgggttgataatattaacccgtaaatcaaaagcaaggtgggccaaatgcagggcggggaaggacgggtcagcccgttgggtctatattatttaaatattaaatattaaaattaaataaatatatttaacatattttgaaatagatatattcttttaatttatactctttatactctcataattaacttctaagttttaatattaaaatggttatgataatgataatttcaaataattttttattactagcatattacacttttagacagtctataaccgtaaatttcatttacaaatgatgtaattttgtgaattatcacataacatcatttatttatcattaattttaaattatttacttttatttaactttatattttttttaattatcatacttgtatttttttataatttttttgtattttgtttttgaaattgacttttttattctttttttatttttgatacgggttgatctgcattaaagtgggatgggctagcattttcagtatactttgtaaaagccggcccgcagtctatttttttccgggccgcccggtttgccatccctatggcaggtgagagttgcctgcttgggtgacactgacacttgttggaggagaaatactgtaactgtaacttgccttgatttcccactttggggaggacgcgatggtaagcttgtgagtggcactcttaactgtttagcagttcgctggcaaaccgatactgtcaatcagttggtaattttttcgtatgatctaaacaaggagacatataagtatttgttgttgcctggtggtctttctgaacatgctgataaccctagtcttggggttttgaagggttgcctgtgtctttatcatggtcaggagcaagtcagaacccgttttgttgtttggcttatgagggaatttggagttgaaaactcctggactccgtggctgaatatgagttttgagcttgttcagctctttccaccttggcaattattggcagcgcctttgtgtatgtttgaaaatgatgatgtcatgttgctggcaaactatccacgttcccaatacattttctataatcggagagataatagaatagtccgtactgaagatttcaacgacaaagtgccgctgttctcccatgatgattatgttcaaagcttggttctacctttaagctaccctacatttgcttgcatgaatttatgttaaattgtgtaagtgatttcagaaccttgccatttcatgtatcgacaggacagagtgtgtgaataattttggtggttccttagtttaattactttgttggatgattctatttctattggcaattgctaattgtgtgtgtctgctttggttttggcttaatttccttttcctgattgataccttgttctcatctccagtgaggcaagggaagtatttggggttccacttgaagtgcgtttagagagtagagatactcattgacataaatccactgaaaaggccaaggtcactgacagtaacaatgtattgtataactgtataagttatacatgtcatgtggctaatttgtactcaattatggttgttgcccttttgagttttgacaacaatgaaacaatgtatttttcttattatggtgcaaagtactttctttgttttacaaagttaaactgcggtgcatttcattactgaaacacatttcttataatggatatccaatacaaatgtgtacatttcattacttaaaactttacttttttgtttacatgggcatctatagttataggaagattaccaacccactctgatgcaaaatagcctttactgccaggtaccactgttagcacagttataacttggtctgtaaatgctataaaattcacatttcaatcataagatgttaaggtgtacatttaccaactcttgacactaaaataaatcatgtgctgtaaatttacaatttcaagccttccaccttggtctaaaattgctgtaacttacccagttacagtggagatatctgggccttggcagtaggaatagtttgtaatatgagtcattaggctaggtaagtttcaggcacattgcaagcgataataaggtattgtataaacagctgatcacatttttaagacttagtcttacatgccttacttgtagcagataagaaaaatggccaaattgtagctcatcacagcatactcaaattgatgtatttaataaatgcaacaggtgataatggaattattggtgagcagggtaaaataagtagacagtattcttaattttttttttaaaaaaaaatctggattcaaagtacaattgtggccatgtttactccactatttttattatttttttataatatttaaggggattgtagtaacttgaataattcattgacttcatatagtgagtaaacttaaagaagaaatattttagttttgttgaaaagtgaaaaggcaatagtatagagtatattaaccttgagtgatattatattttattttttatgggcactgttttgatcaattgaccttgagtaatgcattacgagttaaaatactccttacctgacatctttgtatttttttttctctcactctctcctttaccctctcaagtgttcaacctttgtagccaccgccaaagatggaagatgttgtcgaggacttgctaggtgtccatgtgtgattttagtttcgggtttctaatcttccatcatcttgtttttttacttcgcattttgtttttaatttgataccaatttctagggatccaaaaaatatcttttattgttaaacaatgtatattagtacaactataatttattttaaaaaaatgaatattcagttgaggaaataagtatccaattttgacctttcaattaagatgagaaataagaggaaggaaggagaaacacgtaccaagcagaaaacaacaacacgagcatatatacgaacaaaattcctttcataagaaaacccatccattacgttatcctttctacactacactgccaaacacaacataactacttccggtcaagggacaaatccaaggaaacactaatctagaaaaggcaataattttagcttattcacgcgtgtctatattgatatttttatttgataacttttttttatatttttataaacataataattatttcggaaatggttcttggtacgaaagataatacgtattaaaagtatgaatggcatgacacacgattccctttcatattgactttctttcagcaatgagccaaatatttcttattaaaatttcaatcgaagttcaagtcttccaggccttctcttcctcccttatggtagtgataacaaataaataatgtaaagcccacttataattgcaagtttttttttccttgtatttgaaaggcatcatttttttgcttattttatataggtgtccttcttatcaatgatttagggaccttctaaaaacttcataatcgaaatgtataatctattttcagaatatataccaaacataaaggacccttttgtgtcatagcacttgtgagagagcatacatgattagtgggaatctcggctagaatcagaaaaaaaaaaaattatattttatttttctaataatattttaaattattatttttaaaataattgcgttgcacatcagaaattgaaaacacacggctacacatcagctatttcttgcgttttggtctagtacattgctgtttttttatatcataatttatgcatcaacccaatgatagaaaatgcttttttcaccttagtttttgcttttcacgccccaaactttgtttgttatttctcattttttatacacctctgatggaaatgcaattttggtgtataatatacacaatgaaaatatgttttcactaaattaaggggtgcattcttcatataaaatgaaaaatgcattttagttatacacaatacacggcaaaaacacatttatgttgtataattaattttagatataaaataattctttttaaaaaatacctttttcagttcaacagggacaaataagagaaattacattaaaataaaagcggagttgacactccactaagataagctaggagcaacaaactcaacatagaaggaagttttagattcatacttttttttattcatagacaaaaggaagttgctacatcataaaatcatcctgagcatcacatgccaagtttgccaacgcataccttttagtagtaatacaaaatctaattaattatgacataactttctccttttaatagtaatcgaatatgttacaaataatttttttttcattgaaattaaattaggtatgatagaagttaacatttataataaataattgaattaactatgatacaagttactttttttaatagtaaccatcgattgattaaaaatgataatttgtgtcatcattaattcaaaagtattttatatcataattatttatattactattataacttttctgatcaattatcgttaagataatttgtatcataaagttcaccattgatgaaaagagagtattcaaacaaaattgaatgtgagggagtagagagagtgaaggcatgaaaattatatatatgtggataataaacaaatatcataaaaggcgcaaactctatatatttttgtttggagaagaccgcaaaatattttaatatgagtgactatattttggtttaaaatgaaattatcaaaagaaattgtattattttctattacagagggtaggacaacggataatacatctgttatatcgtatcggcgaaaaagaaaaaaaaaactttataacaattgtaaaataactatcatatcttttcgtatattagccaccaaaaaaactctaaactctctttggaactcatctttatattcttgatttttttttaaaaaaaaagtgaacatatgattctttttaagaggaacacgaaattatgtattcaggtttcttagggaaaaaaatatttatgtgattgatgagataattaagccaacagttcatatagaaataaataaatagaaataagactcgggtggtgtatgtaataccttgaatttcaagtacgtaactaagcctaggttaagccatacttaaagataaatgatgaggcttagtgtatttagaggaaggcttgaggaggagaggagaaaacnnnnnnnnnnttcatatagaaataaataaatagaaataagactcgggtggtgtataaatgtattagtattttttttaatcattcggttcattcaataaattatgactaatttagagtttagttaaaaaaataaataaagactaattatttttatcaatatttgaattcgagtaatatctataccattcaacattaactatttatcacttatgttgaatcacttagctataagtgtattagtatagatacaagatgataccacaaaaataaaaaaaggataaataattaaatttgtctttgaaagtgtaatgtggtgacaaataaattcttgaaagatgaaaatataaatttagtatttgaatgtgtaaaaaaataccataaattagttttgtagttaaatttgtgagactaatttgtcattaaattgtaatgttcaagaatcagtttaataataaattgtatttatggaggaccaatattatattaagttacaaagtttaagatcaatttgtcattaaattgtgtgcatgattaatttattgtactttttacatattcaagtattaaatttaaatttttcatgggaccaatttgattatttacccaaaataaaaagaaatgcttaatcaaatttttaatacttggaaaatagatcattttcatattactatctaatatatttttttccaaataagtacctaaaaaaaattatgtttcaacgcattatctgtcgttagtcccctttcattaagtgatgacgtgacagacaaaatgttaagtcattaaaccttatcactaaacacgtaagcagatacaaccatgtcattatttattaatttattaaaaaaaatcatccactgctgcctacccttctcacttgctacttttgtcattatcgccgccattgcatctacaccaaagccgtcaacgacagtgaaacctccaccattttcaagtatcctttattttcattacccttccacctccaaagaacaatcaatttagatcaaaattaaacctccattctcaatctggatctcgattgtgatacaccttataaacgaaagttttagatttttaaaaaaattctaaaattagaatgcaaatttgttttaaatgaagtgttcatatttagatcctagcaccaaacaacaccatgaaccaaccctgaaccgttgtgaaccaccacgaaactcatcaccaaaaaccattgcaaacccgccccaaagcacaacgaaaaagactacaagccactacaaaatccaccactaatcaccaccgcaaacccaccatagcggcaacaacaatgaattttcctctctttcttagatctagaaaccagagtttgttcctttctcaaattagaaaacacacacagataatctcttttatcaaatccacagaagaagaaaaaagaataaaaaaacaaagtgattctttcgtcggaactgggatcccataacgggttaggtttgagtttagagtccagggtctaggaggaataataaagatggacaacaccacaagtttggtggaattggtaaaagggggagaaagtgaaaaagaaacaaaaaaataataataaataatgacatggtcatttttgtctatgtatttagtgataaagtttcatctgttacgtcatcatttaattgaagggaactaactatatatattgcgttgaaatataattttttttcaggtatttagtttaaaaaaaaatgaatgttaagtaataatttgaaaatgatctgttttgcaaataagaaaaacttaattaagcctaaaagaagaaaaaaataaaacaaaataaaaatgggcttgggcgaaaagcgttgctgtatggtagtagtagcggtcatcctcattgggcgatggatggatagatagatataaaagactgcctcagtccgtagcataagagagagcttaaaaccctttcgctgcgcctcacccaatcctaaaaccttatctcttcttcatcttcatcttctctcaaaattcattccaatggattcttcttcttccgacccttctcttccccaaacctctcttctcgtctctgaccaatcaccctctctccctcccggttccgactctgagaacgacgatggcttcgtaagcggtgaagagggcgatttggaggccgaacccaccaagcccgttctcgtcaagtcttctgagcccgtcgtcgattctcctcccgacgagtcccacaggcccattgcgaaggtgtccggggacgatgatgacgacggttccgttgttgaggatgcgaacgacgtcgttttggaggaaggcggcgagaaaaaggaaccgggggaggcagtgaaggagggggattttagcgatagtaacgaggtctttgtggaggcctctggcggtgatgatgatattaaagagattcagagtggtggtgttgctgtggagaatggagtcgaactgagtggtactgataaagggtttgaggctgctgctgctgttgaattgaatgaggaagatgcgaaagagaaggaggtggaggagaaagttaatgacggtgtgaccgataattcggattctgtggtggatgaaaaaagtgagggtgttgatgttgaaaaggacgatggtggtggtgtggatgctgttgttgatagcgtcgaggttaatgtgttggggtctggggttgctgctgttggggatgaggtgggggttgatgagtctgagattaaagggctagacgagccggagagtcgtggggtgagtctggataatggttttgagcccattgagaagggtgaggaggaggttgttgataagcttgttgatgggggtgatgagtctgctgttgaccttgtacttgatgatcaatcgggtgctgaaggtgttgttgttggtggggatgatgtgtctgttgagaatggagttggtggagatgggttgacgagtgacattgttgttcctcccgaggaaggtggtggaggttcggagtttgttgagaaagatgaggtaaagatggagggtggtgttgttgacggagaaaatgggagccgtgtggaggagggtgataaggaggaggaggttggtcatcatggtgacagggagattgatgattcggcattggatgggaaaattgggagccatgtggaggaggttgaggagattggtgccaatggtgacagggagattaatggttcggtgtcggatgagaagggcgatggagtggtgtttggaagcaccgaggctgccaataagttcctggagaatttggaattacagcaatcacgtgccagcgggagttcccgggatgatgagaggattgatggccagattgttactgattcggacgaagaagaggagactgatgatgaaggagatggcaaagagctgtttgatactgctacattggcggctcttttgaaagcggcgtctggtgcggaccaggatggtggcagtatcacaataacctctcaagatgggtccaggcttttctctgttgagcgccctgctggtttgggatcatcgctctcgtcaggtaaacctgccatgaggcaaactcgtccgagtctttttactccttccattagtagagctagtgccatttctgataccaatttgagcgaagaggagaaaaagaaactggagaagttgcatgaaattagggtgaaatacttgagactgcttcataggctgggttttactacagaagagtcaatagcagctcaggtactgtaccggatgacacatgttgcagggaggcaaagtggtcaaatgtttagcgtagagtccgcaaaggagactgctttccagcttgaagctgaggcaagagataattttgatttttctgtaaatattctggttcttgggaaagcaggtgtgggcaagagtgctacgatcaattcaatttttggtgagacgaagaccagcattaatgcttgtggtcctgctactactgctgtgaccgaaattgttggggtggttgatggagtgaagataaggatttttgacacaccaggcctcaagtcctctgcatttgaacaaaatttcaatacaaaagtcctgtccgcggtgaagaaattgactaaaaaatctccccctgatattgtgctctatgtggatcgcctggacctgcaaactagagatatgaatgatctgccaatgttaagaacaattaccagtggcctgggttcatcaatatggcgaaatgtcatagtcactctgtcccatgctgcctctgctcctccagacgggccatctggtgccccattgagttatgatgtatttgttgctcaaagatctcatatagttcaacaaaccattggacaagctgttggggacctacgacttatgaatccgagcttaatgaatccagtttctcttgttgaaaaccatccttcttgtcggaaaaatagagatggccagaaggtgcttcctaatggtcaaacttggaggcctctcttgttgctcttatgctactcaatgaagattctttctgaagccagtaacgtttcaaaaactcaagaatcaccatttgaccagcgcaggctgtttggttttcgtcctcgctccccaccacttccatacttgttgtcttggttactgcagacacgtacctacccaaaactccctgctgatcaaggtggggctgacaatggtgattctgatattgaaatggctgatttatctgattctgatctagatgaagatgaggatgagtatgaccagctcccaccatttaagcctatgaagaaatctcaggttgctaagcttactaaagagcagcagaaagcatattttgaggagtacgattatcgggtgaaacttctacagaaaaaacaatggagagaggagttgagaaggatgagagagatgaagaaaaaaggtaacactaaagaaaatgactatggttacatggaagaagatgatcaagataatggaagtccagcagcagtgccagtaccattgcctgatatggccctgccaccatcctttgacagtgacaatccagcttatagataccgtttcttagagccaacttctcagctcctcacaaggccagtcttagacaaccatgggtgggatcatgattgtggttatgatggtgtaaacattgaacagagtctagccatcatcaataaattcccagcagctgttactgttcaggtaacaaaggataagaaagacttcagcatccacttggattcctcagttgctgcaaaacttggagagaatggatctgccatggcaggctttgacattcaaaacattggaaagcagctagcttacattgttagaggagagaccaaattaaaaaatttcaaaagaaataaaacttctgctggtgtgtctgtgacatttttgggtgaaaatgtgtctactgggctgaaagttgaggatcagattgctgtggggaaacgcttggtattagtaggtagcacaggggttgtgaagtctcaaactgattctgcttatggtgccaatgttgaagtgcggcttagagaggcagattttccaattggccaggaccagtcttcactgagcctttctcttgtgaagtggagaggagacctggctttgggggctaatcttcagtcccaattttctgttggacgaggttataaggtggctgttcgggctggattgaacaacaagctcagtggacagatcactgtgagaacaagtagctcagaccagcttcagattgcccttattgctattcttccgattgccaaggctatctacaaaaacttctggcctggggctagtgagaattattctatctactagattgtgtcttttgtttgcgttactagcaaggaaacgtagactacgagtttatcatatcatgttgcttcttttcgtgactgtcttaaataatgagttttttttttttttttgtagtttcgtctagactattgactctcctgctatagtagtgcttttatgtgcctgaaaattgtactgcaattgagatggaacctaaaaggaattgattcataaattttgttagcatctatttgaataatgttgatgtcagattatgctgttatttctgatttctttgctctataacttatgtttgttggttatacattgaaacctgattgctgagcaattcctgaatatgataatgtgcctagtttgattggcccagaaagtggtttgcaactcgtggtatctttatatatactattggctaaaggctttcttttttctcccattttatttctttcttttcctttgttttttttcctaatctccagcatgttgtgcattcttagatttctctttatgataattaacaatgcttgtctattgacatttatttgagcatgatttagcttttcaagttctgcaaatggactgaaatgcaatgtgaggtttttgatgtcctttacggaagataattttattcgagttaaggtaagatcattaatggatgacaaagcctaacgtattacattatggagaatatgatcgaatcacataatgtcagaatttattaattaataccgtttttcccattaagatgaacattacgaacttgacatcatagaataagactcaaatcgataggaaggtttgggcctgcccatgtcatttatgctgagctaaatctaggtacgtcgaggaaacgaggtttgtaattgcttctttttattaactttctctttttatttgtgtacctagttgtgtttttggtgaaataaatttaaaaaatatcttatttcctaagattaaggtctggagtttattttggtacgagtaaatgttccaacagaaaccactctagatatatattttatgtttaattgagttattgataggtaatttgttgaatgagaggttttagtcctatgatttcatttgttcaaatcaaatctccatacctttataattaattaaatctaatttaatatttaatttataatcaattttttaatgacgtgctaaagattatgtgagttgacatagtgatgtgacatttaaaaatgggatttgaaatatgcaaaaattgttttatccttgtttatgtttggttagaaaaaaagagggtttttttccaaaaattaatgagtttaacatcttcatttctttattttaatttaaatatttttctttctttattttcttttacacgatcaaactcacccttaaggttagatttgacctcactatcctttaacccacacatgagaagtattaaagacgaagaaatggataaacaaattattctttgccgtcattagtaaccatattcgtcaattatttgttaaccatgagggacctcaaagttcaaaagggaactgctggcatctttttgttgcaagtatctgattgtcttactgttacaaaaaactgcgtggtttttgttttcttatttaccagaagttgttggatcaaagaaaacttcttagtcatccttgttatttgcccttgtccacctatgaatatgattctattcttatcattaataatgctgctaaaaggttacatgacatattcaacatatatatatatatatatatatatatatatatatatatatatatattctttcatcatttaattacacggaaaaacagtcaaatcattatagacttacactaagcactgtaatcatagcccataacattcaggcatttgcttcctacaccagtcaaaatgcttatacacccagcaganatatatatatatatatatatatatatatatatatatatatatatatatatatactctttcatcatttaattacacggaaaaacagtcaaatcattatagacttacactaagcactctaatcatagcccataacattacctttcagaaaataaagaagcccatagcatttaggatttaagtagagctcctttaaattgtggtataatataatataatgttacaaaagaggcgcatcatatatgaattagaactaattaatcaataaatgcatttccctatcatggacaatcagcacttctacaatcagcctacttgtgtttttcttttatcgctcttctaaacaaaagatatagtataacaaaatttggaaattgacggagtcaaattttgtaacaattaccaaaagtgagtaccgataaaatcatgtttgggaatcttattcagaaatacaataataatgcttttgacttcaacaacttcttaattagttgcgacccagaatttgaattaccaagaacatgaaaagtttagattcataaccttttgttcacatatgaattgatactgatcgtggaatgaaccttacgttacctgctcaccattcttcaaatagcatcaatttattctgatgattcactattataagcgcattccaaattctgaagattatgaacaattgtcttggcggcttgacttgattccagcaataatttagtagtataacttatatataaaaaatacatttcagtccagaggacttgcatgatttcaatcctaagttttttttatagacattctagttaaattatggatgatattatcaagctagtgtgtgttaatattgcattattcttaatcccaaacattaaaatccacaaatttgaagtaaatgaatttcttattgagtatagaaatgtgtcaagtcaaattctatacccatatcatatctccatgaggcctaacaatttcagggagttttcaacatagtcaacacccagagtaaaactattccaaacaaacatcaaactttaggcgctctgtgttgcactaccaacatcactataagacatacacatttaatatgtctagtcagaaatatggccaccaaattaatcaattttaagatacaagtctaagatcaagttgaatgaaaatagagggattctaaaacacattttacctaaaaatacaattaaatacaataaaattatctgaagaccagttttttatgtgaaaatcaattggctaagttaattttattataattattaaaaatgtaagatagttattataacagttaaattatttaattataatattaatacaattaacttggccaattggatttccaaaaaaaaatatatggttagttaagtagagaaatttattatttattattaaattttgggtgatatgtatttttagtcaattttatctagtatcttaaaattaatgaatttaattctcacatttttaaataactttttgatgtaacatgatagctatattatacgtaacaatcatgtgattaacactttattgtagccacgccaataaataaatttaatgacattataagtgaaagtttaattccacaagtttttagaaatgcaaggatcacttttattaattttgaaatacaaagagtatgatcaaatctgattaaaaataaaaggacttaaaatatatttattttttaataataaatgactaaattaaccaactattggaatgaattttgtccatctcaacataatattttttattttcatttttcctcgctaaagctcctcacatgagcttccttcttctctctctctctctctctctcttatattcacgtgagcttcctttatgacccacccttggaaaatatataaataaatataggcaaatattaaagagttcttgcgatattgattaaaaaattttaaaaaaatatttttattaaaatatgtaaaattatattatttatgatttcttttacactttttcttacaatttttacaataaatgttttttatttttttttaattaatatcctaaaaatactgattagtaatacccataaatataaaagaatgaatcaatttatgcatgttgaattgatgatacaagacagccaagttgggaatttaattattaatcgatattatgtagggtaaataaacacatcggagtataacttgccatttaaattcacagtattttgttaaataccacaactaaccatgacaataataaatgatatcttgttataattaattgcagtgacattacataaacaacctatatataatcgatttttcagactcaaaactgtcgacatgccctttcacacttctttccatctttatatttccttccaattaagtatctcatcataggctttccaatccaagcttctaatataggtgcaatgtcacacaaaaagagagtaaaaaactctatccaatttctatgtatatcaacctagcttacatatttcttgtcgtgcatggatccctttgcgacacctcaagaacaagagtaagattcaggaaaggtgtaaaatgaaagtaatgacattctagagtgagaaagttggtgggaggggtcttgtaaagaaaatagaccatcactcatcacccaaaagtctaggacactcttttggtgcatgtcaagaaatagatcatcacccatcgtccaccaaggaacaaaaaagccttaggtccccccttgggacttgaaggggatctctaccttaatttatatttgtttttctattaagaaattaatgtattataatatgaaaaggagatttcagtggacccaacacgacccattaccctaaaactcctcctctccaagaagttatgggcacaaattgatttatccagaaggatgcaatcatgcaaagctatgcgtctatttaattacagattattacataagataattttattgatttttatataataattattcttaaaattatatttattactataactttttatttacagtgtacttttttttatcttgtcctattattctcttttgatatgaaacatgtaaacttttattgtggtccaaagtcagcaaatgagaaataaagttgagggaggagatcttccaacccaatacaatgcttacatttcattcaggccaaggcatccctcactcaattacgtacgtaacgtgggagtatttcgtatgaattttcatagttggcaccgaacgaattttcaaacaaagatgttgctagtatttcgtacgaatttgttaataccaaaatgtcacaaaccaatcatgatgtgtataaatcacacgtatagatgagttaaaatgaaaaagaaattacctgtcaaattgtatgaatttaatttgtactcttttgtctagtttgttttcgtattctttatcattttccaatttcaaatcctcgtaatgccgtaatgggccaagtaaaaaggtattcattgcaatttgccttattatggatttgttttctagagaaagtaccaaaagtaaattgcattacgtgcatcgcccattttttttttaaaattatgattggatttgattgtttaaagaaaggaagacttctagttttctgctcaatgttttaattataaatcatttttaaatgtgtaaataaataattttaaacgttaaataaataagtagtataataattacaaggctaaattactaatgtaatctctctatttatttaattactttaacttgggctatctattattaaaattgtaatttgtttccttaaatttcaaaattgatgcaatgttctccattctgcaatatctttttttaaagattgttatttttatgcatcagaaaatttgtaacttatgtttttttatcaactttttttctttttaacttcataatagtattttttatgtaaaagttaaaaaaaattattgcataaaaacaaaattaattatcttaaaatcacttttaagcaaatttatgcaaacaaaagttggtgtaattataatcgattatttaaataatctaaatttttataattattcgagacgtacccctttctcaattataccattaatcaaggaaataattttattaaaacgcgttcttttatattttttaaagacattatcatatgatttttaataaaatctttcctcttttaattatttaaccaaatatccttagaatacttgttagcaagactctaaatgaaaaatggtaaatagaaaaaaaaaacttaataactaatattttatatnaaaagattacatttgttgattttcataaaaaaaaaacctttaaatgacatttgtaaaagaacaaagatagtaaaaaaatagagtaactaatttaacatttatatatcattaacggatactataaaagtggttgtaggattagaattcaagaccatcaagttagaattactgtgtgtttggataccaagcataaacaatctcaactccaaaaaccatagtgaaaacttgaacagttaaaagtaacaaaaaagagttgttttgttgtgattgtaaaaaataattgaggtgcgataaacacaccgtatactcaaacacgcattcaattgattcacatactcaagtgattaaaaggaagactaaaagcaaaatgtaaattcttaaacttagtcctactaatcaatatggtttttgacattacaaaaaaactgtactagtatttatttgaatacatcttgttgtggcagatgtacgtgcaattaggttattattcccttaaccgcgagatgctgtttttaggtcaaagttagcaaacctgcaacctttacaccctacaccacactctgcaacaaccagcacaccaaacgcttgtccatatcttcctgtctgctatctcccttcaagcctaacgtaccatgtctacatccccatctctctctcatctatgcacatgcatcacatgccccccactcatgcatgcatcacaacccatcaacatttaatttcaaaccatttctcatgaaatgaaatggttttatcccacggattaaccctatacccaaattgttaccaccacctttttttttttctttttcttttaaattcacatgttgaattaactactttgcacctaacgttttgaaataacgaattagctaattttgtaccaagcgttgctttaattgatccacagacaaaatgtactttcaccaatatctttgtcttgctcaaagaggagatagattattaattaagcatttttttaagccaaaaggcttcctcattaaatagatgcgtcatatactattttttcctctctaattctgttttaattttattacaaaagtaatacagaataaatagtaataaataatcatcaagagggaggaaaacccctatcatctttaaatataatttggaaatcataatttaacttaataaaattgatttcttttataaagaatctaactcagttaactaaatataaaattagtatttttattcttacaaataaaaaagtatttataatttatcagaaattattagtatctcaatatcttgttattactttttacaagagcatctgagtaaatttttggctattatttttacaagactccttctatattttctattactttaattgttttatttcaaggtcaggttttacttttggtagtagttcttgatatattctaggaaaggttttaggatttctggaagtttttctataaatacttttagaaaaagaaaataaaaagaagaaaaatgaaatgagtttttttataagttaaaatgagttttttattagctactttgtaaatgttatcccatcttttgaagaagctatattggtaaannnnnnnnnnnnnnnnnnnnnnnnnnnnnnnnnnnnnnnnnnnnnnnnnnnnnnnnnnnnnnnnnnnnnnnnnnnnnnnnnnnnnnnnnnnnnnnnnnnnnnnnnnnnnnnacgtatagatgagttaaaatgaaaaagaaattacctgtcaaattgtatgaatttaatttgtactcttttgtctagtttgttttcgtattctttatcattttccaatttcaaatcctcgtaatgccgtaatgggccaagtaaaaaggtattcattgcaatttgccttattatggatttgttttctagagaaagtaccaaaagtaaattgcattacgtgcatcgcccattttttttttaaaattatgattggatttgattgtttaaagaaaggaagacttctagttttctgctcaatgttttaattataaatcatttttaaatgtgtaaataaataattttaaacgttaaataaataagtagtataataattacaaggctaaattactaatgtaatctctctatttatttaattactttaacttgggctatctattattaaaattgtaatttgtttccttaaatttcaaaattgatgcaatgttctccattctgcaatatctttttttaaagattgttatttttatgcatcagaaaatttgtaacttatgtttttttatcaactttttttctttttaacttcataatagtattttttatgtaaaagttaaaaaaaattattgcataaaaacaaaattaattatcttaaaatcacttttaagcaaatttatgcnnnnnnnnnnnnnnnnnnnnnnnnnnnnnnnnnnnnnnnnnnnnnnnnnnnnnnnnnnnnnnnnnnnnnnnnnnnnnnnnnnnaaaatatcataaaaatgattgtcaacctgattgtgattaaatcaaaatattggtaaacttttattaaattattctgtcatattcaaaatttggtaaaatataatttaatctcattttttatcattataagtataatattataataaatacttaaaaaaaatataaaaataagtataagttataataaatataatattaattaatatacactaataattttggtaaaccttataaaaaatgagaaattaagttaattgttataaaaaatgagacccaccttacatttattaattaatattatatttattattattttttctattttttaaatatttatgataatgttatatttataatgataaaaagaaaaaaaaaataaagattaaattatattttattcttaaatgaaacaaaatttaaaatctgatcaattagtctaatgaaaatttaatgacatttttttagtctaatatattcaacacccaaattgataattatttttatgatatttttgttggtgttatattaattctttcattaatattaataatcaaacttaatgaatgaataaattatcatatttttttattttcaaaaattaaaatttttattttttggaaatgaatctgtgaattctctcatatattttggcatcacacaatatcatataaagagatcgagacaagggttttgcaaaaaaaaaaaaatccaagtaaatttaaggagccaccactgttccaaccagcccctttcattttacagtgcctgtttgttttttcgtgtttgcattcactgttctacagaagcaaaaaagagtgcttttgttccatctctttctgtgggtgtgtctcgagattggtgtgtatgctcaagataaagctcactcactcagtcacagcagcaacaaccctttttccttaactcttgaaactgtgttcaaagtttggattttgagagagcatgatctgatgaaggaatgtggaggctctcttgggggagagggcaaggaagaagaggactactgaaaacaagtgttgcctttttgaaccccaaaaaatacgtttttttttttggttttgttgttatggcactttgtatgcagagtcagcagagagattcagcatcaaacaagcagctcatggattgtggcaagtatgtgaggtacacacctgaacaggtggaggctttggagagggtgtatgttgaatgtccaaagcctagttcttccagaaggcaacaaatcattagggagtgtccactacttgctaacattgaaacaaagcagatcaaagtgtggttccagaatcgcaggtagggaagaagagaaccaaaacatgcatatcattgtttggtttcaaccttgccacatcataaaaaaaaactatttttgtcatgttttgtgttgtgtgtgtgtcctatggttgaggatgctcaagggtgtttctgagcttctttctctttgtaaagttgagttttttggtttagtatatttgttattcagtgtttttttttgcctttttttccttttcaaaaatggaatgtcataaagtgatgtttcattatttgcattttttttaaatgtgttatttgggttcaattttagagaaaacagagtaagtcatccctcttgaaaggaagatctactgggaaagttacttaatttttgtcattttccttgtggttatccaactagttaagatcgatcgtttttatttatttatttccctcgaaaaggagtttcttttctggagttgattaaatgggagataatgacagctgactgttcatttttgttgatgagtttttttactgctttcttctgaccttcatcatttttgttttagaccattttctgatgtttctgtgtaagatgctttaacagaaatgttcatatgatcatttggcttttgttttggtgttggtcatagataagaggaaggataataacagctgattttaacgacttctcccactagattaatcagttttcaactttagcttctttttttctttcatttttcctctttaaagattttttttttcaggtctctaatattttctctttttgaattacggaagagaggagattatgttttgttctacactctaaacttttctcgaactaatttttcaccttgtccctgcattagtatttttttattaaatcaacatgcatatatcatgtttccaaccttttatctgcaattctgcattgactgattaaaacaagttttagtcttggtccgatagtaggtatctgaatttagtatgtaattcttgttaaggatattcacatgtataatattcttggtctgatagtgtaagggacttgtccaatagtaaagtgggaaacttcaaagagtgaaatgaataatgaatgattatcatacaatgttatggtaaattgtatgggaaagatgacctactctacctgccttacactctgccaattttcttctgtagatgtcgtgaaaagcagcggaaggaagcctctcgtctgcagacagtgaatagaaagctgtctgcaatgaacaagttgttaatggaagagaatgaccgactgcagaagcaggtctcacagttggtttatgataatggattcatgaaacaacaaatacatactgtgagtaactttatctttgagtgattgctcttctcaattatcattctgaatgttcattggtgtaccattctatctatatacaagtatatgtgtagtgtactattttattgttattgaagaatctcatttactggtttcttaacaggcatctgctactactactactactgagaatagctgtgagtctgtggtagtgagtggtcaacaccaacagcaaaaccccaaaactcagcatccccagtgggatgccaacaacccagctgggtaagtaacttcataatgcaaacaaatttgtttaattaatatatactccttcaccatcgtcacgagtctccaattctttattctgccagtcttcttgcaattgctcaggagaccctggcggagttcctttccaaagctactggaactgctgtcaactgggtccagatgattgggatgaaggtatgacttattcaaaaactcttcttcatggtcattgctggcataaatgtattggtataattatattttgcctcattttttctgtcttaatgtagcctggtccggattctattggaattgttgctgtttcccgcaactgtagtggggtagcggcaagagcctgtggccttgtgagcctagagcccacaaaggtattatgctgtaatgaagcttattcattgcagaattattttctttgctgaacaatgaaaccttgttttattgaactaattgctttccacatcatctcaggttgccgagattctcaaagatcgtccatcatggtatcgtgactgtcgatgcctcaatgtattgagtgtagtccccacagggaatgggggcacaatagagcttatgtacatgcaggtctactgattattttatgcaaaaaaagaagttgaactgttgtttaaattacttttaaattattcctctgttgtttttcttgatatttaaatttgatttttttccagacatatgcaccaacaacattggcagctgcaagagacttctggactctcagatacactactagtttggaagatgggggtcttgtggtactgagtggaatcttgattgttgtgtttttcttgatttactgtggcttctttcctaggaagagtttgtctcaacagaatgactattatttttttggccttgcagatttgtgagaggtccttgacttcttcaactggtggccccacagggccagctgtttcaaacttcatacgagctgaaatgcttcccagtggctatctaattagatcctgtgagggtggtggatctattattcacattgttgatcatgttgatttagatgtaaggaagattatgctattcaaatcattttttaaatttccatatatttgaacttcttcttcctacgtatattaactttgtttttgatgtaggttttgagtgttcctgaagtactgagacccctctacgaatcaccaaaattcttggctcagaaattgactactgctgtgagatttcttctaaccctgcattatatgtttcaccatgacaaaagctgttgatttaaatttcaaatattattgtgcaggccttgcgacatgcaagacaaattgcacaggaatcaagtggagaagttcaatatggtgggggtcgtcagcctgctgtcttgaggacatttagtcaaaggctttgcaagtaaggccctttcatatttggtggttgcatagttgggcatatgattaatcactttgtcttcatcaatccttactgaccaataattttttaaaatttgatttagagggttcaatgatgctgtcaacgggtttgtggatgatggttggtcactgatgggtaatgatggggtggaagatgtgaccatagccataaactcatctccaaacaagtttttcggttcccattacaatacatcaatgcttccagcatttggaggtggggtactgtgtgccaaggcatcgatgctgctacaggtacttctcagaccaatctatgaggaaattatcattgttctctaaattaactctagtatagtagcagcaatcaattccaagaactcttgctccttgttcccccatgtcccaacctgctagaatcttctggatttttgtagtgtttatcttcattatactcaattataaaacggtgttctgcagaatgttcctcctgctttgcttgttcgttttctgagggagcatcgttcagagtgggctaattatggggttgatgcatactcttctgcatgtctcaaagctagtccttatgcagttccttgtgcaagacctagtggtttcccaagcagccacgtcattataccacttgctcatactattgagcatgaggaggtattaatcattttcagggaatgattgatgaacttcattttataatttttatttatttatatggtcattttccacccactacaatgatgcagttcttggaggtagttcgtattgagggtaatgcatttccccctgatgatgtagctttggcatgtgatatgtatctaatgcaggtaaagtcatttttgtgtttgggttgtttgtctgcttatcttatttaagcaggaacttgatgttactgtgaatgatttttatgtaccttattatgcaatttgatgtggcagctgtgcagtggaatcgatgaaaatgcaattggagcgtgtgcacagcttgtgtttgcacctatcgatgaatcatttgcagatgatgctctcttactgccttctggtttccgcataataccattggatcctaaaacagttagtgacatttctcagtagcttgatagttttaagggaattggtcatgaagttattttgttaggttttttaatgtttaattgccatttcactacttcattttatctttagtttgagggtctaaaattagcatgaaccatccaggttgtgaattcataattgtcatatcttggtgcttcttttatacaatttatatctagactgtgattggccgactaaatttatctatcttgaagtcttagttcacatttgtttcaatgaagtaatttgggcttttagcaaaaccaagcctttcttacagatgctatgctactacatttgagcatgcattgactaacaagatttcttttttctgtatgttttgcttttcaggatggtctggcttcaactaagacattggacttagcgtcaacactggaaacaggatctggtaatgcccgctcagctggtgaaagtgatttgaataactacaaccttaggtcggtcctcacaattgcatttcaatttacctttgagaaccatttgctggacaatgtggctgttatggctcgccagtatgtgcgtaatgttgtgcgatctgttcagagggttgccatggcaattgctccctcaaggctcagtacacagttggggccaaagtcacttcctggtccaccagaggctcttaccttagcaagatggatctgcagaagctacaggtttacaatcttccattaatcttgtctgtaagtctatttttgtaatgattaatgtattttcctaaattatttgatatccttgtcttgagttgtcttcaaggttagttaaagtacctatagagaacttaccttgtatttgttaacttggttattcaccttgtatttgtaatttttagctgtgtcctgtaattgtctgaaaaaggctcagtttcagatacaaattgcacaaatttcaccatcttatttcttgtgtctggtatgatatagtaaagattgtttttttcaggctccacacctgcacagagcttttcagcgttgagtccacatctggtgatgcaatcttgaaaaaactttggcaccatccagatgcaatattgtgctgttctgtaaaaacaaatgtaaatcacttgctgcatctatataatcctaatctgcctcaatttttatttttttccagaagtttcttgtttttagtccaataaactccagcaagtaagacatttgagtgccaaaattatgcaggcatctccagtgttcacctttgcaaaccaagctggacttgacatgcttgaaaccactcttgttgctcttcaagacataatgctggataaagttcttgatgaagctggcaggaaggttctctgcattgagttctccaagataatgctacaggtgattcacttgtaaactaacacatgtcctagtctttttagggtgtactttttttttattggcaaatgttagttgttagaatgttagttttgttagctgagggggatcaaagttttgacattttctccattcccttctcccttaaccaatccaccttatatctccttttagtgtgtacttgtaagaagttgtttacatcttttttcaagtcttgactataattagtgctcttatcttatttgtcctttttcatatcagggatttgcatatctgccagcaggaatatgtgtatcaagtatgaatcgaccagtgtcttttgagcaggccattgcatggaaagttctcgatgatgatgattccaatcactgccttgccttcgtgttcatgaactggtcttttgtctgatggggggggaaccatcatttagatactttattatatctattaatttatattttgagtactttactaagatattgtcacatcaacatcgaatgtaactaatgtctggatttcgtgaactcatggttgtgtgtgccattagattagctttgctctatgcttttacgaaggatgtacctttcttactatataaactccttgttgaagtatagcctacttattcgcaaaaattatcctttagtggcagtttagtttttatatttatttatgtagagtagttactcagtcttttaatttataaatctcacatatatctttttggtttttaattgaactctgcggcattgtgatttatgtagaccttcctagaataaggttttttattgtcttgatatctttgtagatattagagtgagatgcaaaagtaggattcttttcgttttaaaataagtcagatttagattgtgttacttatattaaaaaaaaagttaataaataaataaaagtgataattttacaaaattagttttagtattaatattacattgaaagactatagggatatttattgggaatattagtaaataaaagtaattaatatcatgttaaaaagttaaatatgaaatttactttggataattttttttctcaaatgtgatgcttaatttggtaaattcatgaattaaactgcgaatgtcggacttgaatttgtcaaaatactgcctaaaatatgaaattacagaaggtatatcatggattgactgcttaacaagcttgatttgtaggtgtaatgtgttgaattagggtttttctttgcaccttattttagaggcgttttgattttgacaacagatccagcaggattgcattgttgcattattattgttcccggaacatgtcatgattgtgttttacttgtttgttgaaggaagcgtgtcttgatttcgacagaaatcaatataatgagtgagatcttagaaggaatgttttatgaccaaatttctacctatttatcgtttgtatttctatttatggtctgaggaaattcaactttctgtctgtcacaattctttcttttcaaacaagtaatgtgaaattctgaactcccttgcagtgggttttgatgttaaacttaagattcaagtagtgcctcttccttctagagaatttaaaactaagatatatttttcttatttaaaatattacatctttttaaagagactattttaatatgattgagtgtgttaacaacagtgaattatgattgaatcaataataaataccacttaccagtaaccaaatagatttatttatttatacttgaccaggaaaaactatgacacaaaaattagaagtttattgatcactaatttgattaaaatgtttgtgatgtgaagcagatttacaagtgacaatatgaatttcctagaaaagtagaaaaataagaattgtatccgaatctagccatgtaacaggtatttgtattgtacctgtgctataatatgcatctggagcagcttgaaattttgtctcagttacatatttgccataatggattctctttgagagagcctgcagtcacaagaaaacaaaagttttcatcaatgtaacagccaaaatttatgattacaatctctacttactaagagaaatttctgaagttttcaaaataaagcaagctaaatgttgactaaggaaactcgcaagttacaataattctctctatggaaaccaagcactttcatgcagaactttgcacgaggcctgatcctgttttgggagtcaccacatagtacagagtttaccttcttaggaaaaaatttccactaatatgatcctgttataatcaagatcactttttttgttctggcgtgaaaatgattgtttcaaaaatatcaaaccaattggtcttgacattgcacatgtaaaaagttaagttaaataccaaaatagaaataaaaaaggatatgaaatgatggtatagaatatagatagatacgtatataattgataataatactatgcttcctttaatatgaagtaaattaaataattcaaaacacaaggtggtacaacccctggacatcatttcaatatagaaatgaatttaactaaaaggcaactaatgtgtaccagcaagcatattgtaagtttacaacaaaaacaacatggaatctagagttaacatcatctcccttcttggctattagtcggataggaactctgaggtgaaacctcaatactttatcattatattaattgaatcagcaatagggtgcaacacctattcatacacgacaaagaaattcagtatagatgcaattagcacataaaagatgaaccaacaaattcattaaatatgtagcacacacagacatttgctagatttttagcaacaatagtaaataattatttcatgtcacctgactaaatagatagcaatgaaacaaacacatgctgaactctgaatcaaaccatgcctaaactggaaggtgaaaattaacatgaacaacattaatattgtaaaccaataattcacacaataaaattacccatgataaaacaaagtaaactcgaatagaaaattgttaggccagccaattgatctcctaatattatcaagggattttatgcttatctatttttgttattaattagacttgtctgtttgttattaatttgaattatatttgctttgaattgatgataacatatcaagttgttatatacaggttgttaacctgaatcttatcttttgtaatcttttgtgtatatatacacctccaactccaaagcaatagaaaggctgagtcattatcattcaattatgagtaatgatagacgtacaacaatttcttcaataaattgtacaacgaatgtcgtgtcagccaaaaaaatcaaattttaattttaattttaatgaaaaaaaaaccatcggaagaaattatatgggaccaccaaggcaactatggttctaataagtaattttgtgatacatggacaaactaagatacaacaaacagaaaggtaacagtgttatcttttaacagaataatatcaaatttaaatcttccttaattaaattaacccaaatcttttacaaatcacatttatgattgatatcaaattcaaaactttcaaaagtaatactactctatcatcaagtttgtttatcttctcccacgttttgaaaatcataaatgttttgtcattgttataccgtgaaacaaccacgaaaactctgccattaattatgcatggtttatgcatggttgcttcccagaacaacaatgatagaggtggagataagagagaccataaaacatgaaaatctgattatttgtttttggtataaaaaatgtaattagtattattgaacagtgattattttttttgttaatggaaacttaattatcttttttgtttgttattaaaattaaaatttgattttttttggctgatgtaacatttgttttacaatctgttgtaaaaaaatttgttcgtctatcattgctcttcaattatctactacaaaaatgtttaattaatttaaatggactaaaaaaacagtacaaagggacattgataataaattattatttgcgtacacatccttactcttattgatatagtcaagactgtcaagttctgaccatatccattgtactccgatgcctccaaatttcatcattttaccttattttaataattacacagagcattggtcataccgattttgtactaaagtttacacacgactagaatagagacagttaggtaatgccaatgtcacactcatcactcatgctttgtctgtttaggaactttttttttatttagatggtgaaaattggttttattttttttaatcattaaatgtgtgtttggattatcgttgatagaattgatgttagatcaacttggttttaaattaacatgattttatataattaattttgaagtaacttaatttttgtttggataacatatattaaaaaattgatttttcaaaaaattaatgtttgaatagtttgagtcataattgattttaagtgtcaaattattaaaatagactttaatgtctttgaatatttatttgttattataatttgctgtttatatatatatatatatatatataaacaaattaaaattaaatagatatataactgacctttgagctactactcttaccattttttaagaaaatgatttttttatatatattattaactgacctttgagttaagagagtccagtatagtattatctgtaacacagcacaagattccagcacaatgttcgtactactcgttcaatgcagatcctatgaactatgaagtgaagatggtaataatctttctttaattgagagaacaagtaaatataataataaattttcaactaccaaaataaatgaaggtccaaggaaatataataaatgcaaataaaaaataagaagaaagaatgtacttgttcaattacttaagtatagcattttgcaaaaagtataaaaagtacaaggattttattgtggggaatatatacataatgatattttatattttcttgaatcaaaatcactgtaatttattgtggttacatccccaaaccaaacatgctctaaatgattgctaaaacccaaccttccctcatgttcttagatggcatgtctcaatttttttttaccttaatgactcttttcttctgaataatatcaaaaataaataaaatagcagcatgtgaaaaacattttgtcatgttttaaacatttaaaaaaattatatgtaaataaaaataaaatatttcatgtattaataaatcacgtgtattatattaaaatttatttatttattaaaatataatttataaaatattttcaatgtaattttttttcaaaattcataagatattctagaaaattattaatattgttttttccattttggtaacatttatgaaataataataagtattttagacattaaatacaaattatcaatatatggctaacataactttagaaaaataaattaagtattaataatataaaatattttttatattattaattaatcataaattatcatataaaatatatattattataataaatatcttaaaaattatactatcattaattttaattgattaagtaaaattattttatattattgatggatgtgattaaattctaatttttaataggataactctactgtcattgtagtaaaactttttttatttgttttcttactaataatattctaaaaacttagacccgttagtttattcaggtgaatggacaaatgttttcaaacaatataaaaggtcttatttaatttttatgttccacaaagcccattttcaccctatggccataaacactttctcacaccacaatgcagcacttgcgttaactgccagaaatagttaattaaatttttaatacaggaagatcttgcactggaagtgggccccactggatcttcagctgcatttaaagctagtataacattagcatccatcccatgtatgtatacgtatgaatgtttatgtatatgtcctaaacatatcatgcatcattcgatattatcatgcatgatgaattgatcacatgtcactacttttttgtgtctgtgttttccttttatttttccgaaatttggattgtccccggttaagtaaaaggacccttaatttttttttataagataacaatgatacatgaatttaaatcattttaattacaaatacaaattacaaacaattacatttaaattatttttatttgaaatattgttttcactttgttattttttattaatgctaaggctaaagttaaggaacaaatttatcaccgcattaatttcaaaacaggtaaataaatagactaacttttcaactttacaaaatcaaatattaagtatatgaatcaactcatataatattattttaatttaattaaaagtttcgaattcaaattttaatacgcaacacttaagaagaattttattatacataataattttatctaattcgataaaaaaataaaaaaaaaaactccacaaactcggtctccattccattttaacaagttggatccctttatttattcctctctcttatggtgcctctttatgatcgtcccaaaagtaaacacgtagatcttattagcatcaatgtgtggggaaaaagagagattcaaaataagcacaattttgcatgcagtgtttaatatggcttctgagcatgtaaaagttggaaagatatactgtagctctcaaaatccaaggaaagtgcgtatctaaattcctagctcttgtaatgtcacgttagggagtgagattccagatgcaaaaaagaaacacacatcgttgtcttgcagccttgcaggttttaaaagactaatcaaaacaacaaattaaagcactggagaagaagaaatcaaatactagtggggtaggaggatatttgtgttctgttctgtcatcatctgtgaacttttcactgttttaaacatttccgtgaactcaactgggtattaatttctacctcttttgcttcaaatatgtaatatggtacataataatcttttggttctcttaattggttactgtaagatggaaacaaccggctcgttcgtgtgtgtgtgtgtgtctgaataggactttttggattgttttgtttgtttcggttctagagttaataattattgttgttttattgtttttgggattttgtgttgggtcacggctactcaccctgtgaactttgggttaataacttttcttttgtcataacgacaatgaccttaagatttaagaatgctataaaacataacttattacagtagatcattttgcaattagggtttctttggtttaatttgtgatttaaccactctttgaagatcttttaactgaaaatcaaacatacacttaatctcttaaagtaggattattaattttattatgtactacctctagacttaaaatccatgtatacatatatatatatatatacatatatatatatatataaaagacaaaactaaagaacagaaggcagcccataaatttctggactagtcatgataagtgagaaaacttatagtatatataggtagataaataggtcagaaagggtggctcatgcggaatgaccgaatgatgttaatattaagcactttcatattgtccatatttagataaactccttgctaaacatttataagtaaagaaaaaaaaaacttaaaaggaaattgctaacatactttcacttttttcaattggaataggttaacaataccaaaagttttggacaaaaaattagttttttgttttaataaatttctttaggaatattaaagtcatttagtatttattttatttataaaaaaaaaactctttctctctctcatctgtcatatctctcatcgatctgttaccttacctctttgcatttcaccaaaaaatttcagacttcaacatttcgttaactctcaagagtttggttctaaaggtgacaggaacaccatcatcgactttgggggcacctttccgttcattcaatccgttaagtatttggttgcccaagaatttgagaacctgttggccaattacaatagaaccaaaaaaaaaaaaaatagaatgaatgttaaatgactttaatatcccttaagtaatttattaaaacaaaaaaaatacttttttttttccaaattttttggtgtagataacctactccaactgaaaaagtgtgagtattagtaattctcaaatttaaaatgtccatatacttattcaaaagcaaatttagaaacagtttttaagcattttcaatagactcttgttatttacaccctcatactccctttctacctcttaactattcatcatattatttttcttaaagaattacacattttttattttttggaaatgtatttctaaaattacatatacccattttgaaaatgtatcttcggaattataattcataatttcaaagatatacttttgaaatatgtatatatttttaataaatatcacttaagaattaagatgattgatgagaaataaaaaaaaatgattaatatttatcttatatccatatttgttagttttattttcattctatcattagttatctttaaatcttatctaaaatcttatttttcatcttatctttattatcctttaaattctaattttaaattatcttcactatatattcattatataataatgcgttttcatcattactatacaatattttgtatttttcttcatgtaaaaaggcatttcaaggaaagttcatcactaacttcatgtgggactgaatcattgatatagacttgaattaaatgaatgcacttaaaggaaataaactattgtcaaaagctttgctttgtaattaaggtgtataaaatataaagttaatgatgattgtaccttgaaacatagtgccacatgaagaaaaatacaaaatattgtataatgatgatgaaaacccagtattatataataaatatatggtcaagatagtttagaattagggtttcaagannnnnnnnnnnnnnnnnnnnnnnnnnnnnnnnnnnnnnnnnnnnnnnnnnnnnnnnnnnnnnnnnnnnnnnnnnnnnnnnnnnnnnnnnnnnnnnnnnnnnnnnnnnnnnnnnnnnnnnnnnnnnnnnnnnnnnnnnnnnnnnnnnnnnnnnnnnnnnnnnnnnnnnnnnnnnnnnnnnnnnnnnnnnnnnnnnnnnnnnnnnnnnnnnnnnnnnnnnnnnnnnnnnnnnnnntaataaagataagatgaaaataagattttagataggatttgaagagtactgatgataggatgaaaataatactaacaaatatggatataagataaatatttatcatttttttatttatcatcaatcatcttaattcttaagtgatattttattaaaaatatatacatattttagaggtatatttctagaactatgaattatagttctcaaaatacattttcaaaatatgtatatatacttctagaaatacatttccagaaaacaaaaagggtgtatttctttaagaaaaagggtataatgaataattgggaggtagaaagggagcatggggtgtacttagaaatatgaagtgtaaataataagagcctttaatattagaattttatttcatgaatcttgttaacttttaacgtgatccagatccagaagcataacaaattggacccataggctcggtttggtgctaatcaaacgatgcgttttgcggtgttaacgaaagagaaagacaatgaaggaggtagagcaagtgcagttttgttttattggttgagaagagaaaagaagagaataatgtcgtcagagaaggaaacagagagtcggaagttgggttcggaagaaatttcgcgcgagttcaaaaccctagtcagctccaatgatctccactcccttaaccacatgcaacacaccatgtgcgtgtcacaatctccaattcaatttgtttgtaactttgtgtgttcgttaattgattgattgaaatgtgtttcagattgggaaggttgcaggacagcaatgcggtcttgtcgcatttcaatgacttctctcagcactgcttcgctgagatttccggcgacatcgctagaaacacgcgtgttttgaagtctgtcaagtctgaccttgattacatctttcagaaactcaggtattctttttcttttcatagccttggttactctccatgttagtaggtttgtgaaatatgggttccaacttttctatcattcttgtaaggctataaatatatatatgaccatattagttcatcaatataggccaagtttttatactctttactattttgagtaactagcaagtgatattagagccccaatcaaaatggcctgattctttatagagacttggagagaatatggcaacaaatagtggatttttgccaccagttattccaaagtttggtggactgattacttgagtatgctcatggagaattttctgcaatctaattgaggaaggagttcaacatagtgaagcacaaaagaaagccattgagggtgcaagagtgaaagatatgaaggcaaaaaattatctcttccgaagcaacgggatcaatgctagagaccatttttgaacaatatatatctaaaagcatctaggacgcctggaagaaaaagaatcaagggacagtgcaagtatagtgttgggaatgtcaattgcaaatttccaaactttaattcaggtgagtggttttgagatataataaattgatgaggaaaaagtggtgactattttgtgtgtgtgatgataatttctaagggggttgagtattggaattgtaagaaatacttaatcggtgtttatccaaaaactcttcaaaagtcatttgccgccattataagagaaaatccctgtgaagagaagagacaccaccttaagttgaagggggttcatatgaaggaccgaaaatcttaaatagaagagatgtgaagcaaagatgtgagaagatctcttgtgagtgagagtgttatcatcccttgtaactcttgagtgggagactcgcgtttgtagggtgataaactatttggggagggtattttcaaatttgtccagaaaacttgtaatcttatttgagatggtgcatatttgttgagatgtttttgtggatgtaggcaggtggtgtcaaactattaaaattatgtgtctttcactatttctatcagtagtgtgttttttgtgtgtgatcctatagtcaatctttcttgctgcagtttcttgcacctgtcaaatcatttacataaggagaattttgaataattttaatcctgatcaaagtgatggcacaacaattttctatgacagttattcagcaattgagctttcaaaaagtcatgtttttcatggccatagctagcacatagatgtcagatttcactttcttcgtgatctcacagggggtggagttgtaaagttagtccactgtcatactcaagaacaatttgcgaatatagtgaccaagccattaaagcttgatttgcatgtaaagctttgaggtctttgaggagtatgtgttggtccaaatgtaaactgaatgatttgatattcagtttaagggaggatgttgaattgttaacatttgcattagtttgactttgaactagtctttagatattttagtgatttccctctcttttagaaattagatattgacttccattttaatctcctcattagtaggttttactgggctgcaactttatgttattcttgtacatctatatatatggttatattatttttatcaacatagctcaaattttatctctctcactattttgagcacctacatgtaaaaatgtcctaatttgaagatgatagttgagaagggagtaagaagcaagtggatgattttgttttatattttgaagaacttattcttatatgctatgttcaaagggtgttattgtgaagctaggttatcgatagcggccgtcgcgatcgtggatgtcgtggccgcgatttggtttgttagacctaggtcgaaaatacactcagtatttaaagggctgggttacgttcttgtgcgacttgccttgactacttccctgtgcgaccttcgttcactccgacagtacctgctccggccagcagctcttccttctccggcggcactttgttctccttctccgtcgaggttctgttttcttactttctttctctccttcttcatcggtgtctcacattctcaccgtctctttcctttttggttacctctgtttcttctttttcttttcgttacttctgtttcttcttctttgtcttccttccctttccttgtcgttttcatgtcctctgcctccgccgtgctcaaccgagaaagagagaaatcgagaagaagtcaacgaggtctcatgggttgggagagaaagagtttttttataaataacattagtgtttttgttttattgggcccccagattgcttcttgcactccctttattgcttactttactccttctggttcatttttttttaattaaaaactggacttgtgttttaatgccaactagggataatctattatttgtgtttatgattttccttttattatattttattaatatgaaatacactctatatataaaaacattaaaatagcggtcatcctgctatccgctatcccagtcttgagggcggccgctccgctccgctatctgggattgataactatgttgtgaaggagcatgtcagatataaaatcatttatattgtgctccacctaacaacttaagcctttggttttcttttgtttgaaaattaatagacagatattcatgtaactccttcattggtcatgctcctagggaattagcagtcattcttcttatcaacatatcacaggatgttttaatggagatgggcctgctgttccctctctctaacagaagaagaaactggctttaacaagtcataatcaattctgcatatatttatttatttatttatctttagttgtctgaaatgaactgtcactgtacacctatgttgattcctgctatttcctgaggttgatctacaggaaaccacgaatttctcctctaattggttctatctccatactccctgtatgggctttctctccggtctcaagcaaatcaagtttatcatatatatttgtctcacaataaagattagtttcttaaatttcaatgatgtcccaaataaatacattacaataatacataatttagttgaattgttatacttagtgttggaggctttggttgtgatcgcataagcataaagttttccgcactttgttattgtctcctcatgtttttgttcatatggtgaatgcatttttgggtttcgacacttccatgtctctgtatctggttctcaaaatttcgtttttggacctgatctggcttgacaataagctagctggtgtattagtctaagatcaatcagcagctaggattttagacaaaaatgggtaaggctacttagtgtagagggaaatactttagtgtagtatgtacaggtgcaaagtgcaatgtgtctgcaagtatgcttttttatagatatctgtcttcaagttcaataattaattaaatgcctgaaataggttataattttaacagttctataaaatgaaaattcctaatattagtatacatatgcggctattgacattatatgtacataaagactagatgattttcttttatgttttctcgctataatgcttcctataataagtgttttctctagtatatgtttgggcctttggcacagtggctcggggtttgtaaacaatctaaattgaggaagaggtaaaaattggaggaaaacctaggttggttattgaaccatatgttgaactattgatggcattggtaacaacaggaaatatggtgaaagagaagcaagtaaacagtaggcgtgaaggggccccttgcccactccccttccccccattgaaggggcctcgaagccaaaaggcccaaagctcaattgtggcttcctaacaaataaagagatggaaacgatgataactatggaattgggtcttgtgttatttgcttagatgcaccatttctctgtatgttacaacttacaagtatcgagtatcctagctagatagctagtatctacattttgacgttacaaattactaagttttaggtcttcacccgaaaaaaaaaattacgaaattgaggattgccacgtgataaacatgatagatgataaagtgaggcaacagtaaaagaaggattgaaagagcataaggtaactgtatataatgtaattaaacaaccacctatctgtgcatgctaccccccaaaccacacacacatttctattttttgtgggttcttattttcttattttatttactttacgaagtcttgcattaaaagcttggttaaccctctcttgcagaagtatgaaatcaaaaattatggcaacttatcccgatgcgtttcctgaagactcaacgagcgaagtgattgataggagaccggatcttgaaatgcccaagtaactaatgttattagaacacagattagaaagagttatatgagagtttgtttttggtttttcttctacttttgtgataaacttgtcctatttgtcttaatcgttttaccagagcttcttgcccttaattaaattctctaaacttttgtctatacacttttatattgcagacagtaaatgcattacgcacaaatgataaaatattttcagatagaactttggttttgttatgggtgactatggaaatacgggtggcggcggtgcaactcgtgcggttcactaaaaaagatgagcaaaacgactgaaaaaagaaagagaaaccctcggtcaacattatcatttttaatctctgaaattataaaagaatctaaattttggaaattattaaattatcaaatgaaattcttaaaatcaaaattactgtcttatggattaatatgatcaacaaatttttatttcattagttctgtatttccgagatgagaaatactagtgacagtctaacattctttcaaatacttttttatatttagttaaaatttattgaaaatttaatgattatttcccctaatttattaaataaaaaatgaaacctatcaaaattgataatttttaataaattttaaccaatcatcaagagagtcttcaaggaaaagtgtcactagcattcatcttcttcttgagattactattatctttggttctatatataaaaaacatcaaacaaatcattaagatcaagaaaagtaaggtcccgtttaatgtcatcatatttaaattatattacaaaaatacccttatatttaaatgtgatattcacatttaatgtcaatactcataatccaatgaataagtacctaaaaaatttgaaaactaataattatttcttataactagtaacaaaagaaaaacacaattcgtttcctaaaaaagtagttatatattcacaattcagatactaaaatagtaattagtttgtgggggtcaagtgaggggtggtttgataatacgtttgagtggagaattggggagggtagaaatttaagattttggaaggacacgtggtgtgagggtgggtgtctaaaaaacttgtttcctagaatctttgttaattccgaacaaggagaagctaccataaaaaaatatgaggaggttggagtatggtaggtgagggtggatcttatttggcggagggagtggtttgagtagagaaggccttggtggaagaaatgtatagattggtggatggtgtcaccatttcgggacatggagatgatgcttgagtttgggtggaagattagttcaaattcattcactgtgagatccacctatgaagctttacatagattaagagattaagagttgggagccaagagaaggacatctttatgagcctatggaagatcaaagtgccaccataggtatccttttttatttggcgggtgttcctaaataggcttccttctaaggatatctcattaagagaaacattgatcttgaggatgataatggttcctgccccctctgtcacgaattggtcaagaacacttacatcttttattctcttgtcctgttgcatacaatatcggtacaatgtgctaggggcactctcaccaaaacagccttgatttgattggtaacaaggctattagtgggcaacaggttggagtgtcatcgtttggaacttacggcaacaaagttatgttatggtgtttgaaggaaaaccttttgataaggagcaactatggcacaaaatcatgttttctatgtggacttggttgaagtcataccataaagattttggtgcttcattccagcagtgacagtgcaatccctcggcgtgcttgttatgaggagtgatggactttctgtatgatgtgtggctgattgatacataaggctcgtatcttcccggatgcaggttctgtgtaaactaagattcgacctcttttggttagataggcggcagacatcttctggtttctttacagctattgtttcataggcctcaatttttgaggatcccgatgtgtaatctttgcacactttcttgtgcagttaatgatgtcatttgcttaaaaaatatatattaaaatagcgatttactcatttaataaattaaatatattaaatacaccgagactaacgagaagtcatcaagacaagaatgaaaatgtcttttatagggtagcttcctacgtctgatacaactagtcaattgttactttacagttttaccgcatgtattctagctatgctacatttttttcgacaatggtggaaacatgccatgaatgaatttaacgcatcaggataccacaattaatcaaaaagcttgctagattaaaaaaaaaataaaaagacggacatgtagtgtagtgacataataaggccaatcagtaacaaatgtgattgatttaattgaactgtggtgttaataaaactaaagaactaaatctgagatactagctaaaattgacggtgaaaaaaatctaataagagcaggaaggactactagaactaaaacaatattgtgacctacttcatagccagaaaacaccctattacataacagattgtccactaaatataaatctttttccagtatgcccaagtcaatcatcggatagaaaagaaacagagactaaattaaaacgaaaactcaaaaacttaaaagccaactatatttcagtatttcccaccttgcttctacccctgttgaaagtaacaaagtaagctgctctgcaacaacgtagatctaaatgtacaagacaggaaacgaccaaccaagtaatataaaaagaaagaaaaaaaggcaaagtgaaggataaacccgaacaaaaaccaaaagatataagcatcttaggcagaaaaccctaaaaaacccaaaaaccctaggagtaaaccctgttaggagctaaccactgtaaacaaaacccaatgagaagggattggtgctagcattctatgaactaactccgcccagccaatctcaatatacaatctttatcttcactaggcaaccaatcacactatcttcagactgcaagagaaggcaagacaaatcaaatcaggcggtaccaaattgctgataaatatacttctaagagccaatatatgccactgaagtgggttgggccgcatccttcgaacacagtagagcttagacaccattagaaacaaccccattggctacaatcttactctcgggaacaactggtttagcaccctttggggcatctccagtttttgtagcagatccattctcgggaactttgtggtcatcactatccttctcagcaagggtagactccttgagcaattccgagctaacttcagatttttgagtattaacttccccatttatctcaatcttctcatcagctggtttcccttcccatacctgcatcagtagagttaaggtaacaaaaagacatcatcagcacacgcaatcaattactttcacttaattagaataattgaaatgtgacttgcctgctttgggaattgttgctttgctttcttctccaaaatagttttctgacgggcctcatagaagccaaaatcatccagaatgcatgtcttgctggtatattccttgaaaattttaattaatttcagcccaggctccaacattacctgcaatcataaacttggttgatcagattaaaaacaaaactacattacaaagaactgacaactacaagtgcagaaccaaattacctcttgtgtatccctactgttagtgaccggtttgttctcattgttgtccaaggtaatgtgcctcaacaaattgttaggaacatccttaacaatgtgccacttaagaggaaagcaaccattccacttgtcttgctgccaatactcaacactcttgttaaaatcaacaggaccaaccatctcagcaagccccacaaattgcccactggtattaacctgcataggcacataacacattagctatatataaccaaaactgcaaataaaagtaatgactaccatcattcacagaaatacttactgagaaaaagagaaaaacaggggtgccaccagatttctgctgtgcctcctgatatgcagcatcaagcttcttgttgccattttgtgtactagcccacacattatacttaatactcttatggatatcatcctcgctgtaagacttgatgacaaaaaatttggcatcagtatattcttctggaaaatcagctatgttatattgatcaaattccagaatggtactagtcttgtctttctcttcatctgtgcctaaacttgcaggcaaattctgtcctttgactgctaaaatagttggtgcaaaacctttttggattttgccacccttggccctaggccctctgttcagttcgttcaaaccatctacgttctcattgccatagccaaagtagccaccacttcttcccctagttttgtatttactgtcaacagctaaccaagcccgtccattagtgcgagaatcatacccatgtgtaccataacccattccagatctgacagtgttcccatattgaccgtatagtttgtttgggtacatcctatttatgaagctatgggtggctcccatggcaggcactggtcttgggtggtgcaacccctgacaccaaaaaaacaaattgtgaataaataatcataacagcagtctagatagaaacatgacagtatgacacagtaagctctatcagaacagcacagatggaccaagcaaccaattattaggactttacggccatcaaatttaacaaatagaacaaagtaaaaccagacacttcaaaataggatacataccataaactgagaattagggcggaaagtctggttccttgaggcagtgttgttgccacctgatatcgaagaagtgatggttgtgctacttacaggccttggctgcccatctgaaaataatggggcatctagccaggggataggtgagcgtactccatcaaaaccaaatcttggatcctgataacctgaagttggaccacgacctggcatagcaaccctttcatttgatgctttggaactaaaagatgaattctgattgacctgtttaatagaagcagcagcattattacctttcccgttgccaccatttgcaacaccattagaatttccattggctgcatcaacagggagaggcttttgatcagcagccacagaggtggaaacctcaccctgaggtaggacagcaggagtaggtgtgaatggcgcactggttggtgttaacggttggaaatatggagggtactgatagtgctgaggcccatacaactgaccatcattccccatggttggaactggagaccctgctggcgaataggggccatagggcgcatatccatatccatgatgataaagtagagacccattatccccataaactccctgcaactgttaaaatatattaatgtaaataaaacatttgcagcagaatgaaaaagcctgcactataattttggaaaatgagaaggaaaaaaaatacttaccgaagtcatatcaactccttccgaattcacatatctagaataatcatcccactcgttaccagttccatcatatcctataataaacaaaaccatgtcaacttgaacaagatttacgtgttgcgttttcagaatttttcaaaaggcatttcatgtcgtttttcagaagcacttatccataaacttaccaccgtaataataggcagtagatgggtaaccatttgggaggtaacacatagtaggatcaataaaatcctgcaacacgggcgttacagaccggtcatacgactggatctggccattcgcagcatttcctgaatcaactgatccatactgattcccagtggcctgcacaattgaacaaatccactcaataccacacaattcactaaaagaacacagaaccaggtacaaatacatctcgctgaacattccaaatttataccactaacacaagagagtgaaatcgtgaattttcagtagcagccataaaaaatacaagcttttaccttcttggtaggctcaggaatctccaagggcttgggctgagtttctaacgatagcttctgtagcaaatcagttgcttctgtgcaaccaggagtaaaggaacacaaacatctcgaaaaattgaacttttcaacaaccagaaaacctaaaacccgcaacacacaaataaaaattcaaaaaacctaaaaaaaaccaacaccccgcaaccccaaacgagtgaatcagccataaagtcaacaccgtcaaaaacttaagcagattaacaagaacacaagagtagaaaaaacccaacactcgaacatcataaatcagcaagctacccaacaaacactaaaagatcaccctcccccgaacccaaaaatcaagtttcagaaacgaaaatccaccggatccaataaacgattcaatacagcagatcaataaaagataaacacaagagagaaactgcatagcagagaaggatacgatccgcgggattagcaacggtggccatgacgaaccaaccacgagatctggtttttctttggaggcggaatagagaaacggaagccctaaatccgaatctgaatcggagagggtttaagcctcaaatcgaaaagttgagaaaaccctaaaaggagcgaagaagagagggaaagagaaaaaaaaagaagagagagagagaagagagaacacaacgggtctcgcagccgccaagggtttgggtttttggggagagagggttttgttcctccaaaagcagtgattcaaatagcaccaccacctctctttaggcactctcgctctctcactcgcaggtcactctgtgatctcattcgccttctcccattggtggatccagccacgtggcgcctctccactggactttttctttgtaaattatttctacggttggtctgtcgtgcttgtttctttaaggtggtgggtgatgttagtgagaccccttgtgaatcttgtagatgcggggtttgggcaaaagatggaaaccctaattagaaaatgacacggatgtcctcgtccagctggacttgtggtaacccttcttcgatttttttctttgggcaccttctgtcatgtgctccaccacacacacatatcgtgttcaaattcatttccagtttatcaaaagaaaaaataaacaaataataattaattatatgtttaaattttatacgttattatgcgtttcaattaatatttttaataatagaattcaattattataaagataacttggattttagctttaagaatattggcaaattttatctacattagattaatccttttaaatttgaaataatatataaaatgtttattattattaaataagtaccttcgatattaagatacgacatttttaaactatttgttggtcaagatggggaagataaagataggactaccgcttaaattgttttgattaaatatatctattgtttgataaaacaataagataaaaaatatttttctttgccgtaaaaaacacaaatttatcttattttatttattagatcagatgtttaaatttcattgaataaaaagtttgtcttatcagaatagaaaaaagtttgaattacaatttcagtccctatttttacaaattgacaatttggtcctcttgatttttatttagacatttaatccctctaatttcataaattcacgattttgatcattctatcaattaacatcattacatgctcgccattaatcacttatgttgacattgcttactctgaaacacatttgaagtgtgagcattttctttccgatacatgtatcgatcattacttcaatttcacttagacataacaaacaaacttgtatgtgcgagtactcttctgattttgatgggaaatctttggttttaacgaacacggtacaggtataagtaacacctattttttttaaatagggttgggcatgggtatgtacctgcctgtccctacctatacgcatatccgaaaatataaccactaaattacccttaatgtagtattgtgtataatacataattaattttattaaacttttatacttactaatcattgtttatttttttaagactaaaactaaaactcttaaggcaaacataagccataagggattacaatctctctcaagtctcatgtttcaagacaattttaggtgacgatgactaccaagacattaatgtttggatcagatcgttttcggattgcaaacttcaagactccatggattgttgtttgaaacttaaacaaaaatatggaaaagatgaagaaatgatgatgaatgtcgccacgattcgtaacgaagcgataagtcggaggaggattgtcacaaaggaaagcttccttgataagaatcaatttggtttcattcaagaatcaacaagagactaagctctcgatgcaagcaaaatgcttaatttcattaattaaagttgtccaaaaatagcatagtttgagtacttatatagctaagcctctaatgatcacctaaaaacgtaaatttaggcctattttgttaatattaaagcccattacaaaaataaacaaaattacgaaagtcctcgcagaggtggcgcactgagtgagacaaagtggtgcactgggtgagcagaggtgtgctaagcctaaaagctctcaatcaggaattaggctgagcgagccagaggcgcgttgagcgagcagaggtggcgtgctgagtgagcaaaggtggcacgttgagtgagcaaaggcgcgctaagcctaaaagctctcgatcaggaattgagctgagcgagctagtggcgagctgagtgagcagaggtggcgtgctgagcaagaagaggcgcgctaagcgagctcacccataatcttcaaggtgcttcaattcagctctttgtgtcttccttcattcttgcccttattaactagtccaactatgattctcttggtcatcttttcttgaagaagcttggctttggaccttgtcattggacccttcaattcatggagtgcttctagaacttcatgatcattggataatcctctattaggtgataggaatatgattttcatggattttttttttattgtgataggattttatattgggtgttggcaagttgattgtctaagcttgactccttgaataaataatatatttagttttgtttaaaaaaattaaaattatttttatgattttttgtatttgttttaaaaattattaggtagggacgggtattgggcgggtatacccaatccccaatgaagactgggataaggaaaaaattcatacccatcgaagaagggatgaggaatcacatattcatccttgccccgtctcgttgccatgtttaatctcaccactcaacaccgacaaaaatattaaccaaacttacccttctctttgtaacaatatcaaattctcactatatactcccattgattttctaccactttttctcctttgttaaaaaaataaaactagtgtgttcccattccctaatcctctacatcgcgtcccatgtcccttaccataaaatagaaaagaagagagcaaaatataaaaaaaaaatcattagtacatctaaaaaaaagccattatcatatctaaaataaacaaacaaaatagaaagataaattggagagagagaaaacaagaataaggtgatgcatggtcaaaatagtgtttcctatatctgtttttgtgtttcatgtatttggtggagaatggggcttagaagaaaatcaagtggttgttagggaaattcgcaatgagagtgaggttgaagagtgtgatgatgtgtgaggacgagttcacaaaagttatgaggttcatcttcgcaaagtgtgcgctgacaataacgacgaggagggtgaggatggttcaaaagcaaaagtaacaacaaagggtatggtgggaactttgattaagattgtggtttatggtgttttgttttgtttgaattttgttgtttatgcccatttaaaaataggatttggttttgcatttctctaactcaggattgaatttggtgttgtgttcattaattcatcagtgtttttttatttgttttatgtccattgaagattgggatctaatttttgtctcctgttaaaatgtaagattaggagcaaggtcgaaaaaaggaacacctgacattggggactaggaatggttatggtaagagggatgatgttactcaacgttaaagtatagcggtcaatgagtcaattgacggaaaaaactaaaaaaatcatttttaaacatttagaggaccagctaaaattgtgaatttgggatattaagaggaccaaaattgcaatttagcttagataaaacatactttggtttggtgaccttataatacttatggttgatttgaaatttttgggtattgattacaataattatggaaaataaaagactaaattacacaaaactattatgaggtttgtaaaaaatatatagacctctcttttattgttgagacattacttgtacccttttcgttttaacattgtttaacctcatttacttattttctatatattcattgtatccctttgaaatcagtctatcactctttatttgtttccaagaacctcacaaactacaactattggacaacttatttagggttctaaaagaaagggaaaattcatgcatcttgttcagtctttgacaaaccaaatagcaatggtgaacgggtgtaatgagctcgtgcacgatttgaaacaacgatgttaaggttcgttcttgattttaaacaatggtgacgatatttgatcacgatttaaatcaggggtggtaaggttcgtgcataatttgaaaacaacaatggtggggttcacgcacaatttgaataacgatggtgaaaggggttgttgcacgcaaagtctaagttttcaaacaacaaaaaaaggtgaaaaataaaacaaaaaagagtgtaaagcaaaacataaaagattagaggttgcataccgaagcaccaaaacccatgaaatgttaacaaattattggttggaacgggttaaccaattatttcaacaagttcctatagtcttcatatgcagaatgagtcactatcttatattgtttttttcttttttacattaagatattataggttgaagaaaagggtatttgggagatgttatttcaattaaggtcatgtgacaacaccattttctcattatactaacaacttaaatggagatagtggcttagggaatcataatatacactcttaaaataactttcacatggtgcataaggaatttaacttacacatcgtagcctccatccataaaacatatatttatacatgatttattggttatcatatgacacaattcaagagtgtaaattatgattgatcattcaatacattaaaagtaaatgcaagggaaaacaaaggagcaaagttttggtaaaataaaaataaaagtatattttcatattcaagatggttacgacttggagttttataatatcttttgaagagagaactatttcctcagtttttttttttcaaaaaaactatttctagcatcctcttcaaannnatatatatatatatatatatatatatatatatatatatcaaaaagggaaacttaattgaattgaaaatgtttttgaaaaaatagaaaagggaggtatatatatctattgcatgtatagcgcaaaaatgctcaagttcaatttgggcttgttaaacaagctcaaacttataaaagtacaattgttgagcttttaacgacttttgtggcttggcttgtattaagatgtgattgtctaggaataaaaggttagtgttttatttatttataagctagaaattttagggtcaaaccttagcttttcatccaccatgttcggaccgacttaattgatctaacccattccccccttttaaatatgagtatttatgaaccaacccaattcaatgagaatcaagaaaattgattcaaaaaattgaaaataaaataaaattaaaaacaaacgaatcaaaaaataaaaaaaatcaaaattttattggattggataaaatttagatttaattttcaaaagtcattcaattcaaaccaaacggaacttgtatgtacctgtatatatttattcataattgataatatcacttatgtttatagttttatttttattatttgtaaaattattacataacttatacatatttataaaaaaatatttaattgaagatcactttttactaattttgtaaattaagatgcttaaatatagttatataatgacatataaataaaataattaatattttaaattagagcaaattacactcgcacctcgcgaggttagtgcttattacatttaaccccactcatttttttatcatacataagactcccttatttttttagcatccattacattgtgactccctggccctctaacactgccaaagataatgcaaaaaaggagaaaaaagtgaggatctagtgacgccgtcgtcatgtccttgatcttgatgaaagtgacattgtcgtatttgatgaaacaactgagttgcaatgcaccattgtaggaggtgaagcagcggttgtcgagttgggtgaccgcaggcgacacgctgtgaaaacactagtcgttggcgaggtctttgtaacattggaagaagccgtagacgatatcaaaggaggtgaggacattgaagttgttgtggttggcgaaggtgacaatgttgatgaggaaggtgaggagtgagttgacggtgtcttcgtaggcaaaatccaatgtaagctttggctggaagcagacttgggcaagagtgataggcactgttaataaatgatgattatttaggggagataaaagaaatgcaattttaagaagggtgcaagtgtaataaacattaaatttagggcgatgagtataatttgctctttaaattaatattttctcaaaaaaataaaagtatgactaaaatcgaaaatctatcttactcaactgtttaaattgaattggattaaagttttgaacaaaataattggataataaattaaacaaattcaaagtgactgaattgaatgatattttcgttcaaaatcatccaatccataaatagtcatacttctaaataaaaatgtagattttaatttacgaatccaattatacaactcaattaatattagacagccttaacttaacagggatagttttcttaaattcactaaatcattagaagttccgatcgaacatctaattcttattgcaaataataatataacatatacacatacaaaatctcaaactttaggttcaccaaggtgaaaaggaggagggggaggttacaaacactccaaacctgttgatcactccgataaatttgggtttgttcctccacagtaacacttggatcctccattaaaccgtaatttgtcatggcaccatggcaatctttaccaacatcgcgcacaaggttgcggtaacaattttgctaacttttccggtgtcagagaagatcttctggagcatttggtcgccacagtttgaacgtaacttgtgcatgcaattaatcatatgatccgcataaggttggagacttggagtattggaaaccctccttcatgtccagcgcagtttcaagatatcatggctaataaagtggcaattaccgcaaacagaatcattattaggcaaaacttgttaagggtccacgccatgaccactgtttttttagatgaaatctgattattgtggggtgtgatgaaaagctttgttggtataggagctgaatatgtagtaagacctatttacagttaaaaaaaatgaagtttaatttcaagattcgtattaatggatttttgctcaagtctaatgaaacaaacaaaataatttgatcattaattactgttatagttaagttaataaatggaaacctttgctttagcattcattacgtgctttttattcccccagtaacgaaggacttgtttagagtggcagttaagtttattttttttttaaaacaaaacattttggttgagccgaaaaaattgagacatcaaagttatatataatttaaatcactagtaactgaagtcctttgtttttaaataactttattttatttttataatttgattataatagaaatatagtcaatataaaagtttagattgaattaaaaacagtcttaattaaaataaattataattctgcaaattgcaggcacatttattataattcaatagttatacatagttaacttatgcatgattattcctcaacaaacagtcccacctcaagatcttgaatttgctcaatacgtgggtcctcaaacttaaaccttcgaaccaccattctctctcgatcttcctgcttgcaagaaaatccagatgacagtccaaccacatatttataagattttaaacaacgtttggtatactctagttcagccaacaataccttatttgaatccttgatatttaacaaggcttgagactggatattcagatttggcaccctctgttgccacaactctcttttgagatgatgaaacaaatagttagaaatcaaaacaaatgtaaaagaacttaaccaaagaaaaatcaacatgcagaagatacaactctatttccatgttttgaaacaccattggcagttgattccccaaccttagctttcgatgttgcaccctttgaaactgcttaccataaattcgtcaagtggtcacttcatccatagaaaaagacattgaactcttgcaatttacacaccaatgcaaaaacactacccaattcaacaaaataacacatgtactttttttttttaacaagtttcgttttcaaagatatatatcactaggcacaagtatttttcaagcacattggaaaccagaaagatggagttctacagtgtatggaattactagaatcttataaccaatagctagtgtatttaatgcaactttcctagtttcaccatccagttctgcagtcaaatttgcaacaatttgcaatgactttagctgccactaatctgtcgacataatgcaaggagtaactattcaaggaaaatttacgtccttctacaccaagtttagagtccatcaaagcaattgcaatatatggaacctacaggaaaaccatgctaaggacacagataactagacaaaagaatgaaagaacacaggaccagcacagaacacagaccatttcaaccagatggatagcagccagccaagcgtctaatgtattcagcacacattctctcatgtgcttcttgttgtcaccaagacatttcaatatatcagacagaataacctacaacaaaccatttccagaaatgctcaaacagaaaacagcaaaacagcaccaaatggggggaaaaatacgaaaacagaacagaatcctgttacctgcttgccttctctgtatccggggcactgagcagtgcaggctttacatcagtaagaagaaaccctttaatgtctgcaaggaggaaaaccttagagccttgaaaacaaaattgagagaacaaatcaacgcagaacacccaagaacttaattgatgcatttctagtagcagcattacttgactgcaggccaatttctttaagaaaatcaattaagtcctgcaaaataggatttacaataaaccatacaaacttccaagttccaacaacaaataaaatatctaaaaattttgtaaattcagataatgcaccttaagctttatatgtgagaaaccaaaatcttcaacagcagaaaccataagcaaaattccctcactaagaaccttggggttcttatgctccttcattatcttgtaaagctacagtaaaattcacagtttttcaaacattatttgataatacaaaattcccacctcaagatcttgaatttactcaatacgtggttcctcaaacttaaaccttcaaaccaccattctctctcaatcttcctgcttccaagaaaatccagatggcagtccaaccacatatttataagattttaagcaacgtttggtatactccaattcaacgtttggtacttaacaaggcttgagactggaccgctatatcttgaacagatattgatcagacttggcaccctctgttgccacaactctcttttgagatgatgaaacgaatagttagaaatcaaaacaaatttaaaagtacttaatcaaagaaaaatcaacatgcagaagatacagctctatttccatgttttgaaacaccattggcaattgattttccagtctttgctttcgatgttgcacccactgaaactgttctacctgactcaaatgactctaaagacaaaaaaaaagaggagttaagagaagatatgtaagcacaaattcaccaacattcgcaaagaagaatgaaccaaagaacgtgccttgaaaagctccatatggtttcaacttctcaacaattagcgtcagtgctggtccatgaatgtctttaaccatcttttcaatctaaaaataagtaaacaattccaagattattgatatttcaagaatattaaggaaacaacggaagaaagcaacatttttgtcatacacataccattgcatgtccactaactctcagtatctcatcaatacaaacctgaaagagtgataggtggtgcccgtggtgggtttcaggggaagaatccaacacttctggagcaattaacacgaaaataggggtagaaagaagatcaatacttccttcttgaaaaacaatactttagaacaagtcaccttagtcattttctttaataatttcctgcaatatatcttatcaatgcaatcaagaactctgccttaaaagatgaatacataatagataaaaccttaccttcaatatcggtccaagcaattatctaaagagtgcgagaaagaagagaaaacataagagaagaaggaagacacagaaaaaatcattattctctcatcttcttccctctattagactttttctcttccttctttaatagaaatcctgaaataaagcatgcagaagcaatgtatttatagatgaataaattgaagcgtctttagaaagaacgaaacggtcatatcaaagatctaagaaagaagcgctaaacgtgatatttattttgataataatatcattagcggataaaaagaaaattgacaaaattaaatattattcttatgactctattatacataatgttaaaattgtaattannnnnnnnnnnnnnnnnnnnnnnnnnnnnnnnnnnnnnnnnaatcattttgtaaaataattaaattaaatttatttgacattatatcattttattatcatgttatatatataataaatttgattgtcataatgtaataaaaaacatgaaaaaacaaagaacaatgctaagataataattctaatttttaaatttatttgtttaaaaaattgaagcgtcataacaaaacaacatcaagataacaatagtaaaagaatgtctctagtaaaaataagatagtgtcagttaccttccttaattcatgaatcatattcataatgaattataattaacaacatattaattgttacaaacttaaacgtgatattttgataatttacaactttaaaactagctcttgtaaatagaaaagtctttcccaattaaacttttttaacactgaaataccaatatagtaattcgaagatttaattagcatttagttttgtaaatattgaaagacataaaataaccaaatcacacaaattgatagtgttggtttggttgagaggtttgaggaggaggaggtaaaagaggcaatatgacaatgtggaagtgctaaaagcccgagtccgaatgaatctagctttaaattcattaagactttttggcatatcttgaaggaggacatcatgaggtttatggaagaatttcatagagtttgggttttttcaagaggctcaaattcgtcattcataagtctaatccctaaggttgacgacccacaaggccttggggagtttagacctatctccctagtaggatgtatgtacaagatcgtggcaaaagtgttacctaaacgcttgaagaaaatacttaatgatgttattgatcaaatgtaaaagtgccttctttgacaagagatttcttctacatagtgttttggtggctattgaggtggtgggagaagctaaaaggaaaaacaaaagttgtttggtcttcaaggtggattataaaaaaacctatgatttagtgaattgggatttcttgctttacatgcttcaaagattgggttttaatgaaaagcggattagttggataaggtgttgtttgcaatcttctataatgtcggtattagtgaatgatagcccttcaagagagtttgggatgcaaaggggattgagataaggcgatccattgacaccatttcttttcacaattgtggcgaaaggtcttagtggtcttataagtgaggcggttgcaaaaaagctctattctagttataaggtgggggtcaattttctacaatatgtggattatactattttcttaggagaaacactatgaaaaatatcttgatcataaaaagcattatgagatgctttgaattggtttcgggactcagtgaaattccataagagcagtttgggaggcattggagtggaagagaggatgggattgannnnnnnnnnnnnnnnnnnnnnnnnnnnnnnnnnnnnnnnnnnnnnnnnnnnnnnnnnnnnnnnnggggggggggggggggggcagaccctagaagattggagacatggagattggtcatcaacaaattcaaaaagaagtcagcctcttggaaacataaggtcctctcttttgcaagaagattgtgcttactcaatttggtattgacttcattacccttattctttttttttaaaaaaaaaaaatccaaaggtggtgttacataagttaatttgcttacaaaaaatcattctctggggtggagtggaatgggagaaaaaaaataggtttcttgggataaagtgtgttgtcgtaagagtgagggagggctaggggttaaaatatagtcatattaaacttagctttattagaaaaatggagatgaaatttatttcataaccaagattcactatggggaaagggtggtgttatcaaaatatagggattggaaagggttgttaagtgatgtgaatgacaagttggaatctatatggtggagagatttaaaaaaattgtgtggggattgagtgatttaagatggtttgatgaaggagtagattggaaaatggaaaaaagggataaaataaatttttggtgtgatgcataagagggagagcaaaactttgccaatttatatcccaaactattcctcattttattgcaaaaatttgacaaaattggcaatatgggaaggtgggaaggagcactactagaaaataggcttttaacatcgatttttttaggctttcaacatcggtttttaaccgatgttgaaactgccgacgttaaaagtatcaacgttaacatcggtttttaaaaaccgatgttaataaaattagacaacatcggtttttattaaaaaaccgatgttacttaatgaaaaataaataaaaaaaaatgtaaaatatgcattaaacaacatcggtttttagtaaaaaccgatgttgttctatgtagattaacatcggtttttggtaaaaaaaccgatgttgttataggtagaggaaactttctacatcggttctgtcaaaaaccgatgttgattagtaatataacatcggttttgttaaaaaccgatgttgaagtgtctttttgacatcggtttttgacaaaaccgatgttgtatagtcattttttacatcgtttattacataaccgatatagaatgtcattcttttaaaagaaatatggtatatgctctttatttctctccttgtaattttaaaagacttattaaaagctcaaattctatcaacaatttggtagccataatagttaataaaaatataaaattatgggatcaaaatttgcattgatggggaaataaaagtaccaattgaccaaatgttaaagataatgagagaaaatggaagaagacttattatagtgcatggattggcatattgaagcttaaattaccaaataaatttatacatgtataccannnnnnnnnnnnnnnnnnnnnnnnnnnnnnnnnnnnnnnnnnnnnnnnnnnnnnnnnnnnnnnnnnnnnnnnnnnnnnnnnnnnnnnnnnnnnnnnnnnnnnnnnnnnnnnnnnnnnnnnnnnnnnnnnnnnnnnnnnnnnnnnnnnnnnnnnnnnnnnnnnnnnnnnnnnnnnnnnnnnnnnnnnnnnnnnnnnnnnnnnnnnnnnnnnnnnnnnnnnnnnnnnnnnnnnnnnnnnnnnnnnnnnnnnnnnnnnnnnnnnnnnnnnnnnnnnnnnnnnnnnnnnnnnnnnnnnnnnnnnnnnnnnnnnnnnnnnnnnnnnnnnnnnnnnnnnnnnnnnnnnnnnnnnnnnnnnnnnnnnnnnnnnnnnnnnnnnnnnnnnnnnnnnnnnnnnnnnnnnnnnnnnnnnnnnnnnnnnnnnnnnnnnnnnnnnnnnnnnnnnnnnnnnnnnnnnnnnnnnnnnnnnnnnnnnnnnnnnnnnnnnnnnnnnnnnnnnnnnnnnnnnnnnnnnnnnnnnnnnnnnnnnnnnnnnnnnnnnnnnnnnnnnnnnnnnnnnnnnnnnnnnnnnnnnnnnnnnnnnnnnnnnnnnnnnnnnnnnnnnnnnnnnnnnnnnnnnnnnnnnnnnnnnnnnnnnnnnnnnnnnnnnnnnnnnnnnnnnnnnnnnnnnnnnnnnnnnnnnnnnnnnnnnnnnnnnnnnnnnnnnnnnnnnnnnnnnnnnnnnnnnnnnnnnnnnnnnnnnnnnnnnnnnnnnnnnnnnnnnnnnnnnnnnnnnnnnnnnnnnnnnnnnnnnnnnnnnnnnnnnnnnnnnnnnnnnnnnnnnnnnnnnnnnnnnnnnnnnnnnnnnnnnnnnnnnnnnnnnnnnnnnnnnnnnnnnnnnnnnnnnnnnnnnnnnnnnnnnnnnnnnnnnnnnnnnnnnnnnnnnnnnnnnnnnnnnnnnnnnnnnnnnnnnnnnnnnnnnnnnnnnnnnnnnnnnnnnnnnnnnnnnnnnnnnnnnnnnnnnnnnnnnnnnnnnnnnnnnnnnnnnnnnnnnnnnnnnnnnnnnnnnnnnnnnnnnnnnnnnnnnnnnnnnnnnnnnnnnnnnnnnnnnnnnnnnnnnnnnnnnnnnnnnnnnnnnnnnnnnnnnnnnnnnnnnnnnnnnnnnnnnnnnnnnnnnnnnnnnnnnnnnnnnnnnnnnnnnnnnnnnnnnnnnnnnnnnnnnnnnnnnnnnnnnnnnnnnnnnnnnnnnnnnnnnnnnnnnnnnnnnnnnnnnnnnnnnnnnnnnnnnnnnnnnnnnnnnnnnnnnnnnnnnnnnnnnnnnnnnnnnnnnnnnnnnnnnnnnnnnnnnnnnnnnnnnnnnnnnnnnnnnnnnnnnnnnnnnnnnnnnnnnnnnnnnnnnnnnnnnnnnnnnnnnnnnnnnnnnnnnnnnnnnnnnnnnnnnnnnnnnnnnnnnnnnnnnnnnnnnnnnnnnnnnnnnnnnnnnnnnnnnnnnnnnnnnnnnnnnnnnnnnnnnnnnnnnnnnnnnnnnnnnnnnnnnnnnnnnnnnnnnnnnnnnnnnnnnnnnnnnnnnnnnnnnnnnnnnnnnnnnnnnnnnnnnnnnnnnnnnnnnnnnnnnnnnnnnnnnnnnnnnnnnnnnnnnnnnnnnnnnnnnnnnnnnnnnnnnnnnnnnnnnnnnnnnnnnnnnnnnnnnnnnnnnnnnnnnnnnnnnnnnnnnnnnnnnnnnnnnnnnnnnnnnnnnnnnnnnnnnnnnnnnnnnnnnnnnnnnnnnnnnnnnnnnnnnnnnnnnnnnnnnnnnnnnnnnnnnnnnnnnnnnnnnnnnnnnnnnnnnnnnnnnnnnnnnnnnnnnnnnnnnnnnnnnnnnnnnnnnnnnnnnnnnnnnnnnnnnnnnnnnnnnnnnnnnnnnnnnnnnnnnnnnnnnnnnnnnnnnnnnnnnnnnnnnnnnnnnnnnnnnnnnnnnnnnnnnnnnnnnnnnnnnnnnnnnnnnnnnnnnnnnnnnnnnnnnnnnnnnnnnnnnnnnnnnnnnnnnnnnnnnnnnnnnnnnnnnnnnnnnnnnnnnnnnnnnnnnnnnnnnnnnnnnnnnnnnnnnnnnnnnnnnnnnnnnnnnnnnnnnnnnnnnnnnnnnnnnnnnnnnnnnnnnnnnnnnnnnnnnnnnnnnnnnnnnnnnnnnnnnnnnnnnnnnnnnnnnnnnnnnnnnnnnnnnnnnnnnnnnnnnnnnnnnnnnnnnnnnnnnnnnnnnnnnnnnnnnnnnnnnnnnnnnnnnnnnnnnnnnnnnnnncaatctccaaagaaactaatgttattgccctagcgagacacagagagaaaacggtccaaaggaaacaagggaatggagaaagaaataaaatggaaaggaatcgaaaatggagtgtgcggatttgtttttttgtttctcttaaaagcctcaacatcggtttcttaaaaattttgaaaaccgatgttaagtagttcaccttaacatcggtttccttcaaaaattttgaaaaccgatgttaaataattcacattaacatcggttttcttaaaaaatttaaaaatcgatgttaagtagttcacattaacatcggttttcttcaaaaactttgaaaaccgatgttaatatcaactggttaacatcggtttttaagtattgataacaaaaccgatgttattttgatcctttatttacgaatttgccaccgcgttttcgttaacatcagtttttcagaaaaccgatgttaatgtagcgatgttaaaagctatttttttagtagtggagagacgtggagatggaaatttagttggtgtaggaattgttttgtctaggaagaggacttgctaagaaagtttcaccaacttgtatcaagaatgggcattgatagcaaacagttggatggttggaggtggaaacgaaatgtggatgagtcttatttagtaaagacaacatataatctcattattgggaatgacaggaaccaacatacaaacaaaattgtcggtgctatatgaaaggtaaatattccttcaaaagtgatattttttttgtggagattatttttgaacaggttggtcactttggacaacttaacaagaaaaatgtgagggtagccatgaataattggttatacctgatatgcactttggaggaggagacaacggctcacattcttttctctttcaaattagtagttggaaaagtggtaaattcatggggaaggctctatactacctaccattatcacccgaggagaacttttgacaaaaacacgggtctacaatctgaatgaaatttatgtgatgctattatttttggatgtgtaatttttgatttggaaatttaaaataatttaaaccaaataatcgaaacaaatgacgttaaaataatcaatacagtatgtaacaaaatggataaaaggttttaatgatcaatgatttaacaattgaattgcttaatagagttttaattagcccaaagatatcaaatggtggattttgctatgaccttggtgcttttccggaaagtagtcaagtcctctagtccaattcagttttgacaatattagttttttttttttacagaacaataatactactagttaatgatgtcattattcgaaaaatataaagttctaattagtccaaagatatctattcgtggattttgtatgaagttaataagtacactcctgacatgatttaactctaaaaataagaaaaagtctaagtgagagtggttaaatatttttttctttctaaatgacatatatattttgagttgaataaaattattatgaacaataaaacaaatttagcaaatatttaacaaaattatatacgaagactcaaacctaaaattactgattaaattatgataattacattttagttcatcaatgcgtttaattagtgataattaatttattttacattgtattattcaagagattctcgaaaatatttttagagttatcccttttcgagctacatatgaatagattatatagattacaaattcattattattgtttataatgtcattgagtgcatgttattgcatttaattattgtcattttaataaccatctcaattacatcaataacacaagggcacaattggctgctaacggatactttccttcgattgtgtatttatatacagattaaggtgtaccttttaagagaaacattttaattaaacgattaaggcaaaaaatatattatcaccataattattagtagcatgttttttttcttcttcctggatttaataaaagctatgatactaatagttattctaatatttctttttaaccaaaaaaactcacttattggtcataacccttttcattggtttagcacaaaagaagaaagaaatattttatggaagaaaccaaaaggttaagaatgaaaaaagggtgattagggtggtggttgcaaagtttgtgtgttggatatgaaaaaatatctctctcccaatggatgaaaggattaattggagagaagtgagaacaaagacagagaagaaaagggtttagtaaacgaaagcgtgagagtgttgtgcgctggaataggtagagagtgatggaaaaagattggtgggtatgcattataaaaaacatgcaccttctatattgcccgcactaacacattaaagtgcaccaaagccacattttggatcactacactacaccccagtcgatgtgggacctttccatcttctccccatagccaagccaacacccaactcatcaacatcattgccttctctgaattatctcccactctccccttttctgtcaccaaaagccatgtccccgttcacatttgataatcataatacttaaccactagattggactcaaaccatgttattttttttcctcctttgcacaacttcttgtttgattttgttgtgtgtatcccttcctcgctcctaaatctaagccatgtttcttgaggcgtgagataacaacacacaaaaaatagtaaaagaaaaaaaaaaagttttggcttttgtgatggggtgttgatagaggagctagctggtgctgcaagggtgtgtttggattttgtataatgggtaattgctggtgtaggtggaactcatcagagtatagagtctcatccaatgtaaagtcaggttggtttactaacaaaaaaacttacctttctctgttttggatgtttttcaattatttatcattgcctggaacgagtaagtgtttttggtttgtgatttgttgagagttttgattagattccttgttttcctccttctggattctgttttcagctcttgaaaatggtttactcatctccttcttttctttttcaatattttgtctttgatgggcgttattctcaaggatttcatgttttggagctttccaatgttccctccttaattgctttcttaatcaccctttcatctggttctttttcattgaagattttctgttttgatcatttgaatctagcttgtggaactttgatatgtaatattattagcttcaaatagctcatccttgtaggcaagttgatattctgcaaatcattgaaagacaaagagaacaaaaaaaacagaaatcttcatataggagttacatgttgtcttcaagtcaaatattttttttataacttttctaaagttacttcattgtagaatctgttaatatgacccctaatcaccttttccttatgtgtctgcttcaaaagtgggtcggcttgtaattctcacgtggatagtggaaagcctcttcacaataatgcgttgagtattatcttaactaaatttctatgaaaattagtggtgggtttttaaatataataatccgctgcttcacaattataatatattcccaccatcttatgctttggaaagtgtactaatctttcttctctttatccaatacgagagaagaagtttatatataattttttttatttatagatagtgaacttattgataattttgtgtataacattccaataaattaactgattaatgcaacatctggttagtttttctgagaaaattggatgaatatatataaatgggaataattattctcataactttcagagtttcattaaatgtgcatatcatttgttctcatttctcttattgattcaccaaaagaacaaaaccagggaaccaaacaaaggcatgatgatagtaagttaccatcgaatcctgaagaagtagaagatctacggcgtgactcagctgcaaatcctttgatagcattcacttatgatgagttaaagataatcacagcaaattttaggccagatcgtgtgttggggggaggaggattcggaagtgtttacaaagggtttatttctgaggagttaaggcaagggcttcctacccttgctgtagctgttaaagttcatgatggtgacaacagtcatcaagggcacagagaatggctggtagactttttgttgcctttctgtacattttttttatagatgataagtctttctatggaagcgtgctaaatctgcaagacttgagagtgtgtattggatactctttacaaggagatatacaaaaagtatctttttggatggggggaatacccatgtcgcttcaacttctggactgtgaagttcccccctccattgtctttctgaacattgtttcgtatgaagttgtctaactctaaagtcatgatgttgcttcacatgctatgtttattctactatttggcacacataagttaatgtgacaacaaaaatatattgttggtttaaaaattgttgtaagattaataaaattaaggttttggttgcttcataggcagaagtcatatttttggggcagctttcacatccaaatctagtcaagttaattggatattgctgtgaagacgaacatagggtgctaatatatgagtacatgtcccgaggaagtgtggaacacaacttgttctcaagtaagtatatcttgccacttgttcttgatattgaaattaaagcttaggacaattgctaatgcatgtatccatggctagctaggaatctatttaaagatctcatagcaaaaaatgttaactgttttgctttagtagatgcatatgcatctatatttactttttacttagttacccctttatgttgtctccgacaatgttgacacttaaaagaaaggaatttaagataaagtgattttggttccattttgtagcttcgtggaaaaataccgagttaggaagttttgggcttaagacgttggttctttgtcacttccctaagacatgtggtttagatggatttcataaggacataagtttgacagtaacattacataaggaaataacatgttgttttagctatactacatacaacctttagtgatcatacttgatgtcaatgttaaaaaagactatgactattaaccctcaacattcctttcacttttgcgatttactccgtaaaaacgaagaaattacaccggcaactctatgattttttcatattacatatggtatttttatttttttttaatgtttacagcgattttttaattaaagacacacaatgtaatattttaaaataattatgaaagttagtataatatattgaaaatgtcattgtgatactttctaaatataagatattagtgtacagattagaaaaaaaatgagatatcaagtgtaatatgaaaatatctcaagaagcacactttttagaagaagttagagcaactttaatgggagatcttggggaggaatatgaagatctctttttttccagatccaccactaaaaaagaaaagcatctccacgtgaagatgcatatcttctccaaaaaccttaaagatatgcatgaagttcaaaaaaaataattttttatatgataagatgaaaaaaataaaaaaaaataaaaaaaataaaattaaaagttaaaataattgcttaaaattaattatatattttattaatattcatatatttttttcatactttattaattaaaattaattatttaattaaattttaaatatttaaaatggagttcatgtgagactcattaaaattatctaagatttcaatttggaatctatcaataaaggaaaaaatgtcataaatcttaaaagatttttaatcctaagtgacactgtagaatctaccaaaaaataatctaaataagatctcaatttaacatctatcactaaattttctttaaatctaaatcctcttacctcgtgagcagttgagagatttctgaatgtaaattcttggtaggtcctacaccattgtccaatgcaatgagccaaggagtatttttgttctcggaagaccacttactgttttaacttttaagccagctactaacttttccagttctagttttacaatgttttccgaactttttcactgtagattagttaatgtttgggttactattttttgggttactgaggttgacctttaaaacaagggttttcgtgtgggctggaaccccttattttgtatgagcccattaagtacaagcttcaagaaattagacacaaaagtcatgaacttttttgttttgtttttgagaataacaaccatcatcaacttaatattgcccggtgttgaaaaaaaaaaacttgctacttatcacgagtcacctcttaatctagcactatgctatgtccaaagtaattcctcaatcatttttttttattcttctcaaggtattttaatatattgtggatgagattgatctggtttgatgtttaatggcatgaccctactaactatagaaacttccaatggaaataactattggctacaaaactcagtaatgtataaaaatgatataaattatttataatatgcattataattacaggaattaccaatgatgctttaacgaattctcctaaatgacccatcaatccagcaagcgcgtttcattcccatgaaaaatggtctagttaatgtgaagcaaatacgacaacctatcacataaagtgggtttagcaaaccttttttttcactattttctttcattttaattttttaattttttattcctcttttaatttctttattacagtattcaatatatcgcatatctcttactttttctaccttctttttctttctatctctattcaattcatttcatacttcacaagagggatgaaagaaatattcttttctaatgtaaataaaccttttctcattcatcttttcctctcccatggctggttggaattctttagacaccacttgattagtgggacctgttaggccctagcagctctaataaaattttatatatatatatatatatatatatatatatatatatataaatctctctagtcataagaaactgctagtgtgtgctacacgagtgcataaattatcagagttttttcctcacataagttactattccaaatacctaggtgccggggctccacaaggccagccactctatgtcttatacgtgaggagacaagtcagctagacatgtgactagcaatattagttttagctatgttcaaacacaagaacttcttaatcatgcacggttcatcacattatcttttaaataattaaattattatttgatatgtataaaaccatattttaaaaaaagtgcattttgttataattcttgcaaactaaaagtttgcacaagtcaaataacaaataaagtaattacaataaaccgtgtctaataattaaaagttgttcttttaataaatggtaagataatattattacattgaacaacacaatgtatgtcatgtcaattatatggatcaccaacctatttaacttccatctacaacctttaaatttcatgttgaatatatttaatatatattaaatattaatatatttacgtacaaatctaataaattattatataattatatagactcatatagattattaggatttttcctaaattggacataactctattgaacattgcatatttgatacctcatgatgtaatactttaaacatccaacattaaactcttttctctctcaaaccccttatcttcaacattccaaaagattagcatgagttatgtttaattagtaaatgaaattatgtaaaaatattgtcttctagcaaaaacaaatgtctatgtagtttctctgaatcacaccccctccactatgaataccactttagtacttcacttttcagtttcacactcacattctctcagaaatttatggatcatctcatctttcacacgtggaacatcactcaatcagaacgaattctaggtagttgaaaaagggagactccttaacccaacaagataaactattttcaggatttgaatccatgacttcagagtcacatagctgcaaccttattattaatatattaagactcactcttaagtctctaattaaataatgaaagttctagatctttgcaaagaatcacagtgaaaatctcccttaatagctaatggaaaaagcattacacgctttatggattctccaaatattaaatgtttttgttttgcatttgatattttttttttaaagtaattgagatattttaagccgattgtttaagagggttcaacaatattagacttggattctttttgtgtcagaggattattctgttggagaaatatagacgcagagttaatgttgcaaggatcctaccacgatgtaatcataaagtccactagttatattcaaaactgtttgtctttattcaacaaaagaagagactttaatgtttattattgtctttttggtttgtatatctaatgtgtcttttcttgaatattgcagaaattttgcttcccatgccatggtccataagaatgaagattgcgtttggcgccgcgaagggacttgcatttcttcatgaagcagagaaacctgtcatctatcgagattttaagacatcaaatattttattggaccaggtcagcacacttaaatatgtcaactgaaaatgaatatatagggaggaactaaaatttgtatatatataacgaaaatgtgtagacactagacagatgaggaattaaaatttaaccatttaagcatatatagggaggtgaaaaaaaagtgctttccataatttatttgtttagggtctaatttggatgtagggcagattgttatgaatcaaacaatcacacaataatcgagatatgagaaaaaagaaaaaaattatacagagtttacccacacactcataaaatgcactcagtttacaagaaaatatataagtttaaaaattctaagcacaatagttattcatgagtccaagcccaaattacaaaaataataaaatacgagatcaataatagtactgggcctcgaaaaaaattccgagggcctgccccctagcccccgttgaggagactcctgcatatctttgctgacggcacaatataagccatacccaaaacagtatgattctttggagttacacgctgaaagtaaaggacacaaagctattgaggtttgatgctcaatgctcacaagaaatttagctattaaatattgttgttgaggtcatgttgattattgtgttcttcaatttaaaatatttagactttcataacctttggtgtttatgatttattttatactaaacttattgcaaactatagatactgcttgcagttatgttgtcaaattttttatcatagcaaaacgcacatatgctgctgtttaagacacaagactctcgccagctaactatagatatagataagctttactaacaaattgtagttatgttgacaaatactgtttttttcaaagatgaatgtactattaataattggcattgttttagttatttcgtggttccgcttaagcaatcatgcacaacgaaacagtatttgtcacaagaccaaagcacacaaactagtattttgtgatatctctggttagatttcaggtgttgaagcaaacagcaaaatgtaatttttgcattagtttctactcttgtacagcaaagaccacagtgtttccaaaataagccagctttcaactaaccatcttggccttttatgtttcaaaaacaggactacaatgcaaaactttctgactttggcctcgctaaggatggaccagttggagacaaatctcatgtttctactcgagtaatgggaacatatggttatgccgcacctgaatacataatgacaggtaaagtatattctgaagctggagttctgtactcatttgtgaatcaaagttcatattttcactaggcataaattaaggccaatgtagagaaattatggttgccccagatttttgatagagtttaatttttatgcatagactgtgttaagattctttatattatcaactaataaaaaatcacatgaggtataatttttaaggtaacttatataaaagaataaatctatgattggatgatagacgataatataaaaaccctttaaattaaactcttagtatactacaatttgacatcataattatatgttgtgcaggtcatctgactcctagaagtgatgtttacagttttggtgttgttcttcttgaacttctcactggaagaaaatctttagacaagttaagacctgctagagagcagaaccttgcagaatgggctcttcctttgctgaaggaaaagaagaaatttctaaacattatagatccaaggctggacggtgattatccaattaaagcagttcacaaggctgcaatgcttgcatatcattgcttgaaccgcaacccaaaagcaaggcctctaatgcgagatattgtagactcgttggagcctttgcaggcacacacagaggtccctattggaaaaacattgaccataatcagtgaggttcctgaatctggtttgaaaatgaaagatgatgcaaaatgacttaaaagagggtgttgttgtaggttatcagtttcacttctcatgttcactgggggagaggttttgccttaacttcttgtgtttattaacatgacatataggcaatttctttctattttatccccttctttgcttttcaacatggttgtcatatatgtacagctggattattgtataaaccgatatcaagttaaacagaaacaaacaagcaatagcagcaatacaggatatgattagacgttcttctgtttcagaaagaaatattttatgccctgagattgtttaagagtttcacactgttttctgaaattgttatgtatggtaaatttattaatttttataataatttaattgaaagtcctatttttttttataatttcttatttgacaaagtaatttcttttacagtgcatagaaatgaaactctttcttttatttgaatctaatatctttccaatataatgagataaaacagttaattttttttctagccaaaaccttttgaaaatgtccgttatcccaatagttcttgcataaatcagtgaagaacacatgaggctacctagacccgaaccagtagaggctaaggaacatgaactgaaacacattttcactgaaatattataaattaaattttgtgtacttttcccactgatatacacttcctaccattttagtttgctgggtaaatttaatcttgaacactgttcttatttttattgttatctgaccaggaatccttgcaaattagactgagtttaacccttaggtcaagtgtgattgtttctgagattaacctcttaattgcggatattgttagcaaaagtcctgtctaaagttgtgttttgggcctatgtctgtggcccatactcaataacaaacatcttggcctagatgggctttgttattcttaccccgttcttcgctaacttcacactcttatttacaaatggtgtgacttaacctaaattttttttttatctttactgaaaaaaaaaagttcatcaatagtaattttgaacaattgctaaaaacatttgttcatgaaattagtaattaaaataatttgttgaattgatattatatttaacaattaattaaaatatcattggttttcaaaaacaattttattactattatataaaacaccttttgtcattatttataacatatatagtcaataactttttttgactcttattataagacttgagaagtgttagtaaaacaacctttctaacactcatttcatccattatgacttaaaatttattgaaaagtataaatgtagaagagaaagttattaaataaattgtgagatccatcaaaatttataatttttaataaattttaactaataataaagaatatgctgttagtatttctttataagatttcattttatctctcttatacattaataatttgttgactaaaatatttttatttattttaatctataattaaatgttcatttgaatttttactttctcttttctataaagattaaagaagatgaatagattctgattaatgttaagaataaatttttaaacaaatattacagttaaagataaatttaatactaatatctaaattaattaattttttaataaacataatttagacaattatgtagaaataaaaagaataagttttattccaatcaagattgttagttattattttttttaaaattttcatctccttaatgaaattgttggtgacttggagttggattgtcatagaggtagtacagccacgtctcaaactcaaactttgcaaaatcgaaaaagtacacgtggcatgatactagtgaactgaatggatgttgcttcttaaatcttaaccacttcagcaatctacgttcacaacctctcatccatgtctttgtggccctaacaaactgttaactatgcacaagcacaacttcaagcaccaaccaagggatgctccactcatagaactcaatatagaaactggaactagaagtagcagtccctaagttttgtgcataaccttaaaccatgtcattgcctaccaccactagtagtcactcatctatttactctgcacttacattgccaagaaccacccaaattcaaccaaccttgttttctcccaccaccaagttcttttcttccagaagcccctcatattcaggtgtttcctattgtttctcaaacacccttttgtcaagacctttgctttttgctgtcaaggcttcatctggggttggctcagaagcatccaaacaggatagtgacaagagtgaagaagaagaagaggaggaaccgtatgaagagtatgaggtggaaattgagcagccttttggactcaaatttgcaaagggtagagatgggggaacttatattgatgctattgcaccaggaggatcagctgataaggctggagtcttcactgttggggataaagtaattgccaccaggtgtgctattcttgtttttttaatttttctctttctgcaagtttcttatttggagaattagatagaaggtttatagatgtggtatagctttgatattcgtggttggatagcatattatgttcaagagagtttattggaggtcttatactcttatttattcttggttggtttatggttgtggattttgatgactttaacttttatgcacagttagtgtaaaaaattttacaatgttactaattagaaataagtatgacttttataatatttatcataaaagtcaacaaacttatcatatatatgaatatatcagtttgtgattagatgacccttttcaatatgactttatttagtaacaacaagaagaaaagtctaatcccattaggtgagtgatccatgttttggtatatcaacatgttttacattggctcccaagggcctaacacaaccttcttcctttacttggtcttgggacttgttatgaaaccattagcgtcatttcatactttcagtataactttggtccttaaaaataattttgacatgtcatagaatcaaggtttctgaatggtcaataaattatcctatgtatattatatttggggtggtggtgatggttttgggggggggggggggggggnnnnnnnnnnnnnnnnnnnnnnnnnnnnnagaagtaaacttgtatactttatgtttgattcataatgtctgagatatgaccaatatcttcaatatctgcagtgcggtttttgggaccgaaatttggccagcagctgaatatggaaggacaatgtacacaattcgccaaagaattggcccattactcatgaaaatgcagaagagatatggtcagttcaatatgtatgcatttttgctatgtttcgagtgctactctagtaagtagtcacttgtgacctttgctcattgatctcagagtcatggttccttattttgacaggaaagagcattgattctggtggtgagttaactgaaaaggaaattatcagagctgagaggaactctgggtttatcagtaacagagtgagagaaattcaagtaagtttcatcatgatgataaaactgcaaaattgtagtccatacattcattctcaaactattttgtatataatattttctctactatagaaagatgtcactgctgtacttccatgtggggtacaaacatccattatcaattctcaaacttgcaaaattttcagatgctaaatgctttgaggaaaagggaacagaaagagaacagggaaaaggatttgagggaaggattacaactatataagtaagacttagcaactcaaaatcattttctttttgaccctctatgatgtgcccagtattcatttcattgtccaactttgcaattatattcttccgaagggagtagtaggtgaggtatgagaagagttattcttgattcttgaccatggaactatatttagctataatcagatataagtaaaaccaatatttgatcagcaacgcatgattggttatatggtcaagattagcttcttttacctttcacactctcacttgatacaccttatatatatatatatatatatatatatatatatatatatatatataatcttcaaggttgtgctagatttattaaatttttcctttaggctaattactcacgtggtttcttaattttattttaggttgcgatttggtcccttatttactaaaactaacactagtcgtttttcaattttggggcatgattttgtagttttttttattgattcaagacgtgaaacttatctcattagattcacttacgtgaaaactatgggtcattcagaccaaaaaggacataaataagatgaaaattgcatgaaaagtgtgtcttatgaggatctggaaaactgaaaatctccaaagatcaaccagaagattgctcatgagacataaacataatgaaaatcacatgaaaaaatttcaaaatcgtgtcccaaaattgaaaatgataagtgtgctacaacattatttgaaaaggataaatgttgatccctccattatttgaaaaggagggatcaacttactccaagagtaactctttccttatcctcaccattcattttcagtcatttgtctaactgattgaaaccatccatgcttatggccaaaaactggttaaagaaaatacttgcttcactttccaagcatccaatttgcatcatatctaaattaaaagactgactagaattgatgctatctcactactgataagtgataatactactgtgcactctgttcctggattaaatgctgaaggaatggcaaatatgatgaagcactagagaaatttgagtctattttaggatcaaagccagaacctgaggaagcagcagttgcaagttacaatgttgcttgttgttactctaagctaaaccaggtatttgtttccttccgttcgctacttggaacatgtaatttgatcttggattagttccttattatccttgcggaatagatataatccctttacatctgaatgtaactaatttagtccagtaaataaaaggtttattagtccttattagaactagctaaatttttcctataacatccaatatctagttttacacctgctaggttaggtgatacaccgaagtcctatagcattgaccaatcccaaacaaaacctgtgaaaattaagtctcctgtttatcttacatttccccatgtagagattagtagctttcttgtagtcattggattttcaacaacaagcatctgattcctcaattttattttttgattcaaagggaggagtggaactctggtaccaagagatttataataactcacacacattgctcaaccaataagctaaaccaccattggttatttttattaattttaaagcattgaaattggtatgagtattatatgcccatatttatattaataaggacaatatacttcttaattaatccattagtcttgccaacaaatgattctataatttatctatctattaatatactaatagagtaataaatatctcttaacagattcaagctgcactttcttcactagaagaagctctgaatgctggttttgaagacttcacggtaatcaacctacttcaagttattccattatcatattggctaagcatctaacattcttgcaattttaacagagaataagaactgatcctgacctggctaacgcaagggcgtcagaggaatttgatcctttattgaaaagatttgatgaatctttcatcaatgagaatgccatcaatgccattaaatctctttttggatttggtaagaaataacccattgtgtggacaaaagcatacagtttggctgactaaggagttggttgagcaatatgataattatttcccatgtataactttatagtttaactacacaagtccctcattttttgtcccttaagcgggatcttgttttatgtactagtataatcaagcaaaattataagaaacttatttatgatcaataaaattgtccatttccatcacctcctactttgttgcatgttgtttcccacaaatggccccctaaagaacctgatttgttttgaagcaaccaggtatatatgagaggcttgaatcaagaggattgtgcttgttacatgtcatggactattgtcctcttagttcatatagttgcgatttacgaagcaatcctgggcatgacttgagttaaagataatgcagcttgtgattctcaaaatctttaacatctatcttgatgaaatggcactaactccctctttcttttgatgaaactactcatttttttatgatgtttcatgtagctgtttttcaaccatcaatagatacctttctataaattgcaatttttttatatttttttactgttttcaacttttaattcgttcacaaaatttcctttgtttctaaaattttacataaacattttcatattttataaatggattgcaattaaatctctatagtgcaaaaatttaaaattattaaatatttatactacaaatttttttgaaataatatgggagtaacaccaaagataaactaacataacaaagttgtaggttttaccaattggattattttctcttatttgattttggacttgaatttcaatgtctcgtttctctatcgcaatgacgattagctccataacagtgattattgaaaccaatacttcgttgaactcatggaagcagatacaaaaagctggggctaatcaatggagcataaagtttattttctaatgctaatatagtaatataagatgactacttagaaaacttctaaacaatatattatgcgtatgaaggtatttgactagaaatgggcaggatgaagtcgaatttcaagtccttttactggttctagcaagggatcatacttaaacttctcatcaggaatcaccaaatcccacttgaaccgtttcacgatattatgcatgaacacaagaatctctagtttagcaaactcttgccccaaacacattcgggggccacctccaaatggaacatatgaaaatggtgtaggccctgccccttcaaaccttgaagcatcaaaagtttcgggatttgagaagagtgtcatatcctcgtgtgaagaaccggtgttccaatgcaactgcgagaacagatcaacatgagacaaggttctctccttgtagcgaacatgcacttgttttactggtcttatatttgtaaaaagagaaattatcaccaacaattagtattgttgagtctcaaaaaaacaaggaagttttggtctatttaacaaaagaaacctcgagtagttcatggaaacaagaacagcaaaaaaagatataaaaaagatttcaaagattgaaataaggttaaattaaacatcaactgaattagtggcctaatttaaaaatattgttggctgatgtaagaaaagaatattaataattgacagcaagaagacaagttttaaaagtacactatagactgtaactagtctctttagctttgatgttccattgtgttacagtaatatcttaatggtacatatgaaaatacaaatttgaagcgtgagtatgaagtaaagttaaagatggggtagcatttggctatctgcaatcataaacgagatattcccaagtccaaggtatgatatgaaaacacttcatgaccaaggtgtgatttcaatgaatgcagagtgaagaaagcatgataatagtataaaagcattacaaaagaaatgaaacataccttccaccctttagggatgttataatcagcatatgtgaaatcctttatagcttctctgtaagcaccactaacaggtggggacagcctcatggcttcagatgcaacattccaagagtatttcattttctgaacatcttcccattgcaacaattgctctgcctctttcccttgactaatttcaagttgttctgtcataaagataacttcaacatttaccctgatcaagttttaggtaagagcatatggctgaaaattaaaggattttattactaacctttcaagacatgttcataaacttgaggtaattgtccaagatacttcatgaccaatgataacactgatctagaactatcgtggccggcaaaaagtagaagaagtatgttatcaataacctccatttcggtcataaaccttccattgggatcagatgtaacaagcatgtgtgatagaaggtcttgagtaggtgatgccctcttctcctccaaatccactttccttttctttaaaatcattttaatttccttccttattacatctgcagctttcattgcacgatgaaaccttgttccaggaatgttgaggggcaggccaatgatccctttcagaaattcatcaaattttaacgaaagctttgatatatggtcagagtcttcaatgcttaaaaacaagcaacaagccaattcaaacgtgtatagctgtatgacgggatagacaaacacacctgctcctttgcttcaaaattgcaaagtaagaaatatagtattcaactttgagaaaataggcaatgcattgacattgtaaagtaatcacaatccatcatatatgataagtttgtcgatttttataataactaccttaaaagtcataccaacagtgatttaatattggttgatcatgctatttttttttcatttctgatgaataaccagttttattagtcaaaaacaaaataatatactcaatcaacactgtttaatcatcagaaaacctgtaaaacaggtgtccctcttaggactacttctgatctaagaggttataaatctaataatttatttatttatttcaggatgaatatgaaaagcagaattttcaagcttgagtataaggcccttctgtaactatttgctaatgctaaatcattatgtacctaccgactaacccttaatcatatatacagttgcaagtgttggatttaacccaaatttcattgaagattgttattgatagttttctataatatcgatacatatgtaagatttgtgtaacagataaaatatatgtgagatttgatagatatgtaaaaggtatgggatatatatgaaagatatgagagatttgaaaaatatgtaagagtctattagagatttattttaataggaaattgggtaagttttgataataaatttgattcttctcatctatggcaataggcaagttgggctggaccactataaattgtttatgatttgtttgtgatgcttttacccactcactagtagttatgtaagcatatgaaaagaggatatgatatttcccaaggatatggtattccccaccaccaaggatggaagaagggccacaaagaacaaggtattatttaagtaccattagtaaatagaatttagctgttatataacatttcttaccttcccaatatgtgtctatatgacgctgagcaatgctatccatttttggcaagtagtttctgagtgtttctgcattaagaaagctcatgagcaaccttctcaccatctttgcctcatcaccaaccttattaaccaaggacaaccttaacaacctcctcactgaactaggccaccacacttggacattcttgttctcattgctgaataggaacttgttcccggctggcccgcaaaacataacaacaggatctccaaacattgaagtcttgaacaccctggagtcatatttcttcactctttcttgtatgaaccttaacacgtttccctcattcattgtacgcagaaactccaaggtttctccaacaacaggccatcctaatcttccaggaggaagattgaggtttggatgtttcctgagtctgtcagctttagtgatgaaatgaagagaaaggacaaagaatgccgaaactgctggcaagactacaaggttggtcacctccataagatttagtgtccttaagaccttaactattgatgaaggacacaagacaacggagagtatgaaagactattctgggaaccaggaaaactaaggtgtaagatggatgacagagagattgctctttggggactgaatgaaccagataagatatataaatggaatttaattttcatatagtatctatgtaaaattgtaaatgtaacactggaataaatagaaatcatttttaattgtttgagtaattataataatagttaataaactgtttttttcttggaaaaaagtttcacatatccgaaagttataacactaataccagaaaagtagaatattagttaagaaataatttttctctccacaaatattactctatttacattgtaaaatataagtcaataaatttactaacttagcatacatatgactttgtcataagaatctatatagtgacgatatttgtctcctgtttttataatttgacccatttaagttgtcataatttttttttatcttttattgactagtttcttttttatattttgtttcttttatgctttatttgattgaacattttattttatagaataagatatgttttttgttcctttaaaattttagaaattcaattttaatcttttaaaaaaaaatatccatttttcattcttttaattttgaaatacatcactttttttctttaaactggtttagatacctatatagcgctttgaagataaaaaaaaattaaaatagaaagacgagacaaattcttttagaaaatctaaaatagaacttttagacaaattataagaaacttatttatgataaataaaattctgcatttccatcactttctactttgttgcgtgttgtttccttcagatggccccaaaaagatcgaacctgatttgtttttcaatgaaggggattgtccttattgcatgtcatggactattgtccttagtccccatcgttacgaagcaatcctgggcatgacttgagttatatttatgcagctagtatttattatttctaggttgtgattcccaaaatctttacttatcttgatgaaatcgctctagcttcccggcccctttcttttgatgaaattaaatttttttattatgtttttcacgtagctgtttttcaaccatcaacagttacctttttataaatttgtcaaaaatatttttttattgaatacaacttttaattcgtcatacaaaattccctttgtttctaataaaaaaacattttcatcttttgaatggatttcaattaaatctctattagagcaaaaatttaaaattataagatatttagactacaatttttttaaaaataatattggagtaacaccaaaaaaatagcataacaaagttataacttttattaattggattatttcaaattagggctctcttagcattcaacttgagcacaatttggatttgaaagcaagaccaacagtaactcctgtttaaaaaaaaaaaaaaaaatcccatgacaaacaagaaaatatatttgtctcctttgcgtaaaactcttctatacttaggttcttagggttcaactgtgtgaattggtttgtctaggttgtgcaatgtgcaattttagtcttttgtcagtttttcgttaactatttaatgtttttttgttgaggactgatatagcagatgatatcacatgtgaaaggaaaagaatttgtcaaagcactaaagtagagatggagttttataataaaaatagacatgaagagggggggaaataatataaaaaaccattacgttttcctggtgtagttttgcagacaaaagtattgcctcatattctttaggaattcatctgattttcttatttggttttgtacttgaattttaatatctcgtctcgcaaccacgattaactccaaaaaactagcatcaagaaagcatatacatttgttcaaaaaaaaaaaagaaaaaagaaagaaagcatagacgtgtacataacagcataatcaaaggtttattgaaaccaacacatcatagaattcatggaagcagttacaaaatgctgctaatcgatgtagcagaaagttttattcaaatactaataacattgcaatataagatgactacttagaaagcttctaatcaaatgttatataagataactacttagaaaacttctaatctatgtattatgcgtatgatgaaggcgtttgactagaaatgggaaggatgaagtcgaattgcaagtccttttactggttctagcatgggatcatacttgaacttctcatcaggaataaccaaatcccacttgaaccgtttcacgatattatgcatgaacacaagtatctctagtctagcaaactcttgccccaaacacattcgggggccacctccaaatggaacatatgaaaagggtgtaggccctgccccttcaaaccttgaagaatcaaaagtttcgggattcgagaagagtgttgggtccttgtgtgatgaaccagtgttccaatgcagctgtcaaaaaagatcatatatgacatgatcaacacgagacaaggttctctccttctaggatactagcacctcttttacccttttactgtatattatatttgtaaagaaccaatgattttcagaatttggtcaccaacaatcgttacttcagtattttttagcctcaacagaatgaaggctggtttcggtctagtgtaacataagaaacatcaaatagttcatagaaacaagaactgaaaaagaagaaaaaaaagataacagagacttaaaagattgaaacaacagttaaattaaacatcaactgaattagttgcttgatttaaaatattgttggtcgatataagaacagaatactaacaattgaaagtaatatgacaagttttaaaagtatagactgtaatgtaactagtccctttagccttgatgttgttacagtaagatcttaacgatacatgaaaatacaaatttgaagcgtgtgtatgaagttaaaaaggggtagcatttggctatttgaaatcataaacgagatattttcctaagtccaaggtgtgatatgaaaaatacttcatgaccatggtgtgattccaatgaatgcagagtgaaaaaagcaagatagtagtaaaaaagcataacaaaagatatgaaacataccttccaccctttagggatgttataatcagcataggtgaaatcctttatagcttctctgtaagcaccactcacaggtggggacagcctcatgacttcagatgcaacattccaagagtatttcattttctgaacatcttcccattgcaacaattgccctgcctctttcccttgactaatttcaagttgttctgtcataaagataacttcaacatttatcctgatctagttttaggtaagagtatattgctgaaaattaaaggcgtgaaaatagttgtcagcaatagcttgctacaacaattttctttatactacaacaaagtaaacaaacatgttcaaggattttattactaaccttccaagacatgttcataaacttgaggcaattgtccaagatatttcatgaccaatgataacactgatctagaagtatcgtgaccggcaaaaagtagaagaagaatgttatcaataatctccatttcagtcataaaccttccactggggtcagatgtaacaatcatatgtgatagaaggtcctgagtaggtgataccctcttctcctccaaatccactttccttttctttagaatagttttaatttctttccttattacatctgcagctttcattgcccgataaaaccttgttccaggaacgttgaggggaaaaccaatgatccctttcagaaattcatcaaattttaacgaaagctttgatatatggtcagagtcttcaatgcttaaaaataagcaacaagccaattcaaacgtgtatagttgtactattggatagacaaacacctgctcctgtccttcaaaattgcaaagtaacaaaagtattaattattaaactattgatcacaagtattctttttctttttcatttctaatttataaccagtgctattaatcaaaacaaaataatatagttaatcaacaatgtttaatcatcagaaaacttgccaaacaggtggccctcttaattctttaagactacttctgagctcagagaacataaatttaatgattttttatttcaggatgaatgtgaaacaaaagtttctagcttgtataagaaccttatgtacctgcccgctagtattggatttaacccaaatttcgttgaagattgttattgatagtttgctatactatcaatacatatgtaagatttgtttcacagactgaatatatgtgagatttgagagatatgaaaaaagtatgggagatatttgaaatatatgagagatttgaaaaatatgcaggagtcctattagagatttgttttaataggaaattaggcaagttttgtgaggatgggtcgtgagaatgaaaataagagtgagggagagattgcattgcaataaattctacaagctagatttgtttggattatagcagttttctgctccacacttgactacccagcgtttaccgtgggcaccataagtggcaaaccagaggtgtgtccttccctgtcctctcaatgctctaatgcccacaccagatatggacctgactcaatttgattcttctcatctatggaagtaggcaagttgggctggagcactataaattgtttatgatttgtttgtgatgcttttgcccacccactagtagttatgtaaccatgtgaagcaaggataaaatatttcccaataatgttgaagaggatgtggtattccccaccaagattgaagaagggccacttagagtaagttacctctatctctatcaatcttttgcttgatcattgattcataaatttaatcaacaaggtgttatttaaccatcatttagtattgatctaattggaagtctttggtagcacaattctcatatgacctacccaacacagtttagttgttatgtaacatttcttaccttcccaatatgtatctatatggcgctgagcaatgctatccatttttggcaaatagtttctgagtgtttctgcattaagaaagctcatgagcaaccttctcaccatctttgcctcatcaccaaccttattaaccagggacaaccttaacagcctccttactgaattaggccaccagacttgaacattcttgttctcattgctaaatagaaacttgttcccaactggcccgcaaaacacaacaacaggatctccaaacattgaagttttgaacaccctggagtcatatttctcctttctctcttgtatgaaccttaacacgttgccgtcattcattgtacgcagaaactccaaggtttctccaacaacaggccatcctaatcttccaggaggaagattgaggtttggatgtttcctgagtctgaaaactttagtaatgaaatacagacaaaggacaaagaatgccaaaactgctggcaagactacaaggtttgtcccctccataagatttagtgtccttaagaccttaactattgatgaagagcacaagacaacagagagtatgaaagacaactctgggaaccaggaaaactgtggtgtaagatggatgaaagacagaaagagtttgctctttggaataggactgaaccagagaagttcaagttatataacttaaaagcacttgaactgtgaactacaattcagtttatgttcattctggtttttgttttaaagcaaaatagttggtcctccaattacaaaacatgaaagtgacacttcaatattaatgtatctttccctgttgctccaatgaaaattagtccttgatggcatcactataacgatcattgaaggactaaattgaatatttacttaacattttgtatcttacccttttgctccaatgaaaatcaatcaagaggaataaagcttaagaaagtaaacattgtattaccgaagttgtacatatggatacaactagtgaaccgacaaatggaagcactaaaataaatgggaggaaaggcttagtgggatacatgataaaccatggcatcgtcaaagatactaatctctttgttgggacgatatttagcattgtaccataacatttgtgacctgcggcattgccattattagacacttggtcagatgaaagctatgccataagtccataacaaaccttgtggctgttaaatagccacttcagtgtttgtggccttatgagattattttctcgttttgcaatgacaaaatgatcatgtttttgtctatcccttcccctctcttctgttccgctgatgaagttctgtcatgtcatgtgcaatggttaacttctatctatactgatgataagataatatttttgtgattaaaaagaaaagtaaaaaataaaatcagagagtttttattaaatagtaaataaaggcatttccttataagataatatttttgtgatcaccaataaaattaaccatgtgcaatgttctgtcatgtcttgtttctaagcctttctttattatttaataatcatgttaatcaattattttgtttcaaccatgtgtaatggttaattttgtttcaaccaataatcatgtgacactaaataattgattaacattccttaaattaagggatagcacaattaattcttgttaggtaattaatgagtatatctttaatttaattaatatatttttttattgtccatgtgtcacatgattattaattgggaccatggatgacatgatggtcctggatcactcaataatttttcgaaactagaatacatcttgagtatattgacgataataacctaacttgtgttttcgtgctagtatttgcaagttacataggtggaataaatattgcaagatgataattgtcgaaaaaggacacatgacattgctggattggtttctttatttttttttgtcataactcttcgatttactaggaaaaatggatcccgactattccagttagtcaataattattttcgccaaaaattgaatttgaatactacttgaatgattcaaccttaacttctccacattaactacttatgtttaatcacttgattaattggtttctttgtttgatagaaaataaagaaatggaatggatgaaaataaaaaggaaaaaaaaggtgaaatataaagtaaattataaaaagtatttgattaaacaaaaataaagaaaagatcgagataaacatgagtatatatatatatatatatatatatatatatattaatgtcttacaaggtacaacaatgataattttaaacaaattcgttatgtttttaaatattttaaattttaaatcttaagtgtacaaacttagagattatgatattatttatatttttaatacggataatgagaatcaactagtgatttatgagtcagattttaacccattaatttagtaatctcatcaaatcaaatgatttactcgagtctcataacattgacagtaattatatatacatggtatgtttataggtgcgtgctataacgtgtaaatgagtgcacaacaacgtacccttgaactgaatatcctttaattttacgtggtgacccaagatcgatgaatgccttaatcgcatgaaagtgcataacccacccacacgtacagaaaatgggaaggagattttgtgattcatgataaccccacccacgtgtcccatttattaaaggaaatatccttgtcaatactgaacctatggaagcgtaagtgacgaacccaggtcagattgattggtagagtaaagatacgttggctagattgtgttggctctatcctcgtttggctagaattttaattcaatcatccatcatggttgtttaatacgataaatgaagtggatgacaaatgtttcaatccacaaattattttatgatctcgttttttctcgaacgcattgatcgagttacaacatactagtacttacattttagtctctaatattaatgtcacgttcaatctcatttacttctattaattcaaagtccatttaactaataagtcactacataaatattatttcacgttcccttatgactttatagttgtcaaatatcttataaaaccatcagcgtgaattcaagtctggcataaaaaaactatatataaatattaatgtttgcttttagtcgttcatgatcattttttcttgtcttaattcgagtatctttatactttcaaattgaaatattccatctctttgaagatattgaaattgctctaaatagagctatttttattttaataatcaaattagagtctttggactttttagtaactttctaaaatatttctacaaaattctattgtttagattaattatgcgactaattttcaaaactttgttatgcttaaaacttttaatgatatcttacatgaaaattgaatctaaatctttttcataaaactcagcttatattattaacggagtcatattcatttggtagtgttattatagttttagtatataaatatgagacacagacaaatacatgtacaccttaacaagtgaagttttctacaacgtgaatttaatttaattctgaaacaccggattcttatcaataaattgtttgccctatcaaatcatattcccagaagttatggacctccgcctcatagtggtgacaaagttgataagttatggatctccgctctgataagagattagtggaaggactaatggacgaatcaagtggtgacaaagttgatggtttcgttttgaaaacatgtactgttgaacatttgaaacttctgtggttgagattatccaagacaaattgtatcgcatttgtctactcctacatcatcattgtagtgactcttgctaatttagaaatatgccatttttagcaacaattctgtgcagactcactattcaaggcctccatcgtttgagttttatttctagccaaaacactaattttataaccaatgtatttaaaaataattattgtttgagttttataaccaaaacactattcaaggcctcgatcgtttgagttttattttttaaagtcttctagagtgagaggtcatggaaaataaattatttaagagggaataaattggtatacaagctcctacaagattacttcaaaagaagaaaacctgggaacaagatctaaaaaaatcttataacttgtgtatgcatataaatggatttgaagataaccaacgaaagttttcacaagcagccataattgttttataacaaaaaaattctgggcagagatgtttatgagtttctttgggtatgcataattaggcatgattcaattaacacaagcgggaatcaattgttctgcctctcactatatataaagcatgcaaatggggaaatattctctaaaagaaaagaagtaaatcattttgaattgaggattgcgtcaatgattaaaaagatgcaacaacaaaaatccataatattcaagattgcaaacacaatatcatataaggaaattcaaatagaagcaatacatgttaatcggggagctatatatatctatgaatgattagaactattcaatttctttttgaggtctatagaatatggaacctttgccttgcaattgtttgcatcccatacggcatgcattttggcactctgaatctgctgcgaattttatcttcatgcatatcttcatgcatttaccgaaacatgtggttacgggtatcttgccacgttcaacttcgtgacctgttgttgaatctactgccaccaccaatggcatgtatagaaccaagatcaccgccaaacctaaggatttgtaaaccattgtattgtatttgctgtgggccaaagaaatgcaaatatatcgaaatgtatgtaaaatggaaatttccttggaatgttgcgtgtgtgtggtgaaaaatcgatcaattggttgactttgttctaaattgggtttaggaatttgttttccaaaattaaaaattataggaatttggaatcacgagcacggtaaagaagttgtatagtactcaaagaagattaatcatcgccactccaaataataataataatttattattattattattattatgataagaagataaaccattaacttggtaaaaaaaacaaataatatagaattcaatacaataatttatttaattacatatcatagaatatattgaacgacatacagttgttaaacataaccaccacatagcaattaaacagttaaataaaaaaactcgtcattctaaaaggttctattttaattaacaattaaaacaatggataaataattaaatttttctaagaagcactcgtaaattaattcctgaaagaatgacaaatttaaagttagtattcgaacatataaaaaatacaacaaattaattttgcaataatctaataataaattggtttctaaaattataacttaatgtcaaattaattctaaaaaatataattatttatcaaattgatcgttaaacattataacctaataaaaaattgtttcacaaatttaataataaaactaatttgtcacattttttcacatttaagaactaaatttgtatttttatcttaaagtaaccaatttatcattatatcacactttgagaaccaatttcaacatttacccttaaaacattcataataatcttattgattaattatataagtatttaatagcatcaaatttggaatcaggaaaagaaaattatgtgacatttattgggatggataatagaggtgctcatgaattgaattggatcaattttaaagaaaaaaatcattcaatttaagtaatttagttttgttaatttatcatttaattagtttaatttaaacttttaattcgatctgatccgatctaatttagagcaatttggattagaataattttttattttaatcctttttctaattttttcagaaagtactaaataaaatgtgagatatatatttaaaatggcaaatattttatttatatgtcattatgtaactaataataaagtatttatgtattttaactcaaataattagtaaaaaaatctttaattaaatgcattttttataaatagatataaattatataatacttttataaatttatgagacataaaaataagtgatattataaatttatgaataaaaacatataaattttaattaattgcagtgaacgtggattgaacacatacgttcagatcttcagtctcagactctcccaactgagctatccccactctaaaaatattatttggttaagagttaatataactaataattaatataataaatcatcttacaaccttaaagattatccaaaaatataaaaaaaaaaaaaaaaacatannnnnnnnnnnnnnnnnnnnnnnnnnnnnnnnnnnnnnnnnnnnnnnnnnnnnnnnnnnnnnnnnccacgggagaagtaagtggacttatccaccctttcatttctctctttacaatatattgacccttttttagttttagttacttatataataatagtataaatagtaaaacttaaatgggtacgcctttaaaatttgaaaaagtctnnnnnnnnnnnnnnnnnnnnnnnnnnnnnnnnnnnnnnnnnnnnnnnnnnnnnnnnnnnnnnnnnnnnnnnnnnnnnnnnnnnnnnnnnnnnnnnnnnnnnnnnnnnnnnnnnnnnnnnnnnnnnnnnnnnnnnnnnnnnnnnnnnnnnnnnnnnnnnnnnnnnnnnnnnnnnnnnnnnnnnnnnnnnnnnnnnnnnnnnnnnnnnnnnnnnnnnnnnnnnnnnnnnnnnnnnnnnnnnnnnnnnnnnnnnnnnnnnnnnnnnnnnnnnnnnnnnnnnnnnnnnnnnnnnnnnnnnnnnnnnnnnnnnnnnnnnnnnnnnnnnnnnnnnnnnnnnnnnnnnnnnnnnnnnnnnnnnnnnnnnnnnnnnnnnnnnnnnnnnnnnnnnnnnnnnnnnnnnnnnnnnnnnnnnnnnnnnnnnnnnnnnnnnnnnnnnnnnnnnnnnnnnnnnnnnnnnnnnnnnnnnnnnnnnnnnnnnnnnnnnnnnnnnnnnnnnnnnnnnnnnnnnnnnnnnnnnnnnnnnnnnnnnnnnnnnnnnnnnnnnnnnnnnnnnnnnnnnnnnnnnnnnnnnnnnnnnnnnnnnnnnnnnnnnnnnnnnnnnnnnnnnnnnnnnnnnnnnnnnnnnnnnnnnnnnnnnnnnnnnnnnnnnnnnnnnnnnnnnnnnnnnnnnnnnnnnnnnnnnnnnnnnnnnnnnnnnnnnnnnnnnnnnnnnnnnnnnnnnnnnnnnnnnnnnnnnnnnnnnnnnnnnnnnnnnnnnnnnnnnnnnnnnnnnnnnnnnnnnnnnnnnnnnnnnnnnnnnnnnnnnnnnnnnnnnnnnnnnnnnnnnnnnnnnnnnnnnnnntgcttgatatattaattttgttataattttgcatatttcaaatgcattttaagtaaatattgttcaataattcattttcatcaaataaaaacaacctcatttacgataaaattgtgtcattaattgatattaaaaaaaagtgaaatttttcactctttaacaattgtttatatttattttcacacttaggacaatcattttgagtgaataacacaggtataggtaaaataaactgtttgattttattataaatgtttatgcacttaaatattatatttattgtattaattctattatgattttgcatatttcaaatatgtttttagtaaatattatccaattttattaaataaataaatatatttaaaataaaattattacattagttaaataaataaaaagtataagttgttatattatttgacagacgtctatatttattttacagtttaataaaaaataaaattcaaataaaaatgcacaaatcatatgtttaaaaaatctatatattgaattgtttgagagataattataatcaattcatcaaaactaaatcatcaatcatcaattgttttccaacccctagctagagatgttgaagctaggccatcctcaatgtcatcctttgaccgtagaacctacaaatcacaaatatcatcatagaacaggattgtatagtctttatagataattttaactcttatactatagattgttttattttcgtgtaattatatatgaataaatatagtcaacaattatcttcttttacagattctgaaataaattctatcaagaaataaactaatcttataactcataacttaacaatcaagattttactctttttattacatctcatatactatttcaaaaaaattgaatgaaatatataattatattttctttaaaaaaatatatagttattaatcaacaattatatgtacattttttaccctaacgtgcggccattgagactggtcaactccatggagaagaaagaaatgcgaagagtaaacccggaggagataagaagtgactaggtaggtcaaattttgcacatgttcatgagatgatagagagaagggaaagaggaataatcgataatcgagaatcgagatggtgtggaacagcatgatggtgttgagagtggcacgtgtctctgctcaagcgtggcagtgcattgcggagcctgagcctctgagcagtgagcagatattggatctgctttgctgtttccctctccatcaactcgctttctctctctactcctttttctgcgctcctcactccaattattcctatttcccttctcactccgactccgactctcaccacgatcattcttccgatttcgattactattaccaatcctattcagactgaaaccaaaccatattaggtactattgccaattcaaatttctccaacaatgcttttattcaaattccatccttattgttaaattatgttgaaactcttttctaagcctgatcttgttgccatttatgatttatgctgtaagaggaatcattttactagagaggaaggaacatatctacatatttatgacttttgtttttgctggagtactgagttacaaatgtttctattaataattacggaaacgaattgctcattgtcttgagagtatcattccttcatctcagaataagggaataccaaacataataagaggagtgagactttcattcatttttccattactattcccatcaagcaaagccattccaatgaaccaaaagttagctaattggttcgtacagaaattcacagaatgccatttctacgctagtgttgtcatcacaagagttgctatggttcgaaatgttatccaataacctgcattatgtattcaccttgattcattactcaatagatctaagttcttgtgactactcctgcagttaaacaaattttgacaagttgctagaaattttgagtttatatattaggaaatcctgcttaaatttcttcaatgaaatgttgtgttcttttgggaatgtagattataagaaggatttttttgctttgtatttgtccaaattctgggataatttgctgcgagttattgtcgttagactctttattatgtctctgctgactatgctttatgcccttttgacaggaatttgcctgctaattatctccatgaagtgatgtattgatagactttgggtggtaagacacgagatcctcaattgcagtctcttgtttctcagtcagttccttatctgaggatgaaagcttttttcttttttttttcgaggactttagtagtgttcaagctgcctccattgtataaaagcatcttttacacttagattcttgtggttgattgattgatctcttcacattttatacccttgtaaagagtgatttgtgagtggtaatatataattttaaactgcccttgaaagggagttttgagatataagttacttcaaaactgaactttgtatagtatatagtatatagcatataccttcaatcatcccatatttctgaaaaattgacctttttttatacttttttctttcctataacatgaggttttgctcatgaaggtaaataatcaatggtagcagtaccagaattcaaaactaggatgtgcagtattcctctcaagtgtttttagtccgaagaaagatgactattattctaaagattttgaatggaaggaaaaatgagagggcaagattttcttccttttcatttttgtctcctctccaatattagtatcaggataatctggaggatgttgacaaaattattctcaagattttagtaaaaaattatgtcttttaagattttagtaaaaaaattattctcctacttacatacaatattgtggtcatataacgtaagatctccatatataccagatcggggaaatgagatagtaaatgatgtgaatttctattaatcacatcaccatttatgagaaattgcacaattttttttagaaagaacaaaacaaaatagatactatatatattatatagggataaaaaaaaacttattaagagtactgaatttgactataaaaaattattgactttgtcttataaataagattagagggaatgattttttgtctagatcacaagtattttttgttggaaacaatcctattcaaatcagatgtttaatatggaaaataaaattttctttcgaattatttaacacaattacatttctttcattagataaattaatttatttaatgaaannnnnnnnnnnnnnnnnnnnnnnnnnnnnnnnnnnnnnnnnnnnnnnnnnnnnnnnnnnnnnnnnnnnnnnnnnnnagaatgacttaataaaaattagtataagttaaaaaaataattgatatttgattaattaattatgttataacatataatatgtttatgtatagttagatgtcaactataaatatttattaataactaatatataaaaaaaaattaatgtacaattatagataatatataatagtttaatttatatttcataaaaaaattgtagatgtctacaagtctttatatacggttatgactatatataaaaagacatgccataaagtttatgtgggttttatcttgttgtctggttctctctctcgagttcctgttctgcttatctgtgagaaatgttactgtaagtgaataagagaaaaatgtttttgtttacaannnnnnnnnntataacgtaagatctccatatataccagatcggggaaatgagatagtaaatgatgtgaatttttattaatcacatcaccacttatgagaaattgaacaattttttttagaaagaacaaaacaaaatagatactatattatatagggataaaaaatacttattaagagtattgaatttgactatgtaaaaagttattgactttgtcttataaataagattagtgtaaataattttttgtctagaccacaagtatttttcgttagagacaatgctatttaagtcaggtgtttaatatggacggtaaaattttctctctaattatttaacacaactgcattcctttcattagataaattaatttatttaatgaaattatttttgatacatatagttatatatctaaatctgaatagttaaaatatatggaatttgtattgattaattataatgataagttatttagatgatatgaaaatattttttttatcggtttgagtcttttagaagatgtaaaattggaaagtggaagatttaggatacaaatatttaattttatgttctgattttttggttgaatattaaatatattataaaaattatatcttttggtaaaagtatattataatcatgaaatttccttcaaacaatatatattaatatgacgtataatcagttttatttggtaacgtcaaatcatgatgaattggtaagtcataacatcgagaaaactcaaatggttgaaatacatatcttaatataataatgatcgaggacataaattattggctaaattactgtccataatctgcaaattccagggcccaaaaggataaattaatgttgttcttgattgaggctcttactactatttgatttagtcattaatatcattattatttctgattacatttttcctccaatagtgcatgtactcttatagaatatataaattctcatcctttgtccacttttcacttcacaagcaccttctagctagctccatttagattatttgataactaaagtatagtagtatcatttttatttttttatctcaaagatgaaggtcatacttgccgtccttctaaactttgttattacttcatctaacttgtgtgctagagtaaggcctgaggcaagtcccagcttcaatgttgttagctacggtgccaagggggatggcaaaactgatgattcacaggtatatttttcctagtttcttataattgtatttataaatgaggctatatatatatgtatatatatatatatatatgatgctacattaaacctatttggcaatacttgtaaaggcttttgtgaaagcatggcaagacgtgtgtggtgcaactcaggagactgcaacacttgacataccggggggaaaaacattcatgttgcaacctgtgtcgtttcagggtccttgcaaaccagcaaccattaacattgaggtaaatcatagtaaatgaattacttacagtacatataaatctgtgaatatatgcatatgccttaattcagccatatattgcttattaaagtttttaattagcacatcttcaatggtgcaattatggtaaaattgcttaattcacttttaatgtgtcttacaatgttaggccttaattgatcagccaatatatattatgcttattaaagtcattaattagcacatcttcagacttcaatggtgcaattatggtaaaattaattgcttatctcatgcactcttagtgtgtcttacaatgttatttaagagctttcaaaatccaatggtacaagaacataaaatgaattctacaattattaatttcacagttgtttgtataagaacttttacatcaatgttacttaaattcaattggaaacggtttcataatatatatatatatatatatatatatatatatatgaatatatgatattctttattaattaatcctcatttgaatcgcagcttgaggggactatcattgccccagaaagcgttggcgcttggaaatggccaaatggcgataggaaatggatccaattctcgaacataaatggccttgtaatcaatggaggacaaggaggacaatttgatggccaaggtgatgcatggtggaatgatgtctctaataggcccactgtacgttgaaaattagtaaaatcatgacttaattactcttcttttaattcataccccaaaatcgaatattaatttcattcattcaaatacttatgtgcatgcaggctcttcaattccataactgtggaaatctaagtcttagcgccacgactcacatcaacagcccaagaaatcatataagcattaatatgtgcaatggcgtaatcatttccaatattcgtatcatggcaccaatgcagagtccaaacaccgacggtatagatatctcagcatcatccaacatcttaatacagaattccaccattaaaaccggtgatgactgcattgccattatttccggttcgtccttgatcaacataagtcgtattttttgtggacctggtcatggcataaggtgggcttagttcaagtcaatttccagcttattatccagtatatataacatgaattaagaaatttagtttaattgattgaataaagtatgtgagtgttatattctttgatatttcctttagtgataaattcagcagatttttttttcaataggggcaaaaaaaattataattttcacaaaatacataatattataagaaaatctaaaatatcaatatttttacaaattataattattctttaatattttcatattttaaaatttttgtatgattttttattgataatactataaaaaaatacaaacataaaatataaaattaacaccaatttatctcttataaatatttacattcatcttaaaaatatcttatgggggtaacttcaattttttatgagggcaaaataaaatttattatacatagacaaataaaaaaaatattatgcgtgggaataattgcccgaataaactactatatggatccgtggttcactatcttctgttccttataagaaaaaaaaagcgtatatagcatgacctttaactcgtggttaatttggtgaatcctagtgttgggagcctcggacgtaatggagattatgctagggttgaagaggtacgtgtgagtaattgcaccttcaaaggaactgaaaatggagtcagaatcaagacatggacggtaacgatatgattgattaattggctctctgtctctctctctctctctctgtctctctctctctctctctctctctagctagttaatactactattaatcacaattaatgcatattatgtgttatgtgttagggaggatccggttatgctaggaatatcacatttgaagatattgtagttgttggggttaagaaccctctgattattaaccaaaattattttgggcttgaagaagaaagtagtggagaaggaaaagcagtgcaaataagccatgttacttaccgaaatgtgaagggaacttctagtgtgaaggatgcagttatactgaattgtgatcccactgtagggtgcaccgacattgtattggatgatatttgcataaccactgaagatggcatgaaaacacaaggatcatgcaccaatgcacaagggatgtgctctgactgtgatccaattgtctcatgtctttccaacaaagattaatttgtaataaacttccactagtgtcacgtggagatcatccaaatttcttgtctttcaaactattgaaatggcatactgagttttgttgttttttaaaaatttaaaaggctatattataaattaagttcttcctttcttttgaatatataatattcttttctttagttgttgaattttttttattcatttatttttataactactataaaagtaatgaaatatatatatatatatataaggacacctgattccatcttttaagaattagaccaaaggttccttatgtaactggtggcatcctccttgagtccttgggttgcatggatgtatataacagtatgaaaagattgcgtttgttttgttttttttttttttttttttttnnnnnnnnnnnnnnnnnnnnnnnnnnnnnnnnnnnnnnnnnnnnnnnnnnnnnnnnnnnnnnnnnnnnnnnnnntattctattgtacacggaaaaataatttcatgaaaaaggaatgattggaaattagtaaaaaatcactcacatggatggtgaaaatagcaattgctgatataagaatagcagcgcattagttgggctacttctgtacagtactaataagtccatttatggatgtgactggactcagtccaaccaatgagcaatatttgttttcattgtaggttttttttttttgttctattttagaagttatgtatcttaatttcattttatgaattcatcttcttacttttttatataatgacaaaataaatattactgtaaaattttgtaattttatatttcactattgagcttattttaagttgagagctagtcaggaaaactaaaagaaaaatattaatagtcctagggcatgtttcactaaatctaaactaaaccttattaccttcgagttagacagcaaacagataccactaatggcaatggcatggttttaatttttaaataatctaatgaattctgagtttggtttcattctaaggcaatgcaaggaaaggctacgttggattcaaaactctagtaggaaatttgttggacaacttgcctattctttcgttagggtgtccagattatatgttagtcaacattgttttgagtttattataaattgcatttaagtcattattatgattggcatgattattttgcagtaaaaagaaaaattaaataatacttattcgttatatttatatagacgacggatatttaaataatactactttgttgctgtggatttcctctattttttaagtctactctcttcttcctatataactatgagttgtttatttttttacatatttattaaatatatatttctcttaaaaaattaaatatttttctcgcaatcatttttacttttaatgcttatgttcaaattttatccaaattacaaaataccttaataatgtttgatatatctactagtgttattgaaataattttactttatattgaagtttttttttgcaatgataacaataaagataaaatctaatacttcatgcatattacttaaacttcttttcactaggctggctcactaaaaaatttaaaaaccaatacatcgaaaataggttattattggttaaacacaaaatgtaccatcaaagataaaataaagtattcaacaaaaatgattaaaatctaattgaaatttatataatcgatacccaaaacagaacatggaacatgtatgcctgtattcaatgttcatttcgttctctctctttttcatttatattcttatctttttcaactgtttaaactcctttttttttgtttacttttatatatgctcttctctttgtaaattttgtttatttgtttttttaatttttcagaatttaaaaatgaattggggcaaaatatggaatttagcaaacgctaccatttttcaaagctccattgaccgtgattctaaagcagggataatctttgcctatgatatgggtgagtgatgcaaacgtttccaagggtttagaaccagatccacactcatgtagttttatattcttgattaactttatgttggtcaagtcgtctatacaaccacttttagtcaatttgttcacatgaaaagactgatgaaaattgaaaaatgctaatatatatcagtagcgttttgagtgggtgatcttttaaaaatgaagtgatgaaaacgctaatagtattaacgtttttatacacgtagtgtacattgttaatctctgaaatccacgtgttgtccatttgagatatcacaaattaacaatatcctacgtgaacaacatatggtgcagtttatatttagaaaaaaggaaataaataatttctggaaacactccattgagtagcgtattctaccgttaatttcccaacgtactttaataatacgtttcaaaaaacaatcctaatctgattaaatgtttgtaaagtgaaattactatgatgaaatgatcaagcagccaaaaacaaaagcaaatggaacatactaaaaataaaggcccaattataatagtaatatcacatcccaatgatgcacctcattttctttgttttagttgctattttcagaaattgagtgcgtatttaattcagaatatctttaatttttagaacttcaaagaaaaacatttcagactttattttttttaattacccaacatgcttggagtgcttttctttgtttttgctctgagtaagaattttttgcgttggtggggtgtgttgtcccaatgtgtgtggatgtgagctactaccacaaaaactcccttaaattacggtccaatatccaaactgattcagagaagaaaataatccatagctaccgcagaaccttcaaaaagcatttggtatcttcatatgccttttcaaattcaatgatacaccattaggggaaaaaagtaacgtttaagtcaatcaatcataaaatttatgagtaaatagtttattgtaaaaaaacaatattatcattcaattgttaattgtcatatagaattaatggtagtgtatttggtttgtggtttagacgtccatatgagttttacttctcataaaaatcattttcatagttgaattaaaatcttaaacgtaatttctattcaaattgaagttaagtttgaagttattcttctattattttttcattaaacgtaaaagtttcaaacataaatcaagttatattaaacttgtttttaactaaattttacaaagttgggatcaatcaaatttggctttctcaattataatccaaacacatactattttaacttttgtgccttgtaatgcatgttttttcaattagttgcactcaactcaactggcgttgaaaaaacaattactctcacattgctttggtttttgtgccataaaatgttttttttttcattgaatatgaatttaaacaattaactaaacacacactaagttattgatcttaatcgaaatgagttggaatgcttaagtaaaatttaaaatttgagtatagtaaataaaaaaatatggttgaaaagttcaaatttttttaataattttcgttatgaaagtaataataatttatcgcaaaataaaaaatgttcatgactttttaacaagtaattcaaataattcataagaaaaatcctacggcaattcaagacatatatatcttcaattaattagaatgtcactctttcaatcattgaagtaactgtgagcataagatttccctcttatccatgataacccgaacatatatctatcgaagtacacattaaaaaatattacaaaattaccaacttatgatagctaatagcttacttatttaatagtacgatagatatatgtcatataaaattagtccattgtgtcaaagtactgctttaaataacattaacgcaaatagcatatgaggaataaattgtcaacatccaatgtcaagactcaagaacaagaatattgttttcattctctttcgttatgcatttcgatagttcattcatttccaaccaaacctaccatatttgctaatgattatgtgatatcccaccttgttgaaatgctttgctactttctaagatctatctaatctatagtacatataaaagaagacaatgcattttgtagtcatcatatagagctgacccattaaaacactatgatcacgattcctgtaaacttttttttttagaggggtaaaagtaaaacaatagtttgcaaacttaaaaagatgaaaatatgtagaccccaaagaattgttttgatcaaaatttccagcttgtattccttcccttttttcatctggaacatatatactatattcttctctaatactataagttatttcaatcctacctttaagctttctaggaccatttgcaaaagtctcccacttgcccaccattataggatcctaaaagcgcaataattcgataaaaaagaaagtcgattttctatcaaaacctttacggccttgctatagtttttatttatttatgaacatttgtttttgtggttcacattaatattgggatatttgaacgagacataattcatatgaatctgattttagtatggagttgtgcaatggaaatgcgtccttcagaagaaaaacaccgacactgacacgagaacatgctctgtttgcacattctagatgatgctggaaaatcaacactgcaaatatagttggctatgcataattttattataagaaaaatgctttctggtttattcattgaaaggcctatctttatatgtgcaataacaaataaaggcagatttatatatagaggaatggtgtaaaggaataatgatgagagttattttaagagagagaaaaaaaaaagagaaaaaaagcttaaagaagaaaaaggagaaagatagagaaggaaaaatgagcaatcttttgtgtcatagttgtaagaatcaaatccaaccaagattacatccttattaagtgtgtttttgatggtgtagaagaaaaaatatataaagaaaataaagaaaaaatatttaaattaaaatagaaagaggtgaagaattcatgctatttttaaaaaaattattcttaaataataattttctcttttcaaccaaatcattcctaaatgaataattcattcgacagcagcataatttaactgatttgtaaggttaggtcggttttaatttttgctagcaaattagtactttatatctaaaaaacaaattagtactactttttatttttaaaaatagcaaaatactacttttcataataagacattcttatgtttgtttgttttttaaatgctaaaattatctctagaaaagataatcttatttaagttgaatatcataattataattagtaaatatctctttttaaatgttgccctaaatactttttaattcttgtaatttagtgttttttatttttagttcttgtaattttatttttatttttaattctcataaattatgtttttttcatcattattacatttnnnnnnnnnnnnnnnnnnnnnnnnnnnnnnnnnnnnnnnnnnnnnnnnnnnnnnnnnnnnnnnnnnnnnnnnnnnnnnnnnnnnnnnnnnnnnnnnnnnnnnnnnnnnnnnnnnnnnnnnnnnnnnnnnnnnnnnnnnnnnnnnnnnnnnnnnnnnnnnnnnnnnnnnnnnnnnnnnnnnnnnnnnnnnnnnnnnnnnnnnnnnnnnnnnnnnnnnnnnnnnnnnnnnnnnnnnnnnnnnnnnnnnnnnnnnnnnnnnnnnnnnnnnnnnnnnnnnnnnnnnnnnnnnnnnnnnnnnnnnnnnnnnnnnnnnnnnnnnnnnnnnnnnnnnnnnnnnnnnnnnnnnnnnnnnnnnnnnnnnnnnnnnnnnnnnnnnnnnnnnnnnnnnnnnnnnnnnnnnnnnnnnnnnnnnnnnnnnnnnnnnnnnnnnnnnnnnnnnnnnnnnnnnnnnnnnnnnnnnnnnnnnnnnnnnnnnnnnnnnnnnnnnnnnnnnnnnnnnnnnnnnnnnnnnnnnnnnnnnnnnnnnnnnnnnnnnnnnnnnnnnnnnnnnnnnnnnnnnnnnnnnnnnnnnnnnnnnnnnnnnnnnnnnnnnnnnnnnnnnnnnnnnnnnnnnnnnnnnnnnnnnnnnnnnnnnnnnnnnnnnnnnnnnnnnnnnnnnnnnnnnnnnnnnnnnnnnnnnnnnnnnnnnnnnnnnnnnnnnnnnnnnnnnnnnnnnnnnnnnnnnnnnnnnnnnnnnnnnnnnnnnnnnnnnnnnnnnnnnnnnnnattttaatgttctctttcattttgaaagagattttttttagaagtgtatataaatataaaagaaataaaaggtaaaaataattatatataatgttaaacgtcatataattaattgattttgaaataatagaattattacttggcatgctaaatattcgaggagatttgttcttttatgtttttcctcttaaattttcctcttaaacaaataataaaatataatatttttatcctatcatttatatctccttccttctctcttctttttaaaacaacaaagggattagtccttgtcattttttttttacaaaatagattaataacgtttttttccaaaaaatatagaaaagattaaaatttcatatatatatatatattataaacataaaaagagatatattgttgtgtatatatatgcatgagggatatgtgaccaaaaaaaatatataaataaatgatcaaattatatcattnnnnnnnnnnnnnnnnnnaagatattttattagatctatatattaggtcagtaacaaatatattattaatatataaaaaatatttgaatttatgatgtatcttacaatcaagcgaatgtaatggaaaacaatacatatgcattgtttatctttaattcattcttatttatagctaattgtaattttgtaatattaaattgattacatctttacatcataattaataataatgctatggacaattttaagccatatgttatattttaacatatagcttaaagtgtctcattttttatttttatattaatatgaggcagtaaaatgaaagtatgtaaaataaataacatgaaataaaattgtcattgttatgatcgttaaattaataaattaatattttattcataaatttctatacgatataaaaaaaattataataattcacccaattaacaaagaattagaacttgttagttcataaaataaatttgatgtattatgctatttttttatatcagagaatggacgttaaggatatttaaaaataaagttcctcaatggtggaaaaaatgttctaaataaaatattaaacacgcagtaacacataatgtttttatcttccccaggacaatcctgtgtcacttgggtcaaagaccaacattggattccttttaaagattcgaagatccaaccgttgcgtaattcccatttttggattatttttaaaaatttaccattcaataccgtacagaaatggattcagttctgtgatggtcacgggcgcgcctgtgagtgtgatgatgagtcgctgtacacgtgtagggtcagtgatgcactttgggtgaatgtgaatgggtctaatcaccctggtacatgacgaaatctctctcacttacccttgctactacttctgcactggattatcatatctcaaattttccatgatcttatgttaaattcactttactttttttggattaaaactctcattgactatgattcattcatatcaatattattacattgttctagaccaaattgatcttaaactcattaaataagatcatgagttcaaatttaataaacgttattataaaaatagtcttcattataattagtaagaaaaattctctaactgttattaatattttttatcctatatcaatgatagcggaagtttcttaattcattaaattagagatctatttcaatctagatacataatttttgttgggccaacactttttgtacacataaaaatcaaacataatctgctaaataaatcatttactaattgtggtggaagtgtgtaaccttacaccactaccgaagctctatgggttttaaaattattagtataatgtataataaaaaaatgagaatgacttaataaaaattagtataagttaaaaaaataattgatatttgattaattaattatgttataacatataatatgtttatgtatagttagatgtcaactataaatatttattaataactaatatataaaaaaaaattaatgtacaattatagataatatataatagtttaatttatatttcataaaaaaattgtagatgtctacaagtctttatatacggttatgactatatataaaaagacatgccataaagtttatgtgggttttatcttgttgtctggttctctctctcgagttcctgttctgcttatctgtgagaaatgttactgtaagtgaataagagaaaaatgtttttgtttacannnnnnnnnntttttttttttttttgtaaatgttaaattttattaatctgatcagattattacgcttactaacttatataaagtgtaaatatttataacttgtaaagacattaaattactaagttataacaaataaattatagaagtatgttatgaaaatgaattaaatattttttccatgaaacttagtattttttttttgtttgtctttacaaaatattttttttatttttcgttcttaaacgttttagataatgttttgaataataaaaaaaatttaaacagtaaaaaatgttatttaaagaactttaagaacaaaaaataaaacaaaaatattttgtaatgattaaaatgaaaaaaattacagatacgnnnnnnnnnntatatcattattattttgactaactattatatcattcattaatttttaattaaataatattttagattaaaagtttttctatcatagatcatatatgtaaatttatgtattaatccaaatttatttactattttatttatgtagattaaaattaatttaatataattttttttaaatatattaaaatatgaataatttgattatctttttattgatatttttattgataaattattatgtttaatttaaataaaatttgacacaaataataatatataaatataattcaataattgaatgaataaaatttatattttatatcaagttataaaataatgtaataattatttaagttatattaatataatttaatttttttctctcgtgtgtgtatacgtacatatattagtttttaatactcactcttcaaataatataacactgtattgtttactttttgtgtgtttatttttttcttgtttcccttctcccaaaattttcctacccaaacatagctaaggcaggcatctattatgtcattgaaatagattttgtcgaaacaagcttaaacaaagctgaggcatttattatgtcaatgaaatggattttgtcaaaacaaactaaagtcaattctcgatgctttaatgccagctaaagctgtagtacacacaggacatcgttagtcagttgataaagagcgatgaattcgcgagtgtttggtatatataacttatttttacaaatttatcgacattgttttaaacaatgattgtttcccgaaaacaaattaaaaaaatgtgtttttttcagatcatgttttttttttctttttaaatttttagataaaatatgttttttgtttattaaatatttcaaaattcaacttaatcactataaaaaattaatgtttcttcagcctttacatttcagttcccaataaagtacatggttttagtttatgataagagactaaaactacaccacattttataaatgtagaagttaaaaacttatgaccttaaaatttgaatttttttagggataacaacatatttgatcatatttcctaaacaataagaaatatttaacataacaaattactcaaatgagtaatctatagcattatcgtgtttactaattgaagctatatttactattatacttgtgaaggtgtaccggatttcaaaactgaaagaaaaaaaatgttaaatgaaaatgaacccgagtcatattctattcataaagctagtaagtactcagtactcaccacataggttgttagaaagaaattgtgctaaagttatttgagattatgaaactgatttactttattacaagctttaattttattttaacatattttttaatgaaaaatattaaatttataaacaaagtttcatataaccaggggcaaaattagaagaaaaatgttagggggccaaaaaaattaccataggccgaagactaacgaacttaatgcttagggtcaagggtttgtggggacgaatttttattttaattaactataaatgttggaggctttttgatattttgaagaacgactgtccctgtacccttacacctagttctatccctcaatatacagttttttttttacatttttttttatggaattggtgtttacttaaatagttaatcaaagtgtagaataagtgtggaaatggatcttttacatttcaaaaattaactacacctaatggtattcttatcctattgtttttctttatacttataactttttatgatagctgattttgatgattgtagttatttgtagtttaaattttgggatatacatgttaataatatgaagtattaataactttaccagtaactaatttttattaaaaaaattgattgattatttttagtaatttttttttcatctttgattatgggattttaattaaatgatatgaacttagtttcatttgaactcatgacatgtttggtttgaaattttgaataattataaaactgcagttcgtctgctacaaaattaagttccttcaaatagacagatatttaatatttttttaataagtactttcaaaatgttcctttaaagattattatttctatttaaatattataatttaaccacgcgtcaagcctcgattattaatacagtaaatttatatcaatttaaagttaacaatacagtaaataaataaataaaaactttatttataaacctacattctataggacatgtggtctgcgagatctagaaactagtgctttcgtttgcatagaatatattatcacctgtttaattgtgatcgacttctaagctgtatgaaaatgtaacaaaaattaattaaaaatatttattatataaaaatatataataattatcattttttaattatttaaaatcaaccctaaaaactgatgtgtattcctatcatcgcaactattttcttgagatgttatgtctattgggtgatggagaattgcactacgattccttaaaaaatcgaatacgattcaaaaggaaatatcatattttagaattggaataaaggaatcattgtctttagattaacactaagataaataaatgaaacacatggccgtggatgcgacgccaagttacacgtgattgtctcagagaattgtgtaattaagtatgtgcatacaatatctgcaaaataatttttccatcggattcccttgtgaatgattaaatataacactttttttttttttactgagaaatggacccacttattcatttatcaaatgatgaattgttgattgacattatcctttttgttagagtggaagaataagagtgggtactaattgcagtaatgagccaaaaatataacatactaattattattttctttaaatgagcacagtgagaattaagtgacctaaggtgataaagggcatggacaaatttctttagaagtatttttaaaagaaaaaaataagaaaaaaaataaaatgaatttttttaaaaatgaaaataagttatttattagctaagttttaaaagttcaccaatataacttctctaaaagatgagataatatctataaattagctaatggaaagttcattttaacttatggaannnnnnnnnnnnnnnnnnnnnnnnnnnnnnnnnnnnnnnnnnnnnnnnnnnnnnnnnnnnnnnnnnnnnnnnnnnnnnnnnnnnnnnnnnnnnnnnnnnnnnnnnnnnnnnnnnnnnnnnnnnnnntattttctttctctaaaagtacttttagagaagcttacatccaaataggtccaaaatagattaaaaaatactgtgataaattaagtgatttaactcgttaatctattttaagtggtcaacccaccaatttattggattgaaggtggggtcaagacgagttattctatttagcctattaacattaataacatgtttaaataactttataattttacataattaaaaaagaatggattacaccctaaaaataatgttgatacaatgaaaatgtataaataacatctattgttttatttttctcataaaaataattgattcagtatcatcataaattaacataaattcactctctattaatccactcttcactaatgggttaacccacctcgcacttatgataagttgaatgtgagtttttttttttttaggaataaataggcttgtgttattcagannnnnnnnnnnnnnnnnnnnnnnnnnnnnnnnnnnnnnnnncagtgtacatcttgcactaaacctcttcaagccaataattatctctgggagttttttataattgtgaatttaagcttaatttaattaaaattggtttataaactaacaattgttttttatttatatattttatcttgatattattctataataattttttatatcattttagaattataaattttatttaactcaattttataaaattattttttaaataaaatttattctaacttatatattctattttgattttcagtgtggttaacgtgggatttgagttttatttcgctaggttaatttgttttgccaatcataagataatcggacatgtataataataaaaatagtaattaaatttttaataagtgattttttttcattgaatgaatctaataataatggaagagtaacggatagtcacggtcagaacttgggacaaaagttgctcctccttttacgcataaaaaggaaatttccagtccttttgttgctaaagaaggaaaaaaaaaaaaaatagaagaaaatttcaagtcaggttgcctgaaaagtgaaacccgtttaaagcaacaagaagtatactagaaaaaaaaactcttcggttaaattttataaattaaaaaatcaattaaaaatttaagttaaatagttacattatcttattttttattatcaacattttcattatttttatatattcacgcattttaaaaagccttttcctttttatttttatttttgaaatgcataggataaaacggtaaaagcggattgggtctggcacagtgccacggacacaaacactgaaacacgattcacagttcacaaattcacatcagtatctatctaaacgacaaaattaacacaaatataatatgataggaatgttagataaatcttattttttaagtatgtgattataaatttaattaaattatgtatataaaaatatttattaaaatagattaatttttgaatatattattatctccaaggattaattcttaatttttggacaatgataccattccaaaagaaaaaaataaatttaacatgtgatcattacttaaaaataataagaagagtgtgatcacttcattcatcaaaattataaacatatatacttacaaaaattatcaaaaaaataacatttaaaaaaaaggaaaaagtaagaaggagatgatgatattgttaatttgaaagtgagaggaaaatgacaagaaagagggagctagaaagtgacggtttttgtttaattatttaatgaatcaattattcaatataatataatgatggaaagtggaaggggcgagagagaaaaaaaaaagtatttttttttaagaaagagggaataaaacaaaagagggttagcttagtatggctgtttggtgtttagtgggtacccttgctttcatacgaagtgagaaactaggctagttagtcccattggttttttttttttttttgtggctgaagaaggtgaaaggggggcaagtttcactcttcaagggttttgaagggtgtcaacttgcgttttgagactctgaggttgttgaggttgaggttcaagctgcattttttttgaagggtggggatgggctctagttgtggttgtggtgtgactcttgttcttgttttctgcttatggggcgtgttgatctccctctcttctgctgctaggctcagtgctgcaaggcagaagcttgaggttgctaagcatttgaatcgcttgaacaagcctcctgttaagaccattcaggtctctctctctctctcgttctttctctctctttacttttaactttatgtttgtatgtgtgttttggggtgttcttcatccacccctattttggtgtttcttcttgttttaatctgtttggcacccaatgaaatggcctagttttgtgaagaaaaaagaaagattactttttttttgttttgcccttgtttgctggatgggagatgctactgaaatggttatgtacctttcaaacattttcacttaaaataatccatcttgcaagctgctgctaccgattttttttttttttttaagtattaggtgatttcttttcttctctgtgttttataaaatgtagatcttttatgtggatgtgctgatttctcaagccaactaaaatttccctttaattttttttcctcctacttacacccctataaaaaaaatatatagcccatttgatgggaactattgattgaattttgaagcagtaactagaaatactgtaagaaagaagtaggcaatgatttgcctttttttgtttatttgttttccctttctaatcagctactgggttttgagtaatagaaagatattggtttcaattttggtacatagtatttcaaatgttgacaatattataatgtgattttgtcaatgttgcagagtccagatggggatacaatagactgtgtgcctgtttcgaagcagccagcatttgaccatcctttcctcaaagatcacaagattcaggtccattttcctcactcaagatctattttttctgttctttgtttttcttcatttttatgtaattttttactaacaccatgctttgatttaatagacaaggcctagtttccaccctgaagggctttttgaagagaacaagttatctgaaaagcctaaagcaaaaacacatacccccatcactcagctgtggcatgcgaatggtagatgtcctgaggacacaatacccgtcaggagaaccaaggaagaggatgttctgagagcaagttcagtcaaaaggtatggtaggaagaagcacagagcaatccctaagcctaggtcagctgagcctgatctaattaaccaaagtggtcatcaggtaagaactgttttgagtgccttgtatttttattaggttttcttgtttcctcttttaagtaccttggtctaatctcctgatggtgtttttgtggggggttgtaaatcatcagcatgcaatagcgtatgttgaaggggacaagtattatggagcaaaagccactataaatgtgtgggaacccaagattctgcagcctaatgagttcagcttgtctcagctttggatattaggaggctcatttggtcaagatcttaacagcattgaagctggctggcaggtactaagaaataagaatcactattcatttataccaagtgtgcaatctaagtacatgcccttgactctgaattataactgtaaattgtaatgactgttgtgcatgataacaggttagtccagatttatatggtgataacaatacgcggctattcacctactggacggtaaactgtgatgttatttttttatgcatggctttgattttttattttaatgtttgtgttactccaatttattattatttttttttttttttatcaaactcacttgctgcattttgcagagtgatgcatatcaagctactggctgctacaatcttctttgctccggatttattcaagttaacagtgaaatagcaatgggtgcaaccatttccccagtttctgcataccgaaactcccagttcgatatcagtatacttatctggaaggtaaaatcccaggaatttcctggtttttaatctgcaaatggaaaccacccgttaagcatcttggggtctcatctcattaatcttccaactaggtgtttggcatgtggaccatggtaatgtcccccctagtgtttggattcttggacacctctatcatctttcaagcatttgtatgaaacatgacatgtggagatccaagcctatgtttgctaattcatagctaatatgggaatcttgagtttttaccgtgttcacttattaactggccagtaaaagcctttttttttcacctagtatcaatagcattcttcgtggtagtggcaccctagttagaatcatctttatagcacagatccctggtatctcctcccagtttcttttgatcaggatatggaccccaattttaattgatgatggggacactgttaacaattcagccatcaggaactttgaaaagtcatgaattgcttatactcatttctataaatgcacagaacacatgttgtattttcaaccttcataccctttttaatttacacacaatgctcttttctgttggtgagctaaacaatatacttttaagtcattaactttgttactggtactaattagttatcttttttctatttttcctccttgtaggatcctaaagagggacactggtggatgcaatttgggaatgaccatgtattgggatattggccttctttcctgttctcatatttggctgacagtgcttccatgatcgagtggggaggtgaagttgtaaattctgagcctgatggtcagcacacatcaactcaaatgggaagtggtcatttccctgaagagggttttggcaaagcaagctacttcaagaacattcaagtggttgatagctccaataatctcaaggctcccaaaggcattggcaccttcactgagcaatcaaactgttatgatgtccaaacaggcagtaatggggattggggccattacttttactatggaggccctggtaaaaatcctaattgtcaatgagtaatgatgagaggaaagttaaaaaaaaaaaaaattgcaacctctcttcttgtatcattgaatgctagtgttaaagcccttccttctcttccatcttgtatacccttttttctgtagtggaaagttttgactttttttcttctaatattgaaagattctccatgtaagctagtggagaagtgtggccaagtttctcaaaagcctaaagaaacaggcctgccttttataacatctttgtattttatttgtttgtccactcctcctccctctataagagtgtttgtcaatggcaatggagctggtcttttgtgattaccaaaactagaacttattacttactctcaaaatgagtcactaatgttgttccattaattttaactgattattatatggtacctatggttatggctatggccatgctttgaatgaaaaatgagtcaaataaaaaagtgaaaagtactgtgagaccagtgaaagaaaaaatgaaattgtattattattaaactttggacttaaagatgcttgaaaagggttgcatgtgagtggctgacagtactatttgttttgcatttcaacttttttcgtgaaaagtgggcccacttcttccaccctacattttcaatcgctttctccattctgcaaatccatcgttgtattaccattaaagcttgtgaacaagcggtgctaaaagtcgtaggtccagctcctttatatggatttagttttcttgctcgataacaaaaattatatattattaattaagagtcactaatattatcgtcttaaactaaaagtagaaattttaaactctgaaggattggtttagcagtaaacttgatactaggcaagttatgcaatggattatgtggagacactttttaaagcttttagttatgtaagttagttggtgttaaattgatactaggtgggtgttaaattgggtattcctgcctcctattttttttttttttgnnnnnnnnnnnnnnnnnnnnnnnnnnnnnnnnnnnnnnnnnnnnnnnnnnnnnnnnnnnnnnnnnnnnnnnnnnnnnnnnnnnnnnnnnnnnnnnnnnnnnnnnnnnnnnnnnnnnnnnnnnnnnnnnnnnnnnnnnnnnnnnnnnnnnnnnnnnnnnnnnnnnnnnnnnnnnnnnnnnnnnnnnnnnnnnnnnnnnnnnnnnnnnnnnnnnnnnnnnnnnnnnnnnnnnnnnnnnnnnnnnnnnnnnnnnnnnnnnnnnnnnnnnnnnnnnnnnnnnnnnnnnnnnnnnnnnnnnnnnnnnnnnnnnnnnnnnnnnnnnnnnnnnnnnnnnnnnnnnnnnnnnnnnnnnnnnnnnnnnnnnnnnnnnnnnnnnnnnnnnnnnnnnnnnnnnnnnnnnnnnnnnnnnnnnnnnnnnnnnnnnnnnnnnnnnnnnnnnnnnnnnnnnnnnnnnnnnnnnnnnnnnnnnnnnnnnnnnnnnnnnnnnnnnnnnnnnnnnnnnnnnnnnnnnnnnnnnnnnnnnnnnnnnnnnnnnnnnnnnnnnnnnnnnnnnnnnnnnnnnnnnnnnnnnnnnnnnnnnnnttcttcaattcgttccttaactttcaaaagttcttaaatggtttgtaacttatttaatcaaacactctttagtcgttctattccttacttctcattttttattttcaaacacgattttgaatcctttattaattgattcaaaacgtggaatttgtcccattagattcatctacacaaaaactatacaaattaactaatgtttaaaaaaagaatcataaacataatgaaaatcatatgacaagtgagtcttgtgaacaataaaaaaagaatatgatattagattttttttgtttgatactcatgaaactaacttttcatgcaatctttaccttgtttatgtcccttttggtcggcacatgaattgattctcataattttcatgttaataaatctaatgagacaaactttatgtcttgaatcaatcaaaaaaagattcaaaattgtatccaaaaattgaaaatggtaaattcttaaaaatactaacatgtcattaattaaataagtaaggtgacaatttttaaaaaatttaaaagtttggaaactaatttagcaaaataaataaattaagggagcatttttatattttatcctcaagtatattaaacaaaaggttctcagtgactcattggatttccaggtgagttagctctcttttgaagataaattctaccaatataaattaagctgacaaaataagatactaactggtccactcaagtaagtttgcattaggagcaaattggaccaatctatctcagactcttacatagacttaatacattagttctcttccatcttgcgggccaaatgaactagtatgcgggcttaatcttttaaaaaaattacaatctcaaaataaatatttttttctctttaaaaaattaattacactcaattatatatatatatatatattttaaaattctcaataaatctttaataaattcccaattattaaagttttaacacaaccaattaaattttcaacataaatacaaagaaattttgaattgagtttttaggattaattaggtttaaatcgaacttggtggttgcaagttttcagtccaactcgcggatcttatggtctaaattcttaaagttcgtgaatgatgaaggacggatccaaaattctgcataaccattaattttttaaaagaaatggtccatgactcatgcataccctgagctccacaaaccgattcatagactttaacctgtttacggtttacccatccgcaatggtaacatgcaagctgtagggcgattggcagtaatgagcatggctccgacccatatcattcctggcatatatgcttccctaatctacagaaacacgttgattggacaatgttctgatttctgaccaaagctagtccccaaatctgcacgagacaatgagtaaggttacgacttaatctactactcttcaaataataattgatgtaccatatcaagaatgtacccacactactagtattaatttgtgaggtattgtatgacttctttgtaaatattcaataaatttgattgtgaaatttattttactccagcactgttttataagaatccaaaagaattgtcttaactatttgatcgagcgttgcattgagtcaattacatttaattatgagtcaatccttgcaacatgcaaaattttgatcttgactttttcacttttttcgtttgtcattttttaatccgtatacatcaaagacatctactagtgattagttaatcaactgagatactccccagaataaaattagctactttatctctttaaatcttgtacacttttgaggatttgttgcttatttgatatgttttatagagatttgtttaatagtttaacactttgaattagaacatattatacaaattatattaacttttatatatatatatatatatatatatattataacatgttatttccgtacccatgtaaccagagcagagcctagcctggcagtgacagtggcaggtttacatgtcggtgatggcaagcacaaaactcattgcaaacccagtgatttgtcagcggctgaatttggtgtatggtttaggcattgtttagtgttattggttaatattctgcacaaattttggaaaggggcactgcaatattttctcaatgtgtcaaacaaatgcaatgaaattgaatatttgaatacgatcagcatcaacattaaaaaaacgtaggatatataattcaaaaacgaaattgccttccagttctgtttctttttttttttttgtctgttacatatgtgtgcacacacatgtattggagtgccattaaaacgtatatagatccatagagtatatacaatcttctatcatttttcatacttttgatgaatagtatggttctgagatggaacgtatgtttggaacgtgagaaagagagtggaaagaaaaaaaattgaaatgaaagaaaaaataattaaatttttatttctataaatcaactttctttttctttttactttttcttaatttaaaaaaaaatatattattattcatgttttttctctatttttttttcttcttatcaaacatatcaatagattttcctaatatttctaataattaaatttaacagattttgagcgggagtgaaaggttcatgaatggacaaaaagctaacaataatgaactttaaaattgtgactacaaggattaggggtgttcacgggcatgagtcaccgtgaatctgaactaatctcaatcgattcgaacagtttgagtttgatcatttatgtatttaagtcaaaatcaaatcgagccgattaaaatcattcatgtacgagttggatcatgaatttagatttatagatacgtgaacccgtaataaaaatataaattttattatataatattaaaatttaaaactaaaattattttgacaataaaaaaaaacgtggtaatgtaaatgtctaggtcgaatgaagggctacctcataatcatgtcatctcatttttattgtgaaggtgtggtactataaatgtcacatgtttaggttttttttcttttgcgcttatgtattctatctcgtctcatctccttctctacggttctgcaccagctccttctctattctctctcgtctcatctcatcagattgatcaaacattaggttttattctgcgctttctttttcttttctatagttgtttaacttctcgtgattttttctggtttgtattcattgagattttgatggaaacagggatgagaagaaaataaataactttcattattgaatgttgactcaaatttttggttatagcaaaatttatcacaagaaattaatttgtaagaaatagttgtgattcatactattataataaattttgttaaaaatcttttgttttaatttatattataagtctattttagaacattatgttgatggtattaaatgaatcatttttactattttcatacatttgataatattgtgttaattgtattggatatttgaaaaatcatgatataaaataataatttaaagggggaaaatttaaatagataacccgttgacccgaaccgttcatgaatgaatttgattaggtttaaaaaaaaatctaacaaatcaaatttaattgaattaagtcttaaatttaatcaaaactaatccaaactaatccacgaacaccccgattaatgtgtagcactagtctttgtaacgagggaatattctagccgaacacgagaaattgagatgatgtttacgtaaagattttaatattcaactcagtgcatgcattacaggatacaagatataaaagttagacaacacctccattcctatggaatctatttatattatttctccttcgcctattgtggcatttcctcatcaataatggtgtgacacactaagcaaatagtacaaaattgatatattaattggatttggatcatgattaaattatttacattatattgtaattcgtccatgatccaaaaggttcttaatgaggtgcatgggaggtttgattatcaatcctagtttattgggtcaactaaaaaaaaaacaattatcatttgtcaataattaaaacaatcctaaatttattggatcaactcattggctcattttttgtgtgtgatgtgtccacctcttcaaatagggatcaagaacaattatccccaaatcaatgggcttggttataatcgttcttctaataagtttaaggttttttcttagatttcatcttattttagataagatagactcttttgttttttcgactctagacttctaaaagttttttcttttgtttgttttaggatttgacagtgtgaatgtgcatttgttttgatggttgctttctcttaacgtttttggtttttgtccaggtttcttctttttatattgcctatctttctttctatcattcttgttttcaaattttttttagttgagctgggttttgttcatccttttcattttgctagccttttactctgcttctatgtttggttaataaaagaaagtgaaaggaaataaaatgagaagagaagagagtgaaaaaaaaaaaagacatttacccatacaacatctttagttataacttaaatttagattttttttttcaaatcaaactatcattaattaaaaataacaatctattaaaacataaattattcataataaatctagaatataatttatgtgttaaaatatctatttactataaaatctaactataatgtaatttatatatttagaaatatttatttattataaattaaaaaatcaatttcataaataaaatatttattatgttattctgtgctcgggttgcttataaacaacatgtggtgagacccacgacacaacctagctatagctcatatcattgttcaaagttcatttctactcgcatattttggatcaaaagtactacaaccatatttcactaacttagtctcaacttcaaggctacctccttgtggtttaaagtttccttgaactcacgtttcttatttacaatacgacatcattgtattgactaggacttttccatgtcctttttttgtaaatttaatgattttaaactttttttgtatttaattgtgtatatgattaaaattaaaactattttgaataacttctcatcaaatcattaattttattttaaatgtgttttttttctgattgatggtaaacaaacaaaagtaaatcagtaagtaagaacacaaaatgactcgagaaaaaaaaatatatcaacaaaaagtataaaaaaaaagtcataaaaaatgtaaaaacaaaatgatcataataaaataaaacttattttcgacagcaatgtaaagcagcatagtactccattattagaaccttgtannnnnnnnnnnnnnnnnnnnnnnnnnnnnnnnnnnnnnnnnnnnnnnnnnnnnnnnnnnnnnnnnnnnnnnnnnnnnnnnnnnnnnnnnnnnnnnnnnnnnnnnnnnnnnnnnnnnnnnnnnnnnnnnnnnnnnnnnnnnnnnnnnnnnnnnnnnnnnnnnnnnnnnnnnnnnnnnnnnnnnnnnnnnnnnnnnnnnnnnnnnnnnnnnnnnnnnnnnnnnnnnnnnnnnnnnnnnnnnnnnnnnnnnnnnnnnnnnnnnnnnnnnnnnnnnnnnnnnnnnnnnnnnnnnnnnnnnnnnnnnnnnnnnnnnnnnnnnnnnnnnnnnnnnnnnnnnnnnnnnnnnnnnnnnnnnnnnnnnnnnnnnnnnnnnnnnnnnnnnnnnnnnnnnnnnnnnnnnnnnnnnnnnnnnnnnnnnnnnnnnnnnnnnnnnnnnnnnnnnnnnnnnnnnnnnnnnnnnnnnnnnnnnnnnnnnnnnnnnnnnnnnnnnnnnnnnnnnnnnnnnnnnnnnnnnnnnnnnnnnnnnnnnnnnnnnnnnnnnnnnnnnnnnnnnnnnnnnnnnnnnnnnnnnnnnnnnnnnnnnnnnnnnnnnnnnnnnnnnnnnnnnnnnnnnnnnnnnnnnnnnnnnnnnnnnnnnnnnnnnnnnnnnnnnnnnnnnnnnnnnnnnnnnnnnnnnnnnnnnnnnnnnnnnnnnnnnnnnnnnnnnnnnnnnnnnnnnnnnnnnnnnnnnnnnnnnnnnnnnnnnnnnnnnnnnnnnnnnnnnnnnnnnnnnnnnnnnnnnnnnnnnnnnnnnnnnnnnnnntatagcatccttaaaaataaaactcaggacaggagcatctttaaataaacaaaaaaaaaaatcttaatatctataataatagaatgataaagaaatggaatgtgggagttccaatgattaagaagagttgggatttaaaaaatcaatgagttagaagaaaagagcatatgaattaagaattactgttgacggctactctcttgatttcgtgggcaaacatttatttttgaggaaattacatctgcagttcgtttgttttacttaaatttcatttcatattcatttctttttctattttataaaaagttttttaattatttaatttatattacactcagattctttctatcttacttataatttaatcatttaataaaaaagagacacatgttggtcatatgatttttaatcaaattttatatttaaaatattatcatctccttctttcaactttagaatattttaagactttattttttttattattctataattggacatgaatccatctttttgttagacgtgaatccacgttcttggtacacgttattaatattctttcttcttctatattttagttcaatatggtcctttgcttcaaatttagtgttttactcctgcatttgtatttttattatcctaaacatcaacactattttaatcaataataataaacaaatgattttcaatttattcattatgtttcatgtggtcccaaatatcaatactatttaatcaacaataataaacaaattattttaaatatcataagtggtctcaaactaatcccccttaaaatttcatttagaaatagacaacaatagataatcaaaattagataaatattaagtaatctatatataaggtccaatggtcacttacaaacataaccctaatatgaacataaatcgtgaatcaaaaaaagaaataaggaaacaatggaaaactcacgagcaggaagagactaagacacaatcacgggaagtaaatgatacatagccaccaagaatgtaaagaatttcatttaaaatgtcaaaatccaaacttttaatgaagtcactattatattattgactttctcagccaatatcttagcttcttttttaaggaagcaacaatgtttaaaaaaatattaaaacttttattataatgataacacaagaattatttagcaaggagtacctttttttatgttaatgatattcaatattttaatcaatatttttagaagaattaactaaaatacattaaaagcataaaaagaaagtaccattatagtaaatttgttattctataataataaatatcttaaatattatacttaggatgatttttgataagatataatgcaattttttatattaacattatatgaagattaacattttccttaaatatgcgctaaaaattcttattttattgtaatataagttgacaatatattttttaatccactatttctaacataatttttattataaatgaataaaatttaagtacattatttaaatgtcatgactcttattttccatataatgaattttatctatttaaaaaaaaatataaatgccgaaagagagttgaaaagggagtcgctgctggtccagaaaaaactgttaaaataaataaaaagtcttaaaccggtaatataaaaacgttaaagcaattctttctgcacattatttgtctttactttctctctcatacgtagaggagagagaaaaagagagaatttaattttatgtttactttgatatagttgacagaggctgagccaagagaagaagaagggtgggtgtagtagggttttaatcttcattcttcactaatccttttatccactccgagtgtgtgtaagaaagagagacccgaacaaattcacaaacccttcttctctctttttttcttctttcaatttcaaattttcttgttactattactaaccctagcttccttgaacactcactttgaaaccctagctccttcagccatggctcatttcagctgaattcgccactatgttgctgccatttcaattcacaacagcgaggtaagttcaaaacccgttcgttccgtttcggcattctcaatcaccgtcgcaattaacgctgttttgtttttctttggcggtaatcaggtgcatgcgcgttgtttgagtggaggagggacaggcatggaccgtgcgcttctcctcgcgtgcgtgatttgcgggatcctcttctcggtgttaggcttggcgtcgttcttcatcctttgggctgtgaattggaggccctggcgaatttataggtatctcgtcaagattctgtgtttccgtttacctgtttttcacttggtgctttgggtttgtttgtagttttaagattaaattgccatgctgcaatgttaatgctgttgattttttgtggcgcatgtggtttctgttgctaaaaattagtagttgttttaaagtattttataatttgatatttactggcattggctgctgtgtactgtcgctgaattgcataactgattagctacatttgtttaacaacttgggaattaagtgtgaatcattggggtgctttttctgtttttatgatggtctgctaagtatggtggttttgtgccgtttttgaaccttgtgagccggtaacttgagaattctgtacacgaggttgatgcttcctattcctaagtgctttgctttcttttactttgcactccttttttaagtaaattggtcggaattcacgtgaagatgcatttcagtaacgccttaacggctagtgtttttagtgaacgtatcacacataggatggtgccaaatgtaagatgagaagtctaacatttaaacattcaatgtgatgtacttatggacatcgtaggaaataacctttttttttttatctattaatcaatgtgtttgttttaaacttaaaaaaagaaactttataataagtgcttttttaagaagaagataggatttgcctcttaaaaaaagcagaaaactgcttattttaagtacaagcagtttatacaattacatcagaaaaacagaaatctacttattttattaagaaaaatgctttttttttaaattaagcttaaacatactggcccaatgttttgggataaaatggatgtttaattgaatttccctttgtttccttgtagaaaaaaggatgatttggatagagttgtggaaattctcatgaaacttgttgtcatatatattaggtttacaatttagtatatctgttggaatcttaattaacagttgtctgaatttgaagaaatgattgcctggtttaacgaatataaatataaaaaaattgagattacacatctgtatggttcatatatgtgatttgtattaattgagttgctaatcaaggaaataatagattcataatcttcagtaggcctttgattatttcattgagttgctcttatgataaaactgtatcaccaattgcatttagatcgtcaattagggattggattcaaaggtgatactaaaaaatagttcaatcttaaagcattgtgctttgaagttccgtgtgaagttttctgacctccgcattcttgtgaaattgaaaggagtgaattttatcccataattgcccagagctttttcatctgattattcaagcaagcgtattgtcagaaatagacgattgtaaccaagagagaagcaactggtcttcttactctgatgtgatatagatttcagaaatgtgatttgccccacattcttcatgtgtgcgaaattatgatggaattactgtattggcgagaaagtggtgaagacaacagccttggattattggttcaacttgctggcactgaagtagataatttttcaaatcattttctaggaaacagagtgacaaaatataactgcggatgatgccagagaagatcccatggaggagagaggtgttgacggaggatgcaatctcagtggcaagcatgaattggttgttcagaggccatcttgggttcgagcaaagctctcgaagtcatgataaagttgtgaggaagagaaaatgaacactgaaccataaatttataattctgtaaaatgaaaggctatacatagcaccctgggctggcttcagctcatcaagatatcctataggaatgggtacaagcatattacagagagtgagagagttacattactctaatatagatacacctttaaagaagaaacctttgaagctaataagaaaaggatgtctcgtaaaagttgagttggaattatgttctagcagatagcaccagatttcttttgtgtgtatattatttgttctattattaaaaagaaatctcttagctctttagtgttattatactattattattggatagaaagaaagaaatatgaatttattattgtcttgcaggacaaggctagaataggtaaacagagcaaaaataaaagtaaaaattgacatctaggatttttcctactttgtttcacatgagtctctaatctctatatacatgttcagaaacttgggtaatttcacttcttgtgttgatgtggtctgttgtgattaattttaaaatatttgatgaatccacagcgatagaaactgcattcttgaacataacacataatgttgctctgggcctcttgactgtatttcaggaacaaataagttaaagttttgctacataactttctacgttatcttatatgttttgagaagaaatacaagttgtttttatgctgctttgtcatgctgataaaaaaaaatgctgctttgtcatgcatttaaagtactctgaattttggaacattgttttgggcttctttgcatctatttttatttatttgtttctatttcagttggatctttgctcggaaatggccaaatatcttgcaaggtcctcaactccatttgctctgtggtttcctgaatctttctgcatggatagttgttatttctccaattctggtgcttttcatttggggctcttggttgattgtaatattgggtcgagacctgattggtttggctgtaataatggctggcactgctcttctattggcattttattcaattatgctgtggtggagaactcagtggcaaagctcaagtatgtattttccggcctattttttatttaacaaaacatattttgtgtcgtgttcacagttattaagcttatatgttctattcaacatgaaacccaaatttctaaatgctgtatcttaggtagagactgtttctggtattattaatgttgtggattgttttctgtcgatgatcttccatcatttgagcaattgacagcctttggatgtgatgattatgtcttctgtttcatgaaaaagtgaacagaagagggaagaactgtaactgctgtcatgtatgactctcttccattgttaaaattatgatattctcattataaaaatggaacaaattgcacaggctttaccggattcagtgcaaacctggttcccaaaaaaaatggtcaaaaaggttgctggacatgttgattagtggtcataaagttgccaaaaaaattgagaacaactgggaactacagcagggtgaaagtattggatgccaaacaaagaagttcctcagttgagaaattgactaaaaataataacttgatcatgtttataggagatggtattgccttggttagtgaaaagaagtaaaatagaacaagattgattgaataatataagattagattgatatggcgtgttttacttctaacacaaaaatggccctaatgttgtaaaacttactaacaacactcatagcaaatcagaaggtaaacagttggattatcaataggtctaggtctagcattcaacatgcatgtttcctttatatgtctaaggcgtactggttgatgaatagtaatgttgaccttagattgagcaacatcaattctttagaagtaccagagttttccctaattttggtccaaaattgataaattataattatattttctaataaaatgaatgccatggtgatcatcatctgtaataacaatttcattagcatatacaaccaaaatattgtaactgagaagtacaacgacttcaacataaagacctgcttctttataaggcagaacagcctgttgcataacaacgctatcaagcttaaggaggctgtttgaggccataaaggcatctttgtaatcaacacactggttgtaaagattccccctctgcaacaaagcccggcagttgctctgtatgttgttccttcaattgtccttgttgaaaggctctgtatgtgtgtacaaattgttgacggttgtgtgcacatattggatccaaattttgctatgttgttaaaagagaaaaatttaaaattagatctaaatgtcctggcatttttgcttcttagtacaaacagaaataccgaattgactttgaagcagagctaaattttttaaaaatggaatttttgttccttttttggtaagaattacttggttcaatgagaatatcattgataaaattgtaacaaaatattgaaatctctaggttggaacaatatgatatagaccccatatgtagtatgctctagatatgactttgaaattactattgtgtcccaatcatttgtgaatgagattgggagaaaacaagcatcaggtgaggttaaaagttgataggagccatgtgaatcatgctttctgctgattatccttttcttactgtggttttgcggaagaaatgctcttttgtttatgctcctgctttggagaatcatctggaactagcaatttaataaaatcaaatagtgaaggccgtacagctgaaagctcaaataatttgacatatgttcctcaactgtgagctagtctcattggattgtgcttgagagttcttactctgtccagaatgcctagggcatttagagtttttgccgtctaagctgatatcgtattacatttcttcttgtccaacctatgtaaggcgtttgttcctatttctatgttttccaacagcagtgaaataagttgcttgtaaataggtattttgttatgagtacaacaaacaataggaaatgttctttgattaggtcttcagtcaaagctattgacagaaaattttgtccttgtcagctgcacatctttttttctgtttgttctctatgctgcttttcttccaatgcctaagtttagtatgaataggtgaatgatatggccaagaagcagtgttgtacaaatattagacatgaaaagtatatttacctggttttataaagatatagtatgtttgggcatcttatatgattgatttagtttcgttttcatgttggtcgatgttatagttgtaatacccaatatcttcatttttcttttgacaggggctgttgcaatcctgcttcttttggctgttgctcttctttgtgcatatgaactttgtgccgtatatgttacaactgggtcacgagcatctgaccgctattgtccttctggtttcttttttggagtctctgcaattgctttagcaatcaacatgctatttatttgcagaatggtgtttaatggtatgcttttgaatcacttagttcatttacaaattgctattcctgattattattaaaaggttaagatatttttttggttgttgtacaagataatcattttcaacgtagtccttttgtgaagaaacttttcaattagctcctaatccttttcaatgttgtctgtactgttttttttttttttttncttagttcatttacaaattgctattcctgattattattaaaaggttaagatatttttttggttgttgtacaagataatcattttcaacgtagtccttatgtgacgaaacttttcaattagctcctaatccttttcaatgttgtctgtactgtttattgtcataatattgtgatattgaagttgagttaccctaaaatatatggatcaaatttaataatgactgtgatgtagtgacaaaaatatagtattttagtccctaatacactgcactcatctttagtttggtacacttcattgtgttataactccagtagatagtagtattataatagtagtagatgatattcctttttgatgtacatggtgtcccttcgtacggatactgcttttggcttgattctatttgtttttttgtttttcgttatttgcattatcttattaccattattcattgtagggaatggcttggatgtggatgaatacgtgcgaagggcatacaaatttgcttattctgattgtattgaagtaggtccagtggcatgtttacctgaacctccagaccctaatgagttgtatcctcggcaatctagaaggtatgttctaattcttgttctcattgttgactatcctattggagacaaataattttaaggtatttttatagcattcattactagcttagacagacatttattttgctattgcttctcaaatatttatttggattagacatatagtactatttcattaagctttcttcctccaagttcttattgtttttgtttgtctttgtagggcttcccatcttgtactgctctatcttggctcactatgtgttctgttagtatactccatcttgtatggtctaacagcaaaggaggagaattggcttggagcaattacatcagttgctgttattattcttggtactttaattagctcttggtatttattatattatttttttaatgttaacagaaaattcttgtgcacttttcatctctggttatttgatttgctctttttctgtgcacttcttgttttgtagactggaatttgggcgcttgcctgtatggttttcaacttcttgatagtcgtgttgcagcactgtttattgctggaacatctcgtgtgtttcttatctgttttggagtgcaatactggttagtttcttaaatgaaaaaagacctttttctcagcgccactgcatgtattattggtttgttctttgttgacttttctctactttcaccactcaggtatttaggccactgtatcagctatgctgttatggcatctgtactgctaggagcggctgtttctcgccatttatcagccacaaacccattggctgctaggagggatgccttacaaagcactgtagttcgtctgagagaaggattccgtagaaaggagcacaacagttcatctagcttttctgaaggctgtggctcaagtatgaaacgaagtagtagtgttgaagccggtaatcttggtaatgtcattgaagctggcagggctatgactgcaggtgatgggagcaattggaataatgtcctgtctcaaactactagtttgccagacggaatcattagcgataaaagcatagatagtggaaggtcaagtttagcattacatagcagctcctgtcggtcagctgttcatgagccagaagttggaacatcatctgatgatagaaatttggatcacaataattctttggtggtttgttctagtagtggtcttgatagtcaagggaatgagtctagtgcatcaaactctgcaaatcaacaaacactggatttgaatttggctcttgcattccaggaaaggttgaatgaccctaggattgcaactattctgaaaagaaggacaagacaaggtgatcgagaattgagtagtttattacaggataaaggattggatccaaattttgcaatgatgttaaaagacaaaagtttagaattagatccaactatactggcattgttgcaaaggagtagcatggatgcagatagagatcataatgaaaatactgataacaccagtgttgacaatgccatgcctaatcaaatttcattatctgaagaattgaggctacaggggcttgaaaagtggcttcagttgtgcagacttgtattgcatcacattacgggtactccagaacgagcatgggttctgtttagttttattttcatacttgaaaccatcattgttgccatatttcgtccaaaaacgatcaaaattattaatgcaacacaccagcaggtgagtgctgagtccctccctagtatatttcttgtttgttttgggggactgaaagatacacacacacacctatctctagaagcttgttatccgtatttcatttgtttgatcttggggttgtaactgtttaaaccttacaatgctcattttgatattttctgaacctttattgcttgtagtttgagtttggtttggcagtgctcctgttatctcctgtgatatgttcaattatggctttccttcgatcacttacgacagaagaaatgtccatgacatcaaaaccaaggaaggtactagattggctgttttttgaattaagaatgcaaagttcatctactgaaatggatgaatttaatttttaactgtttatcttgttgagctgactaatgtttggctacttgactacttgttgtaaatttgtaatataggaagtgcttctgttgccgtataatgtttttggttttgatgcggcagttttagtcttttaaggtttatacattcttatagtgcacatgtattagttttagatgagagggctaactttactggtgttatcatgataccattctcttgcccatataagctccttggggtgggattattgggaaactctttggaaaagtgggattgtcctagtttgttgaactggggctgcctgtctgtgatggcctgagctgggcagcctgtgatccaaacatgcaatttgaaaacctgaaatccctaaatccccattgtctcagcctctttgaatcacttgacctccctcttctctcagaattaaccccctctctctcggatgtggccccgaaccactataactctactctcaaatcactttggtgtggcgagtgttgaagctttatttatttgtttgtttgtttgtttttgtttcttaaacccataatttgagcttatgctgggtctataaaaggtctcatgattctttgacttctaattacttttctgtgttcattctttcctttccataattgctgtaaaatatcaaatagacattgaattattaaataatataactgtcaaaaaatatataaattcttcctgaaatttgctggtgggatcgtacatcttatgttagacaatttatgagcattccaatttaatttagctaataattttttttttttatcagcaaaaataggatatatatatatatatatatatatatatatatatatatatatatatatatatatatatagaaacagtacaaggagtactggtgaggatacaaaatagctgaatcaacacagaactttgatggttttctagcaaagccatcgaagttctgacagattcgctcaaccaaaaaatacaaaatagctacaacaagtgaattaacccctccccaaagtacaaaaaactgcgatagattacaagaccattggtggaaagagatatcgaatccatcctctaagttcctcaaccaagaccagcaaaagaaaatagcatcttccatcaatttgtgaccattaaaggatgcattgtggaagagaatctggtttctatgggtccaggtacaccatgttagtgctgcccaccaggtgagccacctagataaagctttccctctaaggtgacaaaacgatgattgtgtaaagttctcctttggattacatgaaaacaccccaatgatgccaacccaggcccatgactcccaccatagaggtaagacacaggggcatgaaaaaaacaagtgtgaagcatcttcgtcaaatttgttgcagaaaggacagtgagtgtcgggtgtgactatgttccttctcctaaggttgagtcttgtaggtaatctgtccttcaaaaatcgccatacaaagcatgctactttcaatgggattttcaacttccaaagagtcttaaacacttcctcttgaggggatctattgccctccccagaaagcatgctataagcacttttcaccgaatatgtaccactgggatcatgtacccaactccatgaatctgtttgctgctggtggggtgacagtccctgaatatcatccagaaattttattgccacctgaatctcagtgtccctaaagggtctcctccattgtagttgccattcccatcgatcttgatgttgattacccatttgctggatatattttgtttgttgtttagatagctggtaaagtctaggatatgtatctttcaacgaaatcctgtcttccttccacgaatcctcccaaaatagaatgttactaccacacccaatattccatttgagaccaccaaaaaaccatccatcgatgtgattggatccataaaccacagctagatctctccaccaaattgacgctgatggtaacctggatgaggtctgaatattcctccaacccccgtatttggattcaaggatttgggcccataaggcttccggatgatgaaataagttccagccccatttccccaacaaggcctgattgaatgttcttaaatttttgatgcccagtcctcctttctccttaggtagacagattgattcccatttagctaataatagaagatatgtattaatataacatgatataattaacagatgattatgtttttaaaacatgtgattagatatccaatcttatacaacacatttattaagagatatcagtttttaataaatttcaatacttaaaggaaataatatctattttcgcagtgaaagaccatgttttcccctcagtcctaagtaggatctcgattttgacaaccttgcatcttgatttccacttggacttaagttacaatgttgttttcttagcctgtcagaggtgtgcagtcgtgtagctcatgactgcacacctatttatccaacaacttgctatcgtctgttaaattgggattgtataccttcatggaaattgtagaatcgaacaatcctactagtaaaattgtgattttgaccggggcggagctagcatttttatgtaaggggggccaatataaaaaaaaatatgacttataaaagaatatttaaaatttttcatgcatgatatttatagaacttttaagatataactaaatgtattttaggagcaaaataaataaataaataattgtgttaagcatgagagagatagtaattaccaagtgcgatcaacatataagggccaaagaccagtatcaaaagaagaagaaattaaaaaaaatcaattaaattaagtgaaaataatttttcatagtcaaagcatattattcaaaaaaaaaaaattcaaaagtaaataattgtgtcacatgaaaaatacgtagaaaatacttggataaatgaatcacacttgataaatacttacataagttaactaagtataaatgtatcattaacaaaaatagaaactataaattagaaatgaagagaaatttgactttttaggtaaagtgttttaataaaagaaatattgaagagaacttagaaaagtaaaataattttatatatgatatgagagttttttttaacagcaaagaaagattatattatagctataattatattataaataaatggattggaatttgtcacaagatgtggtcaaatcaccaaccacagaaaattacaccaagaaattacacaaacacgactcataaatataacatagcagcactgagaatccaacaatacataaaacagtaaaacacccccaggcacattgaacccattacaaaacaaaaccgtaacatactaataccagctaaaccaaactaaaagaaattatgacaaattccctgtatattgtgtccaataagaaatagccgattaaactgctgctattaacctcccctataacgtgttacgacatcccctaatattttttccatatacaacatctcctaatattatgagagtttgaaaatcttgggtgggccatggcccctgtaggccctccgcctctgattttgtcatccttccttggaggggtagctacagcctatgggtactgattgccttgggagtttttttttaactcactgattgtaatgttaactagaattagggatttcatttagccatgagttttctttttaatttattcaatttattatgtttggcctggctatatatgtctgttgttgcttattcttttaagagactcttgttttagtgcatgcatacaataacatgaataactaataacatattctctctttctcgctctctaattcactgtcttcagtatggttttattgcttggctactcagcacttgtgttggattattgctctcctttttaaggtaagccctagtattcctgaaagttgttcatacttttaaattttgacctcatttcaattgaatgtgaatgccttttttgtatcagcataactgcctatgcctttgtttgcattttattaattattcatcatataatatatgcagcaaatcatctgttctcctcggtatatctttgactgtgccactaatggtggcatgcctttctgttgccattcccatatggatttgtaatggttaccgattttgggttccccgcatgaattgtactggaagtgctggaaatgatcgaattcctcggacaaaggaggttagttcttatgcctatcctacttactatcacggtgtctataatttgatgttttctgatgtctcttagctttatctcctgatatgtgatttctcgtagtcttagctttatctcccgatagatcactttgtttttcattctaggatatgacatatgtacacaattattttaattcatgaattcattgcatagggtgtgttatgcatttgttactttttgctctgtcaagttaaatttcttgtcaatgcataagcttgtcttgttcccttttacagggtattgttcttcttatcagtatgtcagtatttgttgggtctgtactggctttgggagcaatagtttctgcgaagcctttagacgatttaagatacaagggatggaatggtgatccaaaaatcttgggttccccttacacatcatctgtttttcttggctgggcaatggcatctgcaattggtttagttgttacgagcgtgcttccaataatttcatggtttgcaacatatcggttttccctttcctctgctatatttattggactttttgcaggtattttctcattttgtatttacaaatacctaccccccccccaaaaaaaaaaaatgtttttgttattgctgatatctaattatctatatttctgaaactattgctgcagttattcttgtggcattttgtggggtgtcttatttagaagttatcaaaaccagggatgaccaagttccaacaaatggtgatttcttagctgctttacttcctttagtctgcattccggcagtgctggggctttgctgtggattgctcaagtggtaggtgacgcttacttgtatttgtcgatttatctatggtaaattgacaaatgacagctattattttgctttttgatatatgtctgatcttttttaaaatgtctatttgcaggaaggatgatgattggaaactttctcgtggtgtatatatttttgttataattggtcttttgcttctgcttggtgctatttcagctttgatagttgttgtcaagccttggactgtaagtgtgttgaattcattgtctctttaactcccccttccccaaggtcaaaaactctttggctgaacctcttccttcatattactgcagataggagtagcatttcttttggttcttctccttatggtattagcaattggtgccattcaccactgggcatcaaacaatttttatttgagccggacacagatggtctttgtttgcttccttgcttttctgttggctttggcagcttttcttgttggatggtttgaaggttctagtcaattccattatattggcattgatatgcatatcttaagtagaaagtggctgatctgttaagtgctaacatgatcttttttgctcttttttctctccaggtaaaccatttgttggagcatcagttggttatttttcatttctttttcttcttgctggacgggcattgacagtgagttactcattctaattttcaatcttataatatcagcatgttatcgtatcccaaatgcttttatgcttcaatcagttcatctttgttttgctcagagattttattcctttgtgatttttttcttctattccataggttctgctttcaaatcccattgttgtatattctcctcgagttttgccagtgtatgtgtatgatgctcatgcagattgtggaaagaatgtcaggtttaccccacactctaaattttgtttttaaatacgttggttaattttttgtttgattttacttgttatctgatttattactttatgtatccactgcttgtatctgttatttacagtgtggcctttctcatgctatatgggattgccctggcaaccgaaggctggggggttgttgcaagtttaaagatttatccaccctttgctggtgcagctgtatcagcaattaccctagttgtttcatttgggtttgctgtatctcgtccttgcctaactcttaaggtctgtgaagtcattgtgatcaacactgacttttaagctacttcaaaatttaaatgattggatttattatatacactgaaatgcctgatgaaactggcttattataatgtgctaacttctttcttcagaaaataccttctaattgaagttctaacctttgtaaaattgtacagacgatggaagatgctgtgcatttcctcggtaaggaaactgttattcaagcaattgctagatcagcaacaaaggtaagtagatttgccaacgaggttgcaggaccctattgggccaatatctatattttattcttgtcgtcctagctttgtttggactctggagtagtaggtagtaggcattctagccttctctacaactgctatgaatgtctgtctatgttggcaaaatttttcttcctttacagaaacaaagttcttactaaaatttggtttactgctctgcagttaatacttttgcaaatgtagtgagaaattttccctctgattataaagtactctgtaaatgtggctgtatttattttaaagtactttattctcaatcatcctgagttttggaaatcttttatgcttttgaattaatttgtttttatcttttacattatcattgagctcagtaattcatgcttttccttttttaacagatagtccatgttttatcggaatctttgccaaagtattctagtttagttttgaaaagtgcttcatagtgaattgattctatttgaggaaattgatatgttattctcatacattgaccatgtttcaagcatgctgtttcctattaaattgttgctttttgaaataatttctcattggaatccaatctttattgtgaactattgcctgaatgccttagtgtcagagacaatgtgccaaacgtttgacaaaaagttacaacagattaacggctaatttcgtcacaccagacttgataacaagtagcaactctaggtttcgaatttcaactgtttctataaatatgagaagtctattcagagtttgtttagtgaattgaattacataatatacagaaaaactttccaagcttctcttttttgtgtcattttctaactcaaactgcatctctatctctgaaaatgtttacatttgaatcagaaaacttgttaatgaaataaaatttcatcagccaatcagtctatgtttgtgtttcttgtccatgcattgctttgaaaatagtttatgataatctctttcagtaccctgaattaatataactaaccttaaaccaatggaaatgtgttaattgcttgaataattctctttaatcttgatactcacataaatattttctaacgaatatgttctcctttatctgtttgttgattattgaatgttattgtcggaaaagaactcctgcatttgtcaatgcaattcaactgtaaatgatatttacttgcactgcagaccagaaatgcattatctggaacctattcagcaccacagaggtcggctagttctgctgcacttttgattggagaccctaccattatgcgtgatagggcaggaaattttgtgcttcccagagctgatgtgatgaaattgagagaccgcttgagaaatgaagaattagttgcaggttcattctttagtagattaagatatcataggacattccaccatgagccaaccagcgatgtagatcatagaagagtcatgtgtgctcatgctcgaattctggcactagaagaggccattgatactgagtgggtgtacatgtgggacaagtttggtggttatttgcttttgttgcttggtttgacatctaaggcagaacaagcacaggtaatggatatctagttttgcatatagtggatgatatctagtttttatttttattcttgtgacaatgataatccatttctctggtaggatgaggttcgtctgagactctttcttgatagcattggattttctgatttaagtgctaagaaaataaagaagtggatgccagaagatcgcaggcaatttgaaatcattcaggagaggtactatcctgagtatctgatattaatatgtatagtatctttaccatgttttttctatctaaatattttgttgtgaattttctagttacataagagaaaaggagatggaagaggaagtcttcatgcagaggcgtgaagaggagggcagagggaaagaaaggaggaaggccctacttgaaaaagaggaacggaaatggaaggagatagaagcttctctgctctcctccattcctaatgctagcagcagagaggctgctgccatggcagcggcagtacgtgcagttggaggcgattctgttctagatgattcctttgctcgagagagggtttcaagcattgcacgtaggattcgtgcttcacagttgtctcggcgtgcacttcaggttcattaactgtctttgatatttattctgaattctgatagcaattgataggatctttttcagttttttttttttaatagtctgtttaatttgttggacggatttcaatgggaatagaaaaataattggatggaatgatttgtggaaacaattggcaggatcttttttcagtttttctaacagtctgtttaatttattggagggatttcaatgggaatagaaaaataattggatggaatgatcatcctctttatgtataatctgtgatgtagttaatagtggaatggtttccgttcccattttggttttcaagaattagcaggattgtggaggaaacagtattacaaaagtaaatatttttatttttaattatgttgtttgccatattttttttgtgaaataatgtaaaaaaatagtgctctgtagccttaaaaagtagtaaaatattttttgacattttaatttatgatttttatttaaaaaattaaatgttaaatctgatgttattttatttaaaatatcttttaaacaaaacaaatccatctgataaatataaaagcttataaatatagctttttaagtcaaatatatattgtttgaagtgtgtataaaagaacaagattacaagagtcttaattttataatatattattcatttgttcttcagatctatgtttctcagtagattaattttgttaattaaaccaaatttatttgataggtaccagcaagcaagaaagactaaaaggaagaaattaagtatgaaaatatttgtattgcagtaactggtctgaatcgagggaattcagatcctggtgtattctgtattgtgtacaatggtacaaaaatgaaaagacacctagacagttctcaagagtgtctaatctctcccagcccaagcctacatctacacacctttccctggcttgtattctctctctctctctctctctctctctctctcccccccttacatgcacttccctcatgctctggtgccaggttggcagttagctctctcgcttcctcttccccctctcctataacaaatttgatacattgcaccttttgcctctcttttcatacaccttcagtgatcttgggcctcggcgctatattactattcctttccaaagtattcagtaaacttctgattcattgcatacttgttccattcctgccagctcatttccgctaactggattttctttatgataatcatctatttaaaatttctgcatgcgctcacctttatctttgactgatggattactcactgaaaaaaggatgatggaaaattatttttaagaatttaactagaataatgcattgagactatatgttttttactgtctgattgttgtcagatcataaattgtcgtgtgtagtaaatttgttgatttttttttaataattaccttaaaattcatatttaaggtaatttttaattgaatgacagtatacaaatatttacactggcatgaaaattatacccattttttttattggtatttatataacaatccaatacgaaagtctaattttgtttatctccacttgtggtatcttaatttaaataattaggatgactcttctggagattacttaatttacattgaaattttgatatctttgcagacaggagtggcaggtgccatatgtgttcttgatgatgagccaacagccagtggcagacattgtggtgcaattgattccagtctatgtcaaagtcaaaaagttagcttctccattgcattgatgattcaacctgaatctggtcctgtttgtcttttgggcactgagtttcagaagaagatttgctgggaaattcttgtggctggatctgaacaaggtattgaggctggacaagttgggcttagattgattactaaaggtgataggcaaacaacggttgcaaaggagtggagtattagtgcaacaagtattgcagatggaaggtttggtctttctctttattttatgtatcatatgtttgttttttaaagttcaggttcagttacccagttctcttgttatatatgtgttaccttttcgttgcaggttatcttcacatgtgtgtcagtaatcttcttagtataataacattttgttattctaattttaatccaaatgcattttgggaattatatggtttcagtatttcttattaattgttttacaattcttctctccagatgaagtttcacaattttttcaattattaagaattcaaaagtcaaatttcaatctctgccagctttcttgagatgcaaaggatagctagttttacctttaaagactgttaggactgacttttgctattttggcatggtaaacttgcaactgaacaaaatttatactgcatgagtctattttaaaatacaggagatttttatagagcaaaatacttatattatttgctcaattgcttgagtttgtcattatatatttggatggttctgtctaggccatgttatttcaatgcacaataaattgttgtagtttcttacgtttctgtgtgggtaatatattgcaggtggcatattgtaacaatgtcgattgatgctgatttaggtgaagcaacatgttatttggatggtggatttgatggctaccagaatggattaccattgtgtgtgggtagcagcatttgggagcaggggacagaagtgtgggttggtgttagaccaccaacagatattgatgcatttggtaggtcagatagtgaaggggttgaatctaagatgcatattatggatgcttttctttggggaaggtgcttaactgatgatgaggtttcttctatttataactcaatggcttcggcagacttcagtgcacttgttttccctgaagataattggcagtgggctgattcaccttcgagggtatgctgcttcttccttctctgcctctcccttcttgtagagaattgaaattttaaaaacaatatatataaattatagaaacaaaataaattgtcctcctaatactgctaaatgctccaacatgtagaacatgttcttatcatgctttactaaacatcatcctgttgtctgctttattattaaaaaataaaaatagtataacaagtggtgttttagccatcatgtttactttgtctaatcttattaacacattttgagtctaggttgatggttgggacagtgatcctgctgatgtagatttatatgatagagatgacgtagattgggatggacagtattctagtgggaggaaaagaaggtcagaacgtgatggcatggtggtggatattgattccttttcgaggaagtatagaaaacctagaatagaaacacaagaagagattaatcaacggatgttatctgtagaattagccatcaaagaagctctctatgctagaggagagagacgttttactgatcaggaatttcctcccaatgatcactcattgtttgtggaccctgcaaacccccctgcaaagttacaggtacttctctttattattatcttttagtttactgtatttacccccccttacaaattttatattgtttcatgtacaggttgtttctgagtggttgaggccaggtgagataggcagacagaaccatcttgactgtcgtccgtgcttattttcaggagctccaaatccttcagatnnnnnnnnnntttacaataattactttaaaatttatatttattgtaatttttatttgttgatgatatgattttttttcctacattaacacattgatatgcccaattattaaatcatatttgaatgatcaataaaaaataaaatacaaatgacttttttaaatagcatgtgatcactaattaactaataatcttatagctcttctttcttgcaataaaatatatatcaaaaacttgctaatggatgtgctagtgaaataatcttttaaagaaaacaagattccgattgtcaaatcaccacgattcaaagtcatttattaaaaaaggtttatttcctaaattttcaacatatttttagtccctgaattaatattttttttaacttttagtccctataatgaaattaaaaggataaaaaaatgaaggttaagagggacattgatcagtaaaaaaacgttcaggactagaaacaaaaatctttaaaatttaggaactaaaaagataatgaacctattaaaaaattataacacacaattcaagcgtgttaaacaaatttaattaagtagtgagaaagaaaattatatttgcaaaggaatcaacagtgcatgcataaatgatattcatcatatgtctcaagacaaaataaccacactcacggatgtgctaacttgtttaatgtaatnnnnnnnnnnccccctgcaaagttacaggtacttctctttattattaccttttagtttactgtattacccccccacacaaacttaatattgtttcatgtttacaggttgtttctgagtggttgaggccaggtgagattggcagacagaaccatcttgactgtcgtccgtgcttattttcaggagctccaaatccttcagatgtttgtcaggtctcatgttttacacctcacttgcaagaattttgaaataaatgtttgttctcttattttttttgttagtatttagattttgcaatgtgttaatagttatgtatattgaacagggccgtttaggtgattgttggttcttgagtgctgttgctgttctggcagaggtttcacgtatatcagaggtaatcatcactcctgattacaacgaggagggaatttacactgttcgcttttgtgttcaggtaataagcatacagagtcagattttagtttctttttattttctctttttcatgctgtgactggatagataacattttccaaataaatggcatctaagttcttttcatattttggttcatgatatctagggtgaatggatccctgttgttgttgatgattggattccttgtgaattaccgggtaaacctgcatttgctactagtaagaagggctatgaactctgggtctccatattggagaaggcatatgccaagttgcatggctcttatgaagcactagaaggtgggcttgttcaagatgctctagtggatcttacagggggtgctggggaggaaattgacatgaggagtggtgaagcccagattgaccttgcaagtggtagattgtggtctcaactgttgcgcttcaagcaagaaggttttctcctaggtgcaggaagtccgtcaggttcagatgtgcacatctcttctagtggcattgtgcaaggacatgcatactcaatactgcaggtaatgggataatgttttatatttttatattcacgatcattgttagaagtaaaaccagtaataatccttcacctaaataacttggttaagtttttaagagagttggtccttgacatggtaacaaagccttttatgttgagttagtcaggagtttatccttgttagctttgttctattttttaaagttgaatttgagcatgaagtagagtggagttgtgtatgattcatgctttaagcccaaaaggttctcttatttgaggagtgtgtttggtatatagtcattcatggcaactcatgagccttcacccaacaactcaagccttatggagagttactctgacaatcctaatgatttttaatgatctctgctgtcatacaattttaggtaagggacatggatggtcataaacttgttcagatccgaaatccatgggccaatgaagtggagtggaatggtccctggtctgactcatcgcctgagtggacagataggataaagcacaagctgaagcatgttccacaggtagttctttatgcttttctgttgtggattagtcatatgcttgacttcttagcatctctgtatgattgatctgactatttgctcttacccaatgttattatcatttgctgacgtcaattaactattttatttgttacttttttcaacagtcaaaagatggcatattctggatgtcctggcaagattttcagattcattttcgatcaatatatatttgccgtatctacccatcagagatgcgtcattctgttcatggtcaatggcgtggttacagtgcgggggggtgtcaggattatgatacatggaatcaaaatccacagttcagactgactgcaactgggcaagatgcatcatttccaattcatgtattcattaccttaactcaggtactactgatatttgcatatttagtactgcaatttctgaaaagaacttttcccttgaatttctttaaaacttcatttcatgatatttatagggtgtgggattttcaagaacaacagctggttttagaaattaccaatccagccatgattcacagatgttctacattggaatgaggatactcaaaactcgtggcagacgtgctgctttcaatatatacctacatgaatcagttggtgggacagactatgttaattctcgagaaatatcctgtgaaatggttttggaacctgagccaaagggatatactatagttcctactactatacaccccggtgaagaagcaccgtttgtactttctgttttcaccaaggcatcgataactctggaagctttgtagtgcctacggatagtttttacatgtatcttgtcctcttgataagtttctctgcctgggttctcggtggatcatgtacttgcactgccggaggccgtcttagaacaattgggtaattttctcttccccctctcccaacaattttcttttcatatatatgtcatctaacatttatggtttgtattttctcttcacagcattgagacactattcctggcggaaacgacatggcatctgttcgagagatggatgaggtttagctgcacataaactcttggtctttgaatctgatgattcatcatcttgaacaatgcttctgccagcattgaagagggctctcggggtgtttattgtgtacataaaaaagtggtactataggggtatacttgtaaccatgtaagcaaagttgaaaaagaaatagctgcaaataagtaggaaattactaacacctggttcaaatggaggtaaggacagtgtggggaggtatagtaacaagcattgagtgactgattgtaaattcagttgccgttttgacaattgcaaaaaattgtacaaacattaacaattatcagttcctatcatttattggcatttgggaaaattttgtacaaatgtctttctaatctaatttgatttcaaaatacaaggagcattcactagttgtagttttttcttggttgaaatactacgaaacggcgagaaatgttcctatcttacagtatttagtcttgcagtccttatatgtctatagagttccaatcgtttatataacttgaaaggtcaaaaagcatttcagagttgttttatactttctaaatgttaatttctatagactccaattttaaaattacaaatttctaatagcaactgtagatactagatattttttatatcagcaaggtgttgtcaatttagcataatttttttaaaatgtagggagcaaactaaataaaagatttgtaaagctaaacaaaaatttgacgaaatcatatgtctgtggagggaatgataagggcaatgccaacataacctcgttttgtctgctatgacacgtttctctaagcttttctcttcgaatataaataaaataatgtaattttttttaaaaaaggttgcgaatagaaaataattgttatactaggcaattgtatgggcatggcagaggaaaagtacaaaaaggggaaagaaattcgaaaatgaagatttaattaaaagaaaaattctaataacattttttaatatatacttttaaacatttttttattattaattgaaatctattatgatccattaaataatgtgagttttatttgtcgtacttttaataaatttgagttaataataaagaatgtattgcaaaagatattatataaaatgattcttttcgttaaataaaatatatacatagcctaaaagtgaatgaaaaaatagatatttacgtagccaaacctttacgataccaagagagagagtataaggtgcaaaacagagatagtgttgaggtgaaaccgtgaaaatttgacatgtagtattaaatttacgcgtgtatacacttgtgtattgataagaacccctcttattttggaaaaacaaaaaaaacaaaaattggaaaaacaaaaaaacaaaaacgatgagatttggatgtacgatgttggcggattgcagaagacacgcgagtttccattttattttgataggcaactatttagtggctacaacaaattttgcggtgctaacacgggtcctgctaaagtgagaggttttatcaagtcaaaactaatgtgcttcacgttcataatatcgtttgattgttatttacttcttgtaatataggatatctgatgagttaatgatgaaatggtttgtgctattggtgtgcagagttgtgagtatatgtgtgctgtgttgccttatccatagtgtcactgtaagagggaaaataataaatcttgaaaaaaaataatgaaaagagatataaagaaataaatgtaatactacatgatttgatgaaaagaaaataaaaagggtatatataatacgttgttagcatttcttatgtttataataagaatttaacggatatgtatttttaatataaaatgtttactgttagttaattaaaaatcatattttgtatgatttttaaaataattattatgaaaattaacgaactttattatacataatataacttgtgagtttgaaagtgaataaggtcttatatattatttcttataataaatcaaatctaatgaattttggattatagacttgtatacgaaacaagtagggttgtgttacatgacaatgttccctccgagtgatttgagagaagaaaataacaattaacaagtgatcctgcaaataatttcaacaagttgagctaatatattattatcacctccagtgccaattctccttgatagcttatgtgagtgtaggaacgagagatggaagaaagagtgagtggatgtaaccatgtcttaatggttccatacccaagtcagggtcacataaacccaatgctccaattcagcaagcgcttgagcaccaaaggagtgagagttactttggtcacaaccattttcatttccaagtccatgcatcttgaatcttcttccttacgaggcagtgttcaacttgatttcatatcagatggttatgatcaaggtggttttaatcaagctggtaatgtaccaaactatctttctcgcattcaagaagtaggttccaatagcttgagggaactcatcaaaaaacacaactcttcagatcaccctatagattttgtggtatatgaccctatggtgatatgggtattggatgtagccaaataatttggtttattcggagctgcttatttcactcaaatgttgcagtcaattacatatattataatgtttaccatggacttcttaaggtccccatttcatcaccaccaatctctattccagggcttcctttgcttgatctaaaagacaaaaccagcctttgtttatgatcctagattctatcctgcttactttgacttggttattaatcaattttctaacatccacaaagcagatatcattcttgtcaattccttctacaaggtagaggagcaggtatatttcttgtcaaacttgcacagtatttcaactcctttccaagaatatgttgtaatttactattcatttgatatcaattcttatgtctatggtttcaaaaaaaaaaaaagaaaaaaaaaacttatgtctatgattgtgtaccaacatgtttaaaatttatcatgagccatgtattggggtattgcagagctagtcaaaacaataatttcatccctattcatgaaaatgactaaactattggtggtatgtatgttaattgaagcggttgactagtaacagtaactgattaggaaaggtaaccagaagggactcaagggagtagttgagcaagataagatcttatatcttatgggttacaagttcgagtttccacttgcctttctgtttttttgagccattagttggctcaaacaaaagcctgcaggttcagttatttacatatcatttggcagcatggtgtgcttcagctcacagaagatggaagaaatagcattgagcctaatggcaactaccttcaacttcttgaaagaaccttccaaaagcgttgggagaggaaattaatgcacgtggaaggggtttgatagttaactggtgcccacaattggaagtgctatcaaaccatgctgttggttgctttttcacacactgtggatggaattcaacacttgaagcattgtgcttaagggtgcgaatggttgcactgccacagtgaactgaccagcccacaaatgcaaaattgttgaggatgtatggaagaggttgagaattgcatcagggtagtaatggaaaaggacttaggaagagaaatgagaattaatgctaagaaatggaaggaattggctatagaagaagtgagtgagggtggcacctcagacaacaaaatcaatggatttataaataatctgaaaagatcctaaactaaatatccatattggtttcaattaatatttattatgattttccctaaaaaaagtacagttgagggagagtctttggaattgaattgtatgagaattttatttccttctgtctgtttagttgatattatacgtttatttgattgtatggtaaattattatacatacaagcaatcacagactaaactattggtatatcttctcattgattctgtattctaaatttgaactagatgtaaatatgagactgagttatacacgagggaaacatagtaacactttttttttttaatcaacagcgtaataacacgttcttttaaaattctgctaaaacttacatggctctcacttgataacaacattatgtaattgcaccagatagcaattcagtgcaatacatatcgagtaattagtcatctgtctatgaatgaagagtataaaagaattttataaagacatctaataacaaattgttatagatggtaattctnnnnnnnnnnnnnnnnnnnnnnnnnnnnnnnnnnnnnnnnnnnnnnnnnnnnnnnnnnnnnnnnnnnnnnnnnnnnnnnnnnnnnnnnnnnnnnnnnnnnnnnnnnnnnnnnnnnnnnnnnnnnnnnnnnnnnnnnnnnnnnnnnnnnnnnnnnnnnnnnnnnnnnnnnnnnnnnnnnnnnnnnnnnnnnnnnnnnnnnnnnnnnnnnnnnnnnnnnnnnnnnnnnnnnnnnnnnnnnnnnnnnnnnnnnnnnnnnnnnnnnnnnnnnnnnnnnnnnnnnnnnnnnnnnnnnnnnnnnnnnnnnnnnnnnnnnnnnnnnnnnnnnnnnnnnnnnnnnnnnnnnnnnnnnnnnnnnnnnnnnnnnnnnnnnnnnnnnnnnnnnnnnnnnnnnnnnnnnnnnnnnnnnnnnnnnnnnnnnnnnnnnnnnnnnnnnnnnnnnnnnnnnnnnnnnnnnnnnnnnnnnnnnnnnnnnnnnnnnnnnnnnnnnnnnnnnnnnnnnnnnnnnnnnattaaaaaattataacacacaattcaagcgtgttaaacaaatttaattaagtagtgagaaagaaaattatatttgcaaaggaatcaacagtgcatgcataaatgatattcatcatatgtctcaagacaaaataaccacactcacggatgtgctaacttgtttaatgtaatcttggatgtacttaccaaaaatgtataaaaagttatccctaattttttttttttgcagataatataattttgattgaagaatcaagtgaaacaattaaccttaaacttgaactttggagataggatatggatagagtttaagaataagtaggaacaagacaaaagacaaagtatacgnnnnnnnnnnnnnnnnnnnnnnnnnnnnnnnnnnnnnnnnnnnnnnnnnnnnnnnnnnnnnnnnnnnnnnnnnnnnnnnnnnnnnnnnnnnnnnnnnnnnnnnnnnnnnnnnnnnnnnnnnnnnnnnnnnnnnnnnnnnnnnnnnnnnnnnnnnnnnnnnnnnnnnnnnnnnnnnnnnnnnnnnnnnnnnnnnnnnnnnnnnnacaggtttccaagtttaaatatctaacactattaatacaaaatgataagaaaatgaatgaagatgtcatatacggaatacaagcaaaatggctacatgaaagcatcgagaattatccgtgatcacatttttttgtgtgaatattatctatgatcacatcttacctaccaaagtcaggcaagttttattatatgtcctagtgacctactatatgatattaaatgttgaaatttagaggaaagaaaaattgacagaaatgataatgttaagatgaaatatgtaatcatacaagaaagaacatgacataaaataataatatacaagaagatattaatgtatcaccaattgagagaaaaaaaatgacaaacaattatgatgattttgacacaataaaagagaccaataaaacgaaccagtgaagaaaataaattatatggtttttaggcgtgtagaaagggagacaaaggacattaagaaaagttgttaagatagatctcagtaaatatcaaatgaaaagttttgatttctacatactaaaggattagttttcatttaataataattttttttatttcttaacgtgtatttaagctttagtcaacaaattattaaatggtattgtgtttcacttatatttcaattttagtacagtaatgcaccccaatagccaacaaggcctaagtgtcgtatcatttaaagtatatttgtgtgctcagctgtcaaaaatttacagagcttgctcacacttcattttcgtctgactgctacaattgaactatttgttaatacgaatacaaaaatcaatgactggaaaattcgaatggcctagaggacatttgcgcaacatattttgtggcatggaactcaaataggatgtctctggaagtcaaatgatgggatcataccctctacctggtctcatcttcaggtgcattaccatcttccctccaactgcccaacttaacaatgtcctcaactagaattttcccatctatagcaacaaaatgatatccgtaaattattgttttcatgaactaatcttcataaagaatagataagtttgataaatagtcactggatatattattcagagaaacattacaggtattcaacatcagtccttgatgaaactgtttagaagttgataacttcgtagggtaaacattaatttggagaccaatttgtttaggcgcatactttaaaaagtaaatagtaacactatatttaaaaagaagcggcaaaatactggtttagtaacatctcaaaaccagtcattttaaaagtaatttttaaataattttgatagcccactgaataatactttaatggcataaccatcccgccaatattcatagatgaatacttttggttgatctgtctgtgatactgttttcagttacctattgctctacacgtgaatttccatgaaaatttcactggaatttattttatgtgaataaagaacaaaactatttctgaatgcactacattgcaaacaaaatcaagaatgaataagattaaaaaaaatattagcttcatgtgcgagagaaatgacagacctctatctttggaaagactgctgacaagttcttggataccctccttgcccaatgtatcctttaagtacattgcagcagacgctacctcctcaggagttactttcccatcataatctctgcaaaaaggcccaaaaaatatctctgaaatcttatgcacagaagtcattacatatatagattgtcccaatgaagtaaggcatgtataagtggcaaacaagaagaaattgtgcacaagactaatcaaatttatcgtgaaataataatcacattgacatcccaaacaatattcaacttttagaacaaatgtggaaatgtattcttcccatttagagttgattgataagcttgcaacttggaaaatgagttcagatttatacctcggtcattcaaatgccagcaacttataatcaatattattattaacatagaatgaaaatatattcacatctttctcttgtggtagtggaacttaaattgtaacacaacacaaatcctttgtagattatgaagcacaacaaagtagtgcccttggtgaaatttataattgttaaaagccttaagggaaattgaaaacagcctcacttggcggttatatatgaacaaaagaagcaggagaaagttaagcatggtatctttggtggtaagtcattgacttctatctatgcttattttactgactatatatgcaataacatcttattcttactataatatcaggttcagaccccagaaaggtcccttctcatacaattacaatatcttgattcaaatcaccattgaacagtaatcacagtctgtggcttaatctacccgtcactctccttgggtaagaattcaattacaaaagagaacattttatgacatcaaatcatttatagaaaatacgaagtaagaatcccaaccaataaccaaatgtgagcaatagcaactacagaaatgccaacacacgccctgacaccttttgagttttgaacatattttttttattattggttgaaatttattccaacaacaaaatttgtgggtctcacttttaatttaatgagcactactcatgattttatagttttcaataaattttaaccaataatagagtgtgttgaaaggagcgtaagtcaaatgattcctattcagcaaacttgaagcagtatattcaagcatgcagtggcaatcacagattcacagtttagctttcactaaactaaatttatgcaaatgcattatgaaaccacatacttcactttaatgagatctgataaggttagacaaagcatgaccaatgaaaattgaaatgtcaaagagccttagctcaaaatgcaccatgtccctttagggactgcttgatcatacaatccatctcagcccggccactttgcctaaactttatcgtacctccccccgccccaaataacaatgttgaagagctagtgcaaacctgtccagcagcctccaacggtcaccaattttcgcatcaacgtcatctatttccttctcaagattttgaagcatagcatcaacctgacagattttcaaataattacaaattcagaagtgcaaaattagtttctaggttttccctaagactagataaaatgaaatgggtcttactctcccaatgagtgctgatgacaccttatccccttcacctgactcagtagcgtgttcatgttcctctcgggcagctttatatgccttaaaggcatcttttttaccatttgaaccctcttcctctaccatgctgttatagagttctatctggacacatacaaaacagcgaatgataagaatggcaaatggattaaatatatgtgcacaatcacagagggtggggatcaatttatagtgtaacaattgtcatacaaagacaaatgcagcttatagggcaaggggcatgtaccccacacttagaattcatcctcactatcactacttgttaaaaatgctacatgttaacaatgtcacagatgaattgtttgattacattaatagagagaaacatttgaaagtggtagcaataataatattattattaataataatatcaaagcatatgaaattgtgtattaaacaattgtagacttatctttaattaggttatattattgtatttttttatataaataacattttaaaaaatatttcatgtgttcattataatctttgaccatgccccagctaccaaaactgcctaggtttgccagaacaacaaaataggatttgatacattatagttagttacaacacacaacaacttcctacaagaaaacaatgactacttgaaatatcaccaatggttccgtatatctttcaagccaatcatttgaaaattgaaacaaaaataaatctgtaataaaaaggttaatgtttccacttatttgcaaagcatattaaagataaattctaatatttttcaatgaagtctaaaatgctcttaggcaaatataaaattttatgagaatatgagcatgatacagactttcaatccaaaataagacttttctgaaagattcatcttatagaaagtaattcattatagacacacactactctttctttctgtctttgttgatggatgttagcactccatctttttttttggaccaaaagcaaattcctccgttttctttttcaaacaacttaatcttattggtatttggtcttctaatgattatatatatatatatatatatatatatatatataaaacaatctttctctttctttccccctctcttttgtatctctgaacctctttcccttaccttttccctctcccacacctctctctgaaaacctgacccccctccctttctgctttttaacctgtctatcctctgatgatgaaattggatgaatccggtgcagaggagaacaagggaaaaaataataacatatattgtagacatggtgattctcacagcagaagagagacattaacccgagaaaaaaaaggataactaatgaattttaaatttaaaaacaccaccttaataaaatgtgttaaagacctctacgtgtttttattgattaaaactcaaagacatattgttagcacacttgcatgcacaacaaatatttaatgcaatctatagaagatgtaaaagcaaatgatgaattttgaaaggtcacacatacctctttgttaaccagtctaagaaaatcttcacgctctgaacttacagactgccaccagagtaaaagacaaaaccacacattaaacagcttaatgttaaatagtaatagattatgcaaaataaaagaagcaattcaccaaattaaaggaattgaatattttagatatcaaattctcaccgatgcagaagctaaaacagctaatgcacgactaagttcacacagttgttctttgttttcaaatgctctgtctctagcaagttggtgagcctcttttgctgttgaaatattcatctctttcagggccttatcatcttgattagaactactctccatccttgcttgcaccacctcctctctctcttcctcctcctgcatttatttataatactatgttacgcattgtgttttttcataacatggaatcttagatcaatagaaagctacttaattttcatcaatagttatttaaaatcagaaaatgaactttatggtgaactctagcatatcaacacccaacatttcatttgttaaacttactgatcagactcccaatgaattctgtcaaacaaaatattgaaatgattctttttatgtcattgatcatttagtattttttagtagattcttctcatatgaaccagagcaaatatcaaacactatcaaacagaaaaaccttgtcaatgtcatcctaatacaacaaagataccttttaacaggataactatctagagcaatgcaattccatagtttaccttaataagttcttcttgcatttcaaggaactccaatttcctcctcctctctgagacagaatcctcagagggcaaagatgtaacctgtatagtatctacaacctcatcagggagagaagaaagtgtagcctgtacagcttcttctggtttcaatctcccagacacagtaaatgacctataaaggatatcaagtgagatttcaaaatgcatatccagcggattttttctttaacttactatttggccccatcaagggactgagggaggaagccatgttagaattaccttgaaagtatcaaaagagatgatggaacagagtgattcagagataagtccaaccaatctcgaagctgcacaggcaggttcacaaattttagaatagaaacaccaaagcaacatttgatattcaagaaaactgaggttttaatatcctcgtcaagatccagtactcaaatagaatacaaatcatgaattgtttccaacacaaaacctgttggcgcatttcttcaacagaaagcaacccaagcatgcctcgctctctacaatcttcccgaagttcatcttctgaaagagaatccacaccttctgcttgaatcaatttatcatcttccttaatcctaaaaaacgggggcatgttgcaagtaacacaattacgaggttcatcaagttatatggtaaattgaagtaaataatctgaaaaggcgaaaaagaaaactattttgtggagtttttgtctccaatgaggctaactatagtcataacaacagaaaatgaatgcagtagcatataatagcagtttgaagcaatatattaatgagaggttaagaaggaacaaggcctacatttcaaacctaaatgtgtaccaaatcttttaggcctacatttttgtctccaattttttctttttttaaataaaattcctctctaaatgatccaaccttaaataaatggaaagaaagtattcttgtaataatttaatcatgtataatgataccaattttcaaaagttaacatagcattaaactccaaaccaaacataggaccaattccaatccaatttgggcaccaaagttgcatcaatggatttatcaggaatttgatatttgattgagcccaatgacattatttgtttcatgaagtcaaacctatctatcaagatgaggctttggttgttgttgtagccacaagatataggagtaccgagtaccctggttgtgttcaatcttttgatatttatatttgaataatacaattcacagagattatttgttctcttattttgtaccctaatggcatagtatggggaggtaatcttttctaataacaaggtatctttttttaattagagattttttttttcattttcctaattgtattacaaacagtttagataaaaccccaacttgcaattaaaattagtaaagaaaaaagttacaaaaacatgcattataaaatgcatcctacctccgtaaatgttttcttagcatataacgcaagtatgcatcagtgccaaaagggctgattcccatgtacttgcacatattgactaatcgtggcctacgagcagtaaagacaaaatataagtcataataccacctcacaactgagaaaaacagcatattgaagtcaaacaggattaagaaacaaacctgcttgtattatctagagtaagttcatcattaaacaacttagcaaagcccaaaatttcctcattagagacagttgcacctcttctaatctgcagaaagtaaataaagcataaaaatgacaaactaaggaaaacattcagaaagaaagattgataaacaattctttgaactgaagttttaaccgtgtttaaaaattcatcaagatcttcagctgttttctttagttctccactgcgggagttctgaacttcttttgccatttctttgactgtatcctgaaggaaccttgcatactctattcttgccttgagtctccttttcaatgcttcctacacattgagcaactgagtcacccaaagaccctacaatgggcaatcaaatcacaaattcatggtaactgaaaagataaaaaaataatgcacactacaaatacagagacacaaaaatggtttctaatgaggatatttgttaccagtggctgctagagaacatagaacatatattggtgcaagctcatatacaattttcaaccaaagatgctgattattagggtattttggaagtttggtgttagaagagaagggaaggaagaacaaatttttatttcaaaaaaattttctctaattcaataaaaaaattaaaataaaagaaataaaatgatagatcagcatcaatttaatatgttaatcttttataaacattatacagctctcttcatttaaaaataaaatatttgtcctcccctcccttcccctccaaaacctaattcccaaacatatcctggtaaaaaatggacattatgttgatgttaatccttgggagctatactttacataggaccttcaacacaggctaggacaagccttgcagttgcttagttatagaatttctatttcccctggtattattagcatgaagaatctggctttttaaagtgagtgatttcagttgttgataagaaaattaacggttacgtgcacatgcataaaaaatcaaggatgtgttgaaatatacaccattgattttctcatcaacaattaaaaatacttaatttatccttactcacttttgagaagccaaatcctagatggaatgggacaagattttaaacagtttatgtacagtttattttaagctagcaaagataacagcaaacagccaaaaaaattcttggcaattacctgttctttcatcttgtcttgaaatgttgacggcaacatgttagggaataactttagaaacacaggcaggaggaactccataaagggaacaataatgaaaacagcaaaaggaactagcctaaagatatcggcagtagtccgcgtcagttgctgcctttcccttctggagagactcttcccacccgcaagcttcaacaacaacctggaactgatcctcacatcagcccacagcagcttagaacccaaccaataatgctgcaacgtcgacacaaattcccctttccagtgaaccagttttttcgcccagtcctccctgcagcagcagcagcaacaattagcaaaccaaaacaccaaataaccaaccattaacgaataaacatttcactgcttcaaatttctatctaataaattcaaaagcccgagctgcaatttctatactctaaacacaactataacctcaatttaaaatcaaatgcactctcaaccgtaaatgcaacaattagcaaacctaaacgccaaatcaccaacgaacaaacatttcactgtttcaaatttcaatctgaaacagcaaatagcaattgcagccacaacactacaatttcaaaagcctcactgtaattgctataatccaaacacaaccgtaacttcaatctaaaatctaaaaccacatacaaatatcaacagtaaatgcaatttcgcgtaatttatgaaaccgtaactgcggacctactcatagacgcgacagctctcaacgcaggaccgattcccaaaaacgcagtccacactctccgcaacacgctttgtaggtctttctgcgcctcttcttgcgcccgtttcgccatggctttggccttcgcagtggtcaagccttcgacggcttgatcgcactcctccggtgacgcttctttccgcttctgcgccaccgtctcatcgttctcatccggttcatgacgtttcgccgccgaggccgacgactgcgacaaccaccgcacacctatcggcgcgttcagtgtcgaaaaagcgtcacacggaaccgcgctcccgaatcctcgaacaacttgcaccaatccgaaacgattgaacaagtcgtccctgtacggcgtcgttccgtgcttacaaggaaacagaggtgacgtcgtagctatagcgcgttccagagagcgattactcggagacggagaagaagcaaaacagttattcaagtattgatggattaaacttctccttctcaaaattgctcgtgatgccattctcgaaggaactaaacttggaaaagtcacagtaagagatgagaaaaaaagaatgaagaatttgtggtactacacgtacgaattgcttagatcttatttttggttctattgttagtgagaattcggttagaggttgaagataagatggtgattgaacttacttatgcggaacgtagaaaacggaggaggcagaatacgaagaaggaatgaagaaacaaagtgtggtgagagttagggtgttaggaaagtagagcggagaggtttaaggagtttttgttgtgcagctttggggaggggtcatcgggttttcttaccactttgtccttcctacttacgtcttattcattttataccctttcaattcgtgctgcttgacttgttatttaggttggtgggtaaggcaaattattttgttgggtttaaagtattttataaggcaattgcttcttgcatcccatgttgtgcttcttgcatccataagaaacttaaaacatgcaaaaacatactaaaatatgcttctgcctttgtctaacactaacacacctctccctttgtctccctttctacacgcctaaaaaccatataatttattttcttcactggttctttttattggtttcggtggttgatggtaaagggtttatcttggacggcgatggcaatgacctcttgcacgaagaggcatgtgagacaggtatcgtgggagtagtggaggtcaacgtactcgtcggtgatggagagtggagtaggagatgttggcattggtctagtcggtgtagagggtgacggtgcatcaacagttggagacagattgggagggtgcgacgaggttgttggtggctagataaagtgttgtagttagggccaacaattgcagctaagcaacatacgaaaactccactttgaatagtcataaatttgccaatcgaaatagggtcttcaaagaatacacaagtaccgtggactctatcttgaatgtgtacacggttgaatgacaccaaacaccttagtgttccaccttttggtgtttttgtttggagaacataatttggaatagtttttggtgtccaaattatgtattttgaaagaatatgggtaacctgaaaaacttatacttttatggaatacctattttggaatatgattttcattttagaagggccattctgtaatatgtgaagggtgatttgaggatttaaaaacctttaggggtggaggaagcaaaaaaatgggtgcgggaagcaatggcctctttagaattgatatattgttttaatctggcccaaatatatgaaacttttaaatccatttgattcattttactatccccaccttaatgttttgcatgtttgaggttgggaagttgctactagctttaaccccatttgttattggcctctacaaacttgagaaaataccttcttatccctctatcttcctcttcacttcttttcaccccgcccaacccatcaccaccacaccaacgctgcgcgccaccaccttcacctagatccaaaatcgcagcacatcaccacagtcttttcgaccacctcaccacgtgaccacctcaccaactaactctgaacgcaccactaccaccgtcgcacatcgctcccaactttagatttgcatgcacgacctctcaccagcccagccaccgcgcgtcctcaccattgtgtccaaacaccattgcatcgccgcaactccttcccttggtttgtgcgcccccaccaactccagattgcatgaaaacatgcttctgttaaggaagaaaaaaatatatacacaacaaaaatgtgatttcgttttacactatacaacaaaatcatatttccgttgtatatattttttcacccctacttaatccaatgaaattgtgttttttttgcacccccattacataatgaaaaagtcgaaaacccaatttcgttgtacagttgtacaaatagaattgtgtttccacgaaaagggcatttttggaagaaaaaaggtgtcattcccttagtaggggccattagcaattgcagcggggccaatagcaaccaccctaaggttgaaatgtctcgtgtaaattgaaatnnnnnnnnnnnnnnnnnnnnnnnnnnnnnnnnnnnaaaaaaacagaatgtggacttcttagtgaacttgccccatgtaatatgggaagagaaattcaaggaagacacaagtgattctaatcctgtaaaattatctagatgcaatcctgcaggagttgaggaaggcaatcaaggcatggtgtaatgcttttccttggggtaaagcctctacagtaaagatgattaatcatgattgcatgatacattgtaagggttcctgtcttgtcaatacaaactacaaagtatatccctgcaacattaaaaaatgtaaatacatagaaaaagtatttgctagaaagattcatatttcgaacagaacaagcctcttaatcttatattccttgcagtattttctggacctgatgttttcattcatggataatgatgttgtattgctgttgcatccttttctttcttttaactttgttgtgcatttttgtgttcttttgggtattttaggggtgggttcaattattgatatacttgaagtcccgtgtatacataagcacaattgattaaaactcagaagtcaaaaaataatttagacctaagcatcatgacaacgaagagagaagaattaattattaatttatctgttactgcaagttcatatttatttattgtgtttctaatatatataactcctatatttaagccttggtaattgaagattttcgcattctgattttccccaccttaatctgcaaaaattaaaatgcatgctagtctaactcttcaatcattaattgtctgttccaattctcttttccccatgctatgattttgatggtagggacaggggaaaggtgtagctaatgatgggtcagaatggaaacttgaattcaaattttaagataacatggttgagttggttcaaatgtgtgcagctacacatgaatttagtgtccaagtcttcaatcagttgatcttaatatgaatttatacttatattgatgataccatctcacgtatagatgtctttagccatagcaagtgccccttttgcaaggcatgtactaatgataaggggaagcatctgaggattgagggcagatgcaacctgagatggcaaaacgaacgctttagctcaaattgagagatgtaaggtaatttacacaaacatcatggtaacaattgttagcatgacagaaattacaaaattgagagatacaactaatcatttctaagcaaaattcttcattcaatttgacaatcttaaagataaaagatataggaaattacaaaattctggcattggtaaataatgagtttagacacagatttgtatcctcgtgacttaagtacagcaatattagtatattactgtgatccgggtttcttaatgcaaaagacaagatacaaattactcaacatatcaccataacaagatagcctggttatggatgtataaggtccagcgaaaattatctttttcaaagaagagaaataaactttctattttttaacttacagattaataatgttcactgaacctttatcatccaaacagaattgagaaccacctccatactgtcaatcatccatcctgaatcaaaccataaaatttccaacttactgaaaacgtcagccaatctttagcttactgtcatcaacttatcatcaaagtgacaactattaatcagattatcaatactcttccttcaattgttttaataagaaagatatattttcatttttcttcaaaaagaaaaacttggccataattaagtgaaagactgatcaccatgcatgcaacacgttgttaatgagagaaaggaacactgaaactttattaaaaagataaagttacacttcaccattgaaactttattgtttcacgctgttgaaatataaatgtgggttgaaatcccacattgggtagaaatgaaaaaaataaataatatataaatgaaggaaaaacttatgtactttaactttaaattttaggttaaagtgggatgtgagcgaaatctatttatttgagactttttaatgtaaatctccccatgtttcgaaagtcttgtgagcctaagtttttgtttgtccctcctgttgttccaaaattggctttagtttttgttggcacaatgaagggcatattatatacttttaaagtcacacgaaagccaggggcattgatatatttagtgggccagggataccactgctgtatcttgttggggtatatcgtccaagactactttttatttttctatttataacaatcttcttttgttactacaatttatgctaagtacgtggattgcattctttaatgtagttgcttttgcttattaaagaaacagatataaagggtgacttaatcatacaattggtcttttaattataattagaatttcaattaaattctttaattattgaaaagttaaattagatcttttaattattaaaaaattataatttatcttttttgtcaattctgttagtttgattgacgaaaatagatattttcatatttattgttaatacaattgatgtaaaattataaatttttccatcgatttccaaaataattgatgtaaaaagacaagtttacattgtataaaaatgtttatttataaaacttttatcaatcaaactaacaaaattatataattataatgttttaaataatttaaaaatctgactgaactttttaatagttaaaagatccaattaaactttaaattataattaagagactaattgaataattaaaccattttaatttgataaacatacctttcattccttcaaagtaacaactagtaatcaaataatgtgaacaataatcttatcatcaattgtgtgaatctatcaatcttatcatcaaagtaacaactagtaagtaagcaaattaccaatggccctccttcaattattttaacaagatatatattttcctattcttaaaaaaaattctcaattattaaaaaactacattcaattgtatatcattttccaaagtaacaaaatgtaaaactgataacattttacattgataatcaatataatcaatgtaaaaatatatatttacaagtttattttaataaatgcataattattaaactctaatttttattcaatgtttacaaactttaattcaaaccaaacatacattaagaacatttttagtgctaaatcttgaacaagaatcttgagtttaaaatcttattttcactagatctcctaataaaggaggtgaggagatctccaacatgaataataggttattgtagaataactgggaagatttgtacattgttcaaaaaagaataaattttttcctctttttctaagatctcaaaataacatctactactaaagaaaaaaaaaggggaaaaatcttcaatcctacttgacactatatatagagtccacaaaaaaagtggtataaaatcccaatttgggatgtaaaactaaatatgaatggaatgcattttttaatattatgcttttggtttttttcttgctatctgtcttttttcaaccttacgtgcaatccagttgatattttttcctaatataaggtgccgaatgtacttgaagccaatgcgcataacacattattccaaactgataaactatcatcccatatatatatagaagaagcatcgatcttgcagtctaaagtatttgaagatggtgtgttataagcaggcagaatctcataccttgcttgttttcacatactcgtggttgtggtgggctacttgtattgctgctgcaaataacagtttaaagaccggagatacactgaatacaacaagccggctatgttcagaaaagaataaatactgcatgggtttttccccattaatacatccaaattctccagtctacactactcacttgagaatcactgacaccttaaacggtgatgatgacaacaaagtgtgggttgcaaatagaaatcaaggtgttgacaaggattctgcagttcttatgctgaaccactccggtgtactcaaaatagaatccaaagatgcaaaacccatcatcctttactcttcacctcagccactgaacaacaccgaagccacgctgtgggacacaggcaacttcgtgctgcaacaacttctcccaaatggaacaaacactgtgttgtggcaaagttttgattaccctactgatgttttactccctgggatgaagttaggggtcaatcacataactggtcataactggtcacttgtttcgtggttggctgaatacgacccaagactaggccattcagtctcgagtgggaacccataagaagagaattgatcatcaaggaacgaggaagattgtgctggaccagtggagaactgagaaacaacaatggattcatgcacaaaacaaactacttggttgtctcaaacgacgatgaaagctacttcacaattacaacttcgaatgaagagcatacgttttggacgctattagaaactgggcagctgataacttcgaatggagaaaatgctgcaagggctgatctgtgttatggttacaacacagatggagggtgccaaaagtgggaggagatacccacatgcaggaatcctggtgacacattcaaagtcaaggaacttttcttcaatgttaaacacataagcaatctagctaattggagttatggtcccagtgattgccggcctatttgctggaaaaattgcacttgtgatggatacacatattattatgaagatgcaagaactggttgttcgttcttgcatttgaattcaacggaaggtgatacttttgcaagtgggggaaagaagtttttgatattggtaaagaacacccatcacaaaggtaagtccatatgatttcatgacttcctacttcacattttttatgctctttccgtttttaattataattatttttttataaattttttttttataaatttttttttaatttttagatgtattaattatttttctcttatatatttttaattattcttttttcaaattcaaaatatatttcacttgtaaatttaatatgattaattaaattaattattttttaagaagcctaaattaattttaaaattcttataattagacacggagacattaatttttttaagaagaaaaatgtgtattttaattcttatgttttcatttaaatttgattttgtttcctatattttcaaactaatgaatctaatcctctaattctttaaaatatgtgagcttaatctttttcgtgtttaacttaacatttagtaaggggttttactgccattaagttataaacaaaattaatttaactcctcctataatatcgcaagaaggttattgatgtttaattagaattatgcttttgtgaacacatgttagtctgcaaagagataaagaaatattagaagaacgaaaagtgataattgatgtgacatgtgataatgtgataaaaaaaagagctgaaaaaagatgagttgttaaataaatatttatactgagtattcatgcatgtatcattgttgtaatattttactttaagtcacatatgtggtaaacgttatagatctggaatcacacttacatatcttcttacatgtaaacactatgcaggtaaaaaaaagtggatatggataactattgtaacagtagctgctctattatttgtgatatgtgctaatttcattctatttttcgccttgaagagaagaaaaaatctgcttgaaggttagctatatctttccagtaaacgttgttccaatattttatatattgagcataatcccttcattcactatttctatatatcattcaaaattttatgtaaattaatagagaagaaaagaaatagaatgaagatgaagacgctagattcagccattaaagatcttgaagatgagttcaagaagagacaagatctaaaagtatttaactttaccttaattttgtcggcaaccaacaatttttcaccagaaaacaagctaggacaaggaggatttggacccgtttataaggtgacgtgaaactattgactttgtgttgtaagctgtatcaagttatgacaaggaggatttggaccagtttataaggactaataattttcatgttgtttagggaatcctaccaactgggcgagaagctgccataaaaagactttcaaaaacatctggacaaggaattgtggaattcaaaaatgaactaacgctcatatgtgaacttcaacacatgaatcttgtacaactacttggatgttgcattcatgaagaagagaggattctagtttatgagtatatgccaaacaaaagcttggatctctatatattcggtatgaaatatgttggagtttatttaattataggtgatgctttaatttggaagacaaattaagataatatttttttaatcatcaagcaataattccaatgccatcgtgtagagaaacattaagttttcaacggaaattttcattaatgagaaatattagtaacacattctttaatatattttttaaaacacatatttattcattgattgaaatttattgaaaatcataaaatttggcaaatttaatataataactttttctcttaatttcatattttttaataaattttaactaagtaaaaaggatgtgttaaaagagtatgttcttctttcatgttatgggtgattcattgactcatgctttcctttcttgaacatataactgtgtaaatgtcatgctttgtttaactctttttccatcttgaacataattaattaactataactaaactataccaatgataaatattgctaacatattccaattaaaatataagtttgtataatctaacaaatgtttccgagatttagtaatgtacacatttatttttttagttggagtatgttaacaagttataattagatattatcttaaatacatcaattaaatatgtaatttgttaacatagtcacactaagtatgtatacattaacaaattctataatatatactcacaaagattgctttatttttaacacttgctttatttccattgagaagatagcactaaaagcaagtttctagactggaagaagcgtttcaacataatagaaggaatttctcaaggattactctatcttcataaatactcgagactaaaagtcattcatagagacttaaaagctagtaacatacttcttgatgagaatatgaatccaaaaatttctgattttggattggcaagaatgtttgcagatcatgattccgcaagtacgagtaggataattggaacatagtaagcttgcaaaactctatcggtttcaagtgtagttgaagaaaacataaataggtttgttttgccaagttataattaaactctttttttcagtggttacatgtctcctgaatatgccatggaaggaattttttctataaagtctgatgtctatagctttggagtgttggtccttgaaattatcagtggaagaagaaatactagcttccatgaggatcaccctataaatttggtaggacatgtaagtgaaattagtctcaacgacttcttttaatttgattttttaatactattttctttatctaatttgactaaaatgctaataggcgtgggagttatggaatcaaagtgtttctttacaattaatcgatccatcacttaatgatgattcgtttgatcctgatgaagtgaaaagatgcattcaaattggtctcttatgcgtagaacaagacgcaggtgatcgacccacgatgtctcatatactttcaatgctaacaaatgacagtgcagtaattgccatgcctcaaagaccagcattctatgtggaaagaaattgttttgacagtaaaacatcttccaaagagttatatacagcttctactgaagaaattactacttccttgtaaatatataagtttgtggcacgagatatctatcccttatttttgtttttataaaaaaattattttagaattatttcctgtaaatttttccataatttacttatatgttaggacaacaaaacaatatatatatatatatatatattatattaattattgactattagatgttaaactttccacctttaccaaaacgatgttaaattttccaattgtgttatgtgctggtgggggagcatgcactgaatgacaaatattttaaccaaattaaaaagatttgtacctttttgcaaggctaagcacttgagaaacattggtaacaaaagatcagttctaaattaagcattcctagagctttgaagcccttgatcagaaaagatctaacagctagcataaatgcattaccacctagctagcgttcttgttggcataggacagcctagatttgaatgcaccaaacaaagaatttacggtcttttggtaggtggagtgacttcggaaagaaattctattatgcttccctttaaaacaattatcacacttgtgcaaatgtggacacctcatgccagacatcagacaacacatccattttggttagttcaactatgcctttctcacatgtaagacaacctttgatgtcaaaacttaactttttcaactagctagttccattacatgaacaacatcaataaacatttttgcttgtgtcacgtaaaggttggaatatttcatacgtttagaaacaaccatagaacactttggtgagtttccaagtatcccgattgtcataagcttcatcacataccctagcccccaaaagatcctctttttgtgtttctaatttgtttcccttttttttctgccataggacatgagtttgtgtggtttttgcaagtggaattctatagtatttttatctaacaaatgttagtggttaatttattattttttgttaatagaattgcatagtggttggttgtcatggcagtttgcatgattctcttctcgatcttttttttttccttaaagacatgagattattttgatttagatcatagatattttttactaagacaatctgacttcaatcttgtgaaattattatgattaacaaattctttctctaaatatttaacacttatatacccaagacttgaatttgagtagatctttctcagtggtgaaagagtttatgtttaggttaaaaaaattataaaaatatttattatattaataatattttaaattttctataaataatattatttaaaatatttcattttaaaaaatattttgttatgcatctttgtttttttaaaatattagaaacataaaaaaattatatttacttatttaaattaaaagatgaaatatttataaaataataattattttatattatattataagattatgtcaatatattatttccggaaaatggtcatcctttttattttaacaaataaaatataattttattattgaaattttattattaggttatattatattattaaaatatattttttaaatagttannnnnnnnnnnnnnnnnnnnnnnnnnnnnnnnnnnnnnnnnnnnnnnnnnnnnnnnnnnnnnnnnnnnnnnnnnnnnnnnnnnnnnnnnnnnnnnnnnnnnnnnnnnnnnnnnnnnnnnnnnnnnnnnnnnnnnnnnnnnnnnnnnnnnnnnnnnnnnnnnnnnnnnnnnnnnnnnnnnnnnnnnnnnnnnnnnnnnnnnnnnnnnnnnnnnnnnnnnnnnnnnnnnnnnnnnnnnnnnnnnnnnnnnnnnnnnnnnnnnnnnnnnnnnnnnnnnnnnnnnnnnnnnnnnnnnnnnnnnnnnnnnnnnnnnnnnnnnnnnnnnnnnnnnnnnnnnnnnnnnnnnnnnnnnnnnnnnnnnnnnnnnnnnnnnnnnnnnnnnnnnnnnnnnnnnnnnnnnnnnnnnnnnnnnnnnnnnnnnnnnnnnnnnnnnnnnnnnnnnnnnnnnnnnnnnnnnnnnnnnnnnnnnnnnnnnnnnnnnnnnnnnnnnnnnnnnnnnnnnnnnnnnnnnnnnnnnnnnnnnnnnnnnnnnnnnnnnnnnnnnnnnnnnnnnnnnnnnnnnnnnnnnnnnnnnnnnnnnnnnnnnnnnnnnnnnnnnaatcatacctgatcatttgtaattaaatgataatctaaagactatttacattatatagactatatacttatttttaaaaaaattaaaaataattaatttcagtcttaaataatcaagtcattactatttaaaagagacccgtgaattgtgaaaacatcaaaaccttacggtattcttaatataagatattatttagaagaaatagataatcatttttataagacattttacagtttctttgaagcatttttttcttattaaatactctacgtatctttgtgtttttttattgatgtgttctattattttataatgtccttaaactttaatannnnnnnnnnnnnnnnnnnnnnnnnnnnnnnnnnngaaggagtttaaaagttttgataatcgatggagatatttctttgcaattagcgcacaaaaaaaaaaagtataccttgttttagaaattattggaataaaattcaaaacatgaggccacaatgaaattattaaaaatacaactattaaataccaaaaaaaattataaaaatatgtagccgttctttatataagattagataaaatgatttacaaatttatggcttaaccatataattttcatggtaattaatgtgtagaagccaaaacgcttgttttttgatatcatgatgaagatccaaaagatcataaatattttggtgtgtctaaaatatttttggaaatgagagacacaaatgtaaaagaactttctcccttcatagaatcttggattctcaccgcctcctatggaataatttaagtggaaaacttaactaaatattctttttcaggaaaacttaattccaacacacctaattctgcagtcattcatctgtgatggattcgggtatgcttctgttttctaattaatttatatacttttaatcatttgacaaaaaaaaaaaaaacccttttatttaataatggttatcatgtttgatacgttcctcattcctaatacaatttgctagtacaaagctcttcaatcactgttagcaaccaaagctgagtgagacattaggctttaaatgggccttgcaagtggcacgagaactctcctttgataaaattatggttgaaactgattgcctacagctgttccaagtttggacaaagaagcaaagacaaagctttctcctattttgagactatggaccaatgcagagacaagcttttgttcgatgactccatgtacagacattcttttctcatcaatgcatgatatttccaccctttacgcaaaaataaaaaatcattgcattctgcttgttacgttctaataatttgtacattgttgcgtgtttttaatgaagcaaattattgaattacgatacgattcaattattttatttttttttttgcatttgaaaaaggttattctatagataattaatttcattaccgtgatgtgtaacatttttccttttacaagaataaccagatgtttttttagatgttgtattaatagatagtcaacccaataataaaacatctgtaactaaaagttttaggcctatcagtaaaaaaagttttgttattaatttttataaatgaaaaataaactcagaaagactaaagttgatgagtcagaaaggaaaggaaacgggttatcaaacaaagaaaggaaaaaagaaacgaaagaaactcaaagaagtattgtcgccttttttaaaagaagattgaattatttaaatcatcatcaatgtactactaacaactactactagtagtaatcaaattatcactactctctcccttcaattattttaataagatagatctttaggaaaagttacaccaactagatattattatttttagtggttattttttttttaagttagtgtggcaattaatagcaatagcaatcgcaataaattaattactaatagtttattatttaagctacactatttatgactaatatattattatcggtaaaaattatttattaagacaattattaagaatagccagtaaaaaaacattatattttattcaaataaaatctaatttttatttctctttaattttttccttttcaaaacttttgactaacgcactaatactctttttagcaattaatcgttctctttcttgacatactttttctcgcttttaatcgttttctttctcaacaacctctctcaacctctcacactcatcacaatgactttttccaatcattcattttaatcatcctctttctcaacgacctctcttttttgtaatcactcaccaaggagtgaagattatctccatttctttcattactaagtgcatttgacaaataaatatcacttttataaaatgtgtattatctcctttttctaaaaacttatcaaaattaaggagaaaatagaagaaatggaagagacagaaaatgaagagaatccatttccctagcaaaaatgcttctcatataatgcttttagatatctctgtgtttattttttaatgttagaattttgtgatggttttatctttcaaataattgtgtttgtgatcataaataaaggaaaagtagaagatatgagattgatttgatgataaaatgtgaacgaaaggagagataagttggagattcaaattctttggctgataaaaattaataaactaatatttaatatttattgataaattaaataaataaataaataaataaaacgtagatatatcaaagaagaaaatgaataattgagaaacaaagaataattatcaaatagcaaatggatgtataaatggaaattgacggataaaaaaaaacaaaatatttaatgtatgttttatctatgatattgatataaaatatatatttttaaacaataaagaagaaaatatattaagaatatcccatatagcacaagttaaacgaatattggagcaaattttacagaaagctgaataattgaaaatagagtccagggaataaacaaacattcctatcactggcctatattacccggtgtcgattccatcatcccaccgctgcaactgaaaacccattgatgcgtgcatctactgcaaatacttcataacagaaagaaaaaaaaaaaaaaaaaccaccagtagatacttagcattgaaaattttatacctcccacctactaccaacataataagcatgtccttgcatagttgtctcctacccatatttaaacagcacttttaaccttggagatttattcctttgtgcaacaaatattaattttattaataattaatctttattaaaaacttaattaattatttttagtgaaatctttttttattagttttttatattacaaggttcgaattcaaaactttaattaaatatatcaaattcaattcagtatcactcaaatcaaaaacttgttagtaaaaatttagtgttaagtacatgaatttaaaatatcacactgaataaagttaataaataaatgaaagcttataaaatagtaaaagccgacgaaagaaatgttacgtgggattgagggagtccattccaatacgggaaacgaagtaaattaaaggtccatttattctctattcgtcccaaaataattattattatatgttattttatcatacgaagaaaaattaataaataaataaaagtagtaactttataatattaatattataatatcattaatttatttataaattttgttgtacattattgatcttataagggatataaatgagaaaaaaataattaatatcatattaaaaaactaaaataacaattattttttacatgataattataatgagacagactgaaagagagtattacacttcctaaaaatgtgctttctccattttttatctgtcttttaagattattatgtaaaaaataataattttttaattctaataaaatagtcacgtgatttcctttttacctttttttttcttatttcacaataaatgcatagcaaaataattaaagattagaaagtaagtatggatataattgataaaggataattaatttgatattgaactttctagataagagataaataaaatcaaattaaaattttccttaatccaacacttgaaaagaaacagagggagtagaatatgtatctcctttttttgttgtcctgactcttcataattcttatataatagcatactatttaaaatagtatgagaaggaaaaaaatagaaatactaattataattttaaaataaannnnnnnnnnnnnnnnnnnnnnnnnnnnnnnnnnnnnnnnnnnnnnnnnnnnnnnnnnnnnnnnnnnnnnnnnnnnnnnnnnnnnnnnnnnnnnnnnnnnnnnnnnnnnnnnnnnnnnnnnnnnnnnnnnnnnnnnnnnnnnnnnnnnnnnnnnnnnnnnnnnnnnnnnnnnnnnnnnnnnnnnnnnnnnnnnnnnnnnnnnnnnnnnnnnnnnnnnnnnnnnnnnnnnnnnnnnnnnnnnnnnnnnnnnnnnnnnnnnnnnnnnnnnnnnnnnnnnnnnnnnnnnnnnnnnnnnnnnnnnnnnnnnnnnnnnnnnnnnnnnnnnnnnnnnnnnnnnnnnnnnnnnnnnnnnnnnnnnnnnnnnnnnnnnnnnnnnnnnnnnnnnnnnnnnnnnnnnnnnnnnnnnnnnnnnnnnnnnnnnnnnnnnnnnnnnnnnnnnnnnnnnnnnnnnnnnnnnnnnnnnnnnnnnnnnnnnnnnnnnnnnnnnnnnnnnnnnnnnnnnnnnnnnnnnnnnnnnnnnnnnnnnnnnnnnnnnnnnnnnnnnnnnnnnnnnnnnnnnnnnnnnnnnnnnnnnnnnnnnnnnnnnnnnnnnnnnnnnnnnnnnnnnnnnnnnnnnnnnnnnnnnnnnnnnnnnnnnnnnnnnnnnnnnnnnnnnnnnnnnnnnnnnnnnnnnnnnnnnnnnnnnnnnnnnnnnnnnnnnnnnnnnnnnnnnnnnnnnnnnnnnnnnnnnnnnnnnnnnnnnnnnnnnnnnnnnnnnnnnnnnnnnnnnnnnnnnnnnnnnaaatttttacttttatacatttaaagggaaaaaaaatcaaacaaaccattaattattttaggtcttgaagacggatttctgaaaaactattcttttgttaaaactacttctgatgagtgaatcctatttttagaggttgatataatttacattaatttttctcgagtttaacttatgcttcttaatcaagtcttattcttaaaatcacacctgacaaatcataaaccaaaatgatatatattatattctcgaatttaactcatgtttcttaatcaagttttgttcttaagatcacacctcacaaatcataaataaataataatcttaagtcttgaagacatagaatgtacttcttgttaatttgttattattgaaactttattgtataaaattatttgcttcctctctttctccatctttatgtttctttttattttccacctaaatcttatattattattacttttactacagattgcttaaatgtgtttttaaagtacgataactttgaaaaggagttaactaagtcatgaaataattttcttacaatataaaatcataaaaagataatataaatttatatatatattatattatttaataaaaagttatatatatgaaaataaaatgaaaactattataattcttttttaaaaaatatataattaccaaatttcaagttctcataaagtagttaattgcccttacataattttgcattatccattagttaaaaggtaagttctatcgaacatttttaactaattagttaagcatatcaactttcactggacaaacttttcagcttttaaatgattaactgctaatttgacaaaacacattgccaaacgttcactgagtgccacagcagcggcatctaatttgattctataaaagttatacacaacattttttttttgtgttgggacacaaccagtggcggatccagaaaaataattaagggggtactagtaatagatttaggaaaaatttatttatgtctgcatatttagtaacggggttcaggggcagtgtccctgaaattttttttttttgtaaagaaaatttaaagaaacaaacaattataaactatactctaaagaaacaaacaaatagctggaccaaattactgttctggactgaacaaaacaatgaaataagcttattgtaacttttgatgagatttcaaaagatcatgatgacaacataagagttagtttagataaaagtattgagtttgagatctttgaatatgaattgttacaatatagactaaaatatttctacaaaatacatatgattaaactgtacttctcatttcaatgaagaacaaggactttaatttccttataaacaagtactaatgcataaattacaaataaaaataattaacaaacattacaaactatataacaagcattgaaataattaacaagtattacaaacaagtgttaaaggtatattaaaatttattggaaaaatttaagggggcactgccccccaattcataagctgcatccgcccatggacacaacatatatcgggcaaaaagacgcaaatagaagcacatatggtagtcaataatatccataagtatagtatagaaacacatttttattagaaaatttatgagaataaatattatatgttgtttatggtacatttttcaaagaaaaagagatttaagattggttgagtagttaagaaagaaaaaaagaagaaaaaaatttcaattttgatcacttttattaataaaaattaacaaattaataaaaaattaatatttattgataaaaaaaatatcgataggagttgttaccgacccgctagtgaacaggtaaaggtgtaaccatgcaaattcattttcaccaccctcaaatccaagctcaagttaatattattcaaattccaaaaattattaattgcaatggctattgacagtacaccaatatgaagctcaccaattggttttgaggatgcaaccctgaacttgcatgtcttccttgccacgttgtatgtacttgctatttatttcctgcacgcattgaaatgtatcatggtattgccaagtttagaagacaacaaattaagaaggctcatcaaaaactactaaagtctttttgcatgtatcaacttgtgatctcaactctaaaaacaatgtgcttaccactagactaaaaatactagactaaaaactataattaataattagaacataactttttatgctttaaagcattagcctaggtgtcactattcagtgtaactcaaactcacatcttgaaggcaagaagctgactttttggaatatagtgtaaaatgaagttccacatttaatagaattagaaaaatagagtacgatatatataagtgaggaaaaaatccataaaatgaataatacaaaatttggaagcctcatgtataatgaaagcaaaaaaatatgcatcaacacttctatcaaaaacttcatcttttgtaaatctttataataatactatatcacaatatttcttgaaatgcttgtccattttctttacttattttttcaagtatggatttttaagtattttctttgctctctaagtgttggttgtaatttgtatgtgaaaaaagttaaatatcataaatttttggagctaatcaaaagatcatggtcatggtaatttttatatgattgtgataattttgtatgtgtgtggttatttggtacacatatagtaattttgtatgtttgtgcgtcacctatcatttaaagattgtaagaatcatctaccaaatttaaatcctaattgataatattctttaattaagaaaagatagaaggagaatctccacaatattataaataaggaatggaacttctctttttgaaagtagtttaatctttagttttattcatatctttttacgaatttgtgagaaatttgagggcttttgaaagctgaatagtacggacaacaccgttaggatgaatcatgatcattgttcttactattgatatgtctatgtttattttttataggattgttagttttgttctaatcatgagtgactaagccccctaatcaaggattatgatgtaaatgtctaaatgtattcttatccttgttcttaatgaaatttttcatcattttatgttaattaattattttccttggcttaatgtttatttgaaaccggtcatactactcaattaattgtataataatgatcatctgcatataattggtagatttagataaataattttttgtaccaaattgcgtgatcaaactgttttggtaatatccgataaattagttaatctttaattaaatatacttagaattaattttatcatttgacttaattgatagatatatgatcattggagtattaatttaagacaaagaacatcttctgatctcgacttagttgatttttggaatcaacaattaactaggaaagatatttcattgtaatattgatttaaggcacgtcaacttttagcttttcatccttgtaactaatgcatctaaaaataaaaaaatggataaaataatttcaaaaaaaatcttataattagtaactaatggaataatagctaatttgaccaaacacattgctaaacgttcgttcaccgagggccacagcaaaaagcatctagtttgagtgcaaaaagacgcgaatagaaacacatttttataagaaaaattctgagaaaaaatgttatatgtcatttatggtacattgtacagagaggagttgttccagaccctctagtggacactaacataggacgaaccatgcaaattcattttcacgctcaaattaatattatttgaattcaaaaaattattaattgcaatggctattaacagtacaccaccatgaagctcacaaattggttttgaggatgcaaccctggacttgatgtcttccttgccacgtggtatgtaccttgttatttatttcctgcacacattgaaatgaatcatggtaatgccaagtttaaaagacagcaaagaaggttcatcaacaagtagaacagtaatatcagtctttttgcaactagcattgctcaaatcgaactaaatggcccgaggtacagacacaaaccacaagggatggttgattttatcatttcaaggtataacacttcaccgtttcgaattcctccatagacacttaaaattttataaggatatccgtctaggaatcttaccaagggagtttaaaagtatctttccaccatccttgttttgagcaatttgcaacgattttgtccaaccgtgaaatgacctgagaaaatgttggcctgacaataggtgttggatcccaacattcctcaatcaacctgcatacaccatgatactaagaccgttttttaaattaaactgaagcttgaagacataatttaacttcaaaatacactaactctttcaactccggaggataatgttttgttttgatcttgaatgctggtcttttcccttctaagcacatcagtctaactgcctcctccgaggacatgggatggaagggatgtgtaccctctatcatctgggtccataaagataataaataaaatttgttgaatttcaactaatatacaataacatatgaagattagagagataaatttagaaaatctaaatgattttggaaaagctagagttttttttttcatgaaaacagaagtgcatcagtaatcttagggaactacaatgttacataacagacagagaaatgtcaagacaatgttgtcaaattcctcatccttccccctagcccatgcccttctgagcatcaactcatgatctgagctctgtagatttagtgtttaccactaggctaaaaactatagctaatagtttggacataactttttccactatagagcattagcctagacatcactgttcaatataactcaaactcacacgttctgaaggcaagaagctgacccaaagcaataaaaacaagaatctgaaagaaaaacctaattggaaaactaattaatctgatataagaaatcataacatgatgggtgatgcaaaaatctggtacctcgtatataatgagaccaaaagaatatgcatccacacttctatcaaaaacttcatctttgtaaatctccggtgccacgtacaagcctgcaatgaatacagccaaatcattaattgaaccatgaaagatacttttagcaattctaatcttcaaatatttttattagactaacatataataatactataatgcttgtccattttctttacttagtttttcaagtaatgtgcattgaagggctgataagaactggttcagagggaagctaacagaaaagaatcttttattcacaatgaatattggatattacactctcagtgatttcgaggatcactacctccacactctccaaagatcccgacccatcttcctttctgctatttatacattcccaccctttgttagctataactaactaacagttagttacactaactgttttaactactattattattattatctaaaccccctatggtaggtcctctccagctgttgagtaatttgtatttgaatctttaaatcataatggcagattggcagttaatttgtatgtatacttcattcatcattgaaacggaaattcctattgcattcacaaatctaatatgttgaaccagttacaattaaactgaatcttaacacaagaaaatgggacactggaaaacaaaaaaccttcaaataaacttggaaggagacaaaatccaagaatattttttttaaaatacccaaaaacttacttgaaagatcaatgttaggctcaggctgtaccagctttgcttcatcaggtgacattagtgaaaatctcacagtgccaaatccagctatcttcaattgccctccattattcagcaaaatatttctggcaccttaccaaaatttcatatattaaaggaacagtacgagaaaaaatctaattcaaaatgcactcacagtcataaataaacatcaaattgtattaagtgatcttactttggctttaaatcacagtgaataaccggatctggtttgcattcatgaagatagttcatgcccctgctaacaaaaaaatatcaagatgtcttgtataaacaatctggcagaatctccaataaatttataatcatttggtacattgtaagcttagcaagctaagaaaatgaccaaggcgacttttagaaatcaatgaccaaccatataagatataatagaagtaagaaaaggacattaaagtttttcaaagatgatttcacagagatttcgtacagcatagttccttgaaatggttacttgcctggcaatatcaagagcaaaccgtagaacttttgatggagacaaacgccctttcttttgaagatagcttgccaggtcaccctgaaaaatcaacattgatatgagcaaagaaaagtgagttagatacaagaaacttattttgcaaagatacagaagaacatagagggtaagcctaccttagaatggtactcacgcacaatcatcataggtatattctgggtgacagctccaacaaactggaccacattcggatgtcgcaccctttctaataatgtgagttcatgtttgaaagcatttctgtgtgaattattgaaatggtcaaaatttagagccaatgttgagtaattaagtacagaaaaaaaaaaacagctatttagaccataatcaacttgaccagaaatcaaagtgaaaagtagtgatatatgcagtcactcggacaggaaaccagcatcaaacaacccggttgattggcaagaagcatatcatacagacactcacaagtcacaacaaacattttcaattgctaaggtgtatacatacatggtatcaggatttgaataactgtccttgtcaagtatcttcactgcaacctttgtgccattccatttagctacttggtatgttccctgcaaacagattgaccaaagaacaatgaagaactaaacaagcaagtttaaccctaatgtcgaatgtttatagatacattaactcaattcccacaagtatcaacaacttttattatacatgaagcatcagcacattaggtaccaacaattatcactttgctggtattacttgtaataaaccaaaagaacaaaatttaacaggaaaaatgaaagatttggggaaaaatattaaaataaaaataagatagttgccaaaggaagcacggtgcataggtcgcgaaatttggcaaagcaaatatttaatgcacagtagaaaacatcacatgccacattactagtcatgcaaattacattactaaagcaaaatgttacagcacagaatctcaattgaccaatttgaaagcaacaataatgctccctcagagtgagaatagttgtgtcagttgcaagaatcaacatgccttaatttccatgaacaaaacaaataccatgtccaggtggaatccaagttgtctaataagccaaaaaagccataactattgaataaccaatcaaatgtaactaagtgaaagaaagagaaacatacctttgaaataccatcactcttccgaacctgtagctctaacgggttgagttcatattccggaacttcacgaggattcgcaacagtcattggagtcttcctggttttctaaccacgtcaaagataactaatcagtaagtccctaaactgaatccaacatatttacacttacttattgatccataacaaacaaataacgatagaacaataccggcacttttgctccacgagccttcaacatgtaataaatttctgtatttccataatatttggcatcggccgccgcctgcacatccacacatccatcaccacttaacacagaaaatcaaataaattttgcactctcatccgatctcaaagatttgtatgttaaagtttattgatttgtttattgtttacaaattaaactcatcttgataataacaaagtttaattgccaatttgccatgcactttttatattagcaaccaatcaaaggtcagatgaattctttacagtaatcatcataggtatgagtttattgaattttatgtaaactaccttaaaacttaaaaataagttatatctgacataatttttttatcaaatgacaatataaagagtgattattttcacgatgatagtgtcatcgtggatataaacatttttcatcatgagtagaaacactctttaaactttcagcatacagagttgtaaaactaatttctcttttaaataatttttgtaaaaattaacaaaattattatttatgactataacttttttcaataataagataatatatggcgaggagagaggagagagtgaaattacggtgctgccccagcgatcgcgagcgtcgaggttggccttgcggctgagaaggagcctgacgacttcgacgtggccttcgcaggcggcgacgtggagggcggtgcggccgtcgaggtcgatgctgttgacgtcgatgccttcgttgagcaaatcctcaactcccttgacgtcgccgcggcaggccatgaagaggagctgcatggtggagtccaggttctccggcacggtgagctcggcgttgtcggggccggggctgcggcgaatcggatcgagcgaggactggcggccgaagctgaagcgctggttgatccgccgcggatccagcgaggcctgccgcgtgaactgccgcgagaggttcctccgcagcgaacccgacgagaactgccgcgagatgccgcgcttcagctgcgcggcaatgctttccatgccgccgcccagtggagaaggagaaggagaaggaagttgcaacgcaacaaaataaaacttctcacaaatgaaaacaacaaagagcgcgctctacatgttgatatggaaccaaccctgtgcaggttaggttaggttcggttcagttcggttcggttctgttattccaaagagaaaatgaaatgaatcacgcgagggaaacgcgattgcgagaaagaaggcacggatgtctctctctctctttccatcgcttctgaattgccgcaattagacgaggtggtgtgatgcgtccatgtgtaggggtagtttcggttgacttacggggactcctatcattggtttcagagttttttcttctttttttttttctttttctgaaaaaaataataataattagtgccaattatactctgacattataataccccgttatacctgtacgtaaatgcttggacccgaccaatgtagcaaaaactaaaacatttgtaatatttttttttttactctaatctattttataacaaattaatgtatatattaaaataaataaaactttttttttcattttataattgcaaaactagctctcattactaactgtagttaatatgttgttaacttccctacacttttctctatctatcttcaattattatatactagtcgaaagatcgaaatattctgtacttttctatattttttaagatttaaatacatcatgtttttaatttagttgttattataaaaaatatcttgttattttggtttaatatatatactatatatattgcttttttaatctctatcatatttttgttcgttttacattaattccttttaaaaaataagcacacactaaatattattagtaaagctttcaaacagttaattggatcaaatctctatcatattattgtccacttgtttatttttaagctcacactaaatattattagtaatctctatcatattattgtccacttgtttatttttaaacacaatttcaatcctaaactttgaagtcaagcgatgcatgtgtgatatttttcagtaagattttaagtttaaattttatctactacataaaacctttaactagagagttgactcaaatgttgtagatcatatttctaactcaatgacccacgcagtttgactcattcaaactatttttcagtatttttaaataattcgatcagttcgtatatagataatatataatataataataatacatgcaattacagtgtaaagatacttcactctattattcaatcacatgataattatatttgataaatttattattttttaatataattaccttaaaattcatactataaatgattttaatcagttaaaaatatacacacttttacactgaccatgtaaactaaactccataaataatatattttttggtaatttttaaatattaaaataatttatagaatttaattaaaatgactaataatatnnnnnnnnnncatgcaattacagtgtaaagaaactttactctattattcaatcacatgataattatatttgataaatttattaatttttaatataattaccttaaaattcatactataaatgtttttaatcagttaaaaatatacacacttttacactgactatatatgtaaactaaactccataaataatatactttttggtaatttttaaatattaaaataatttatagaatttaattaaaatgactaataatatattaatatggagatgttttacatttcatttaattatacatttttctgaatctgttgattttataaaattattttaaaaaatatatttaaagtaatttctaattaattgataaagcactaacatgaaaattaaactgtaatttaaattcaaaattaacttgctgcaaatataacaataagtctctaataaaactataactaaacaaactttcaaacttaaagtgaaagagttcatcacaaataatgctgattaggcatattagttacaaatgactcgtatataagccaaaaaaaacattcttatatttaggcatggcaacagggtgggtattgcgttctctatccccgcctttgactcaaaaaccactccccaatctcgccctcaatttccgtcagattttaaaatccatctccatctctgtcctcggtatttgattaaaattaaaaaaatatagcttttttattgaaaagattggatgaaaaggctaattacttaaaaaaaaaataacaaactcacattaaaaatatggaatcataatttagaaattgcaaaacataatcaatcaattcaattaaaaaattacaaaataatatatctttttttatttttttaacattatttgttacgaggcgggtgtgggtgctgggcggataccaataatctcatatccgcccccgcttttggctatttgggggaaactcgaacccgaatttgatagactcgattttttcccgttaaaatcaggacagattcgagtgggtatccacggattcgagtcccactgccatgcctaattatatgttgaacttaaataaaagtaaatttaaataattttatcttatttaatattatcattcttaaaatactctttaattaattctaattataatttcagtgactttttttattcatgataacaaagtccaaagaataacattttagaaataactttatttttatatgagattaggaaaattaaggatgtcaactaaaatttttaattagtataaaattagttatttttgtttatatacaaattcaaaggaagtaccttgttgccataatcaatttaaaaaaatcaattataaaacgtatcttttatagtttaattggaaatgtctcataattttttttaatttaagtaaaagttataaataaaaattaaggaaatttataaatagtttttatactaataatatatttttactttatagaataagtaaagtacagaatttagaaaaataaattatttaaatcaagacacgttttctttatcgatgtagtgtgttaaattcaaaattttaaaatcaaatttagattaagatggaaaaatcttaaatttaagtttgcaaaaaaataattatatgttgacagtgtaaaattttttatcatatagtttataatatagaaagggattatattattcaccttcttataataataataataataataatttttattaaaataagtaaaaaaatatataaagcaatttagacaaacaaactacaaaaaaagtttcttattttattaaaataaatgcttagtcaataaataaatttaatcaaatttatcatatactttgtaatataggaatggattatattattcaccttcttataataataataattatgatgatgatgcttttgctttaaatgtttttattatggtctaatttggtgttttgaaagaaaaaaattaaaaatgtgaatttgatacaatgctagctagtactaattaacgtattattttttattaactatatttttaatccctcaaattaggtcactttagttttggtgtcgtaaatttgaattttattttttttagtctttaaattttgaaaaattatttttttggtctctttcacagtaaaaagaacatgtcacaaaccataccttcaaactgtaaaaataatgcagaaaggtctaaaaagttaatttttcaaattgagagacagtaagagataaataaaaattgaaccaaaattaaaaataatataattttaaataactaaactaactaactgtttctctttggatagctccacatgaaactgtcctcttacaagttttcctaaggaataagcctgtactcaagatattttgatgcacaaggccatagcaatttacaagtacatggaattaattggctacccaaagatgaaactaatgaaatcgaaatgtctccatggggtcagcgacgacttcataattaagtacgaattgtgtcgcctctgattagattacatgtgcaaaaatacaattatgtcggcttggaccaacgtgtgtttaaaaataataattactacatgttgataattctggtatacttagtttgtttttttgtttttaattgcatcttggtgacctatgtctttggaattggaatacttgttaaggaattcaatttttaatgaaaaaaatgttttttttattccttcaccatttgctttttttttttctgtcaacaaaaaaaaacagccatttgcttcttcttttttattccattgttcacttatttttgttttctattcttttattacatcatttattttatatgtgactatctttcttttttttttctacctcttttcattacatctgctctagtacttaaggtatctcacaattaaaaatttaagaatactgatctcttaagttgcaaaaaggttaaattagtttatcactattctaatttatttttaggtttgattttgtcttttaatttttttaaatttattttgatcttttaatttttaaaattaattaaatttaatttggctatctaaattaggtcaatataataacaaatcataatttgtgataacttaaaatcaagatcaaatttgaatgatatgatcactcaaattattttagatagtagtatctaattaataactaaattgaaaaaaaaaatgagaggattaaatggaaccaatttttaaaattaaatgatcaaattgaattaaaaaataaataaaagaccaaatcaaaagttaaaaataaatcaaaggaaaaaaaaaaaagctaatttaaccttaaaaaaatcatttaagtaacttttttcccaatatatacacgaaccttaaaaccaatttttaactacgcatgcaatacctcaaaatgaggcctacatattaatcacttctcacctaaaaaatggaaagataaccacacgatagtccttgtaggccaccgcatactaaagcattaaagagattgaaggtttcctttcttttttgcaagagacaagaagatggacacctatgcaaatgtcattttgtgcgagtatcacatgatcgactcattttttgtgataaaataatatatttagtagtcactctatttataattttgtctttcttatgtctttttttttattaattttctatttgcctcgtctataaatgtttatgcgtgtctcttaagaatggnnnnnnnnnnnnnnnnnnnnnnnnnnnnnnnnnnnnnnnnnnnnnnnnnnnnnnnnnnnnataagttacaaacttttagtatttaaaaagactaaaggtatggattgaattgagattttataagatttcaaaatactttttgttataacaaagctttgcgtatctaataatcttttaaaataatataaacaagtattgtagtataccggtacttaatcacgataaaaataatttattgaaatatcaaaattggtgatatttaattgacacttttataatttaaaaagaagtcttctagtattaaaaaccatataaattttaatggattttgtatactttttttagtgatatataaatgtcacatttgtccaacaatcacattcaaattcctaagtctttttgtcattgccatattttattttctttaatcacaattttttttccttgaaggtggtataaaatattggtacaatatttgatcatttattttttcccaatagtaaaaaaaactttctactatttttgtctttaatcaacttgtttggatgaattaaatgaatgtatcaccaaaaaagataatgtaaaaaatatataaagatttttggatacttgaactttttggttgcttgatcaaaacaacactgacaatcttttactttgtaggaagtatattatgaatcgattcatttataaaaagagaaatattaactccaacaaaattaaagttgctacttttgacacgcacagtatttgaaatttggactagtttctctttccatttggagagcaacttggtaggttgcatttcaaaagtgagttgtcaattgcaacaccggtttctcttacagtgcagtggaccctttgcattatattttattaaataaatgaaaagttgtgtctttaaaatattgtgggattcattttgagaatctttagtgaattttttgattgagtaaattttgattggattgtttagagtaagaaaataaaaaatatgatgtgatattatagagaatggtgaaatattattttaaaaaatagaagctaaattttgatggatttgttggttaaaaatgttctaatggtagaaagttttttcttgcatttattttaatgtgcatgtcagtggataatgtcagaaccatattgacacacttttttaaatactttatgtaattaattgaaatttattaaaaattacaaaaaattaatgaatctcacattttatttaatttaatgattctcacttaaaatgtattgctaacatcctcttataaaaatattttcccgttgtgttctttttttttttaaatgcaatcacgttgttgtgaatcaccattgtggttgtgcatggcaatttaaaaacattgcaatgaatagtatattcaggataatcatttctcagcccttagtgtcatagtggttgttaaaagatgactttatactcacattggtttttgcaatctgagaatccaacttcaaggtaaactgtttgaagacacggttccatggtatagcaattccatggaaaattgcccaaagttcagcatacagagcaaaaaccaatattagaggcataggaaaacactacagtacctaaacactcctcccacacccacagcatctttcgtccttcagataagcgtcataattcagcttaaaatgacccgtggaaggatgaatataccgaatgaaaatgaaaatatacatacgatattggattatgctataaggtgatcatagaagaaaattgttaaatatatttaatatatatatatatatatatattaaatattaatatgtttactgttcaacattccacattatatctaatagcgtaatactgtttaacactcaatacgaaacccttctcttttaaccccttttaccttcaacaaaaatgaccagaaggatgaatatacccaatgaaaaggaaaatgtaacatctcactccaacaactttgaataggggactcgctcacgttgctacaaaatttccgacaaccccctgctttgaatctacggtgaccaggaagagcatgatgtagggttagagtttaatttttatttccacgttacatcatttattataaatataactggggatggggttgtaatttttactttaaagcacttaaaaggtattcaaaagaatttttacgaaatttattcgaacttacaaaaataacttgcgattcttataaagtagtatttttaacttattttgataacttaataattaaatttgggaacggatacacttattttagaaatatgtttttgacactcatattatacttaaaattaaaactaaattgtaaaataataatattttatttttataaaaaattatgaagttgttttactataaataaattctcaattcaacacttgaattaagaatttcaatctttataaataaaataagttaatcaaaatgctggaaatgattattaggagaatcatattcaatttttttgtaagtataattttttagttaataacaatcacgtaataaaaatcaattaatttctgatctaatagataatttgaggctcatgtttttttgcttaaaaaaacaaaacaagttaaacttcctcgtaaatcatttcccattataaaattgacataattgaagcttaataaacattatcaatttgaaataatagtagtaacaaacgatctttttctaacattacaaaaaaaaaaacgaaataaaaatcgccgcagtgcagtgaaagcagtagtagaagaagaaaacacgagttacgcacaaagacacacactcccggtgccgccaccaccaccattgctttcagtctccgaatggcaaccactctaactccaattcaaaccctcaaattccgttctcccaatcccaaacctctcttctctcccaaacctccttccatctccacacctcacaccttccgcgccgataaactcactctctccgtctccgccgccacctcctccgccaatggtcctccctctcccccctcccccgctcgctcaaagcacgtcctcctattccattccctttcactcctctgcgtccgattagttactgttctgttctgttcctattcattactaattgatgattattattgacaatgcagggttcgtcgacacacgatttccgtgttcgtcggcgatgagagcggaatgataaaccggattgccggcgtgttcgcgaggagaggatacaacatcgagtccctcgctgttggcctcaatgaggacagggcgctcttcaccatcgtcgtgtcagggaccgataaggtgctgcgccaagtcatggagcagcttcagaaactcgtcaatgtcttaaaggttcaccgtctttttcgtgacataccaattccgtataactatcgtttttattgtgtgtttttgtgagatgccatgtggagaaagtgtttgatagtgaaattagtgagagaatgaatctgaaggaaacttgttgcttatgctggctaggttgaggatctttcgagggaaccacaggtggaacgtgaactgatgctcataaaagtgcatgcggatccgaaacaccatgcggaggtacctgcttagtggtttgtggttgttgtatatgtatgcatctgttatgttgtgtgtgtgtcttattttgttgattgcttctatttgtttatttatttgtttctgctggaatattctcagttgaagtggttggtggacatcttcagagctaagattgtggatatctccgaacattcggtgacaattgaggttattgctggacacctttaaatatgttttaatttttaatttccatgttttagtgcatgctctgtattcatatgtactcaaatcaattggattgtatttgtaaagtggagaaaaatatcattgttgtttcattaagataattatttactattggaggtgaattgtgttatgagagtatggtacagtgccttgtaaacagctcatcttgggaatatactacatgtattcatatactcttcctttcattgcataaaataataatggtgtagttacgaaactaaggttggagtatgactatactgtggttgacttgttggactggctgtttttatgttattttgttcttgataggagtctttcatttttacataaaataggattttgctcatctttaaataatatcaggaataaatagtgtgatctttttatttctagtcaattattcgaaactgtttggaaggaacagtaatcctttacattagttaatgcgacaatagggtggtagtgtttcttcttttgatatcaattactcaataatgccaagattggtatacaaaacttctttcaggaacataacaactttgatactagcgtcagtgttacttatttggcaaagggatcagaagttgccaattaatgtacacccataaagattgaatgctggactcatcccagaagaaacctagcgaaacagaataatccgttacattagttaaaacacaattgctccacggaattacatatatttaatggtttcataacctctgttgcacatggtataaaataaagctactactcacgaaacagactttaattcggtgtatttcatatttacactaggttcattgaataatcaaaccagcagaccctttgcatttttctattatgattgagatttctggtcaatataataatcaggacactgcataataccaagcagcaggttgagagtcccttttgtgcatatagtctataatatattttattaaaactatgaagcttccaccatataatgctgagcattgtcatgtgactgatagatggaacagaatttgatgaattattagctttgaagaaattacttagctgaaatgataaatgagagagagaaaaacctttttcccttgtgttagagaaagtcggatgtgtgaattgtcaaacatgccattcctaattagagttctgaaaattgcttccttaatctgcaattttttgaacaacattcattatgatgataacctaaacaagactgaagacagcagcatttagtacttggctttttacagaaaaacagtaccatatgacaaacatgctagatgaactgaatgcatcttagactcacctcatctcgagtaggaacattttcaaaagctaaagcttttgctgaatcaaacaacctaacaagaagcaagaaatctaagaggacattaagtcaacaacattgatgatgagaagatgttttagaaataaaacatattattagtataaaatatatggcctttagctttagttttaatctaacaaaaaatgtaaaaccaccacacgtaactgaagaacattcccactcttaaatcaagaattgatgagaagacactaagaatttcccaaggaaaaaagttgttttattaattttatatttgtaataatttaactttttagttaaattgaacaatgtgcagtataaaagcttggaaaaattaggaatacgttgggtcagataattctcatgtatttcttatagttgtcatctatactcttgaggcaatcggtaacctggcatgactattttatcagcaaacattttgccagtcttcggcataacatgccaatgcatagtcaggttatattctttgccacgcaaattgctcccctggacatgaaaaaatatacaaaattgaggcctaaagaaatctgaagcaaatcatattagtcacaaagtcctccgagagttgtatacctggttgatgaagcggtatttatttgatgtatgaatccaaaactttgcatgttctttagagggaatgataccatcccatagggatatctgtaaaatggcatttcaagcacctaagcaacatacatacatacacaacatataccaaagatggaatagatgcagcattatatgcattaaggcacagctatctgagtgatatgaatagtataaaaaaactcagaactctggagcaactgcctcacccatgaaaattcaagatccactaacacacatactatggcttccttttattctttcctttgtaaaaacgagccggcaaacttacaatttaaatgttcatatttcaacagtaaatgcaaacaaactaatcaattcatacctgattcaaggaattcttaggagtttcatactcagcagctagaaaaacaaaaacctgcaaccatacaaaatgacacaaaactaagtcccaggacagcacggaaatttctagcttccaaacagtttaaaaagataattcttggtgataaaatcaggttgtaatcttgggtgaattgttctgctaatgttacaggtaactggagatccagggaagatggccgcggttcaaagaaatttcagcaagtttggaattaaagaaatagccagaactggaaaggttggaaagttcaattgaatacccaacaaatttccttaacttttgtatcttgtccattttgttgagcattatattgtaaggctgtgcaaaatttactaattcgttattattggatgatgtaactatacttagattgcattaagaagggaaaagatgggtgcatctgctccattttggcggtattcagctgcttcttatccagatcttgaaagaagaacacctgttaatgcccttgtgggagcgaaaaatatgaaacctgttgccaaacctgatacacctgtgggggtatgatcttatttcctcttcaactctactgtttcctttctaaacctatgtttgaacacttcaacttgaaaatttaaatgttgtagcttgaaattaaataattggcatatcctatcaaaagtgttaaatttagaaatcacaaacaagcttagtttcctgaagtaaaattatgctagacaaatattgcaaaatggttttaacacttatgtatatctcaaacactattgatattacagctaaaggtcttttctattgaacatcttttgtccatgtgctttggaatatattcttgttacatttatgttgtctttgactctttccttaacatcaattgttctaatttttaagtttatagaatttcaatgattggctaaagaagaacaaatcagtaactattgcaaagaatgaagctaatgctgatataaatgcactccatcactacatgtttgatattttccctcccttctgttctttgatttgtttgctcattattaatttcaaatatagtctgaccgtttcttttgacatgtttgcttgtgtgaagggagatgtttatcctatagaaccatcagatggttttacagtcaatcaagttcttgacgctcactggggtgtcctcaatgatgaagatgtaagtggtttgtagttgcttattgtccttaaatgtatccctttttcttgtttcgttctaatacattgtagatatatgtacattatcttcattagtttctatttgagtttttggttacatatttgaatatatttgttagaaagtatatggaaatatcctataatattttattgagaataacctctcttggtaatagtttcccaacttccttattacctcataggattagttaccatatttctttattttatcataatatgtttccttaattgattatgattatgattaatataaataaggcttagtacttttaggtttatgaacatgtcaacacatcaatacattataatacatctcagttactatcaaccagtgcttcattctcttttatctttcttcctcccttaatacctaaagccccataatcaaacatggtattagagagggtaccgttctccctcttctgtgccttcactactatgtttattgtatgttagcatgtaatattcatcaattttctgaatgacatgcttgtgactgtcttactgttggtgggataattccttcagactagtggaattcgatcacacactttatccatgcttgtgaacgatgctcctggagttctaaacattgttacaggagtttttgctagaagaggctataacattcaggtttcctttttattttattttataatatttgtgtacaaattgcaagcacataagtccaatgttttcggtttctctgttttctcatcttgaatctgctttgttattttcagagtttagctgtaggacatgcagaagttgaaggactttctcgacttacaactgtggttcctgggacagatgagtcaatttgcaagttggtgcagcaactgtataagctagtagagctacatgaggttcaaaatctctttgaaaaagaatgcatcatatcctatacacaaattatttgctttgagtaatatatatttttagtgttgctgtttgcattgtcctgcagcactttgagtgcctgtttaagttttttttggagaaatattctcatacttttgccagttccctgagagaagtttaaaataaaaatgcttctgaaaaaaaaaaaaaactattcccaaacacctactaagtgcagatctcccatcagtgtcctagtggatacagaatttgacatatcaggtttagccaaacatgtgaccctctacaatgtcacccaactaattttttttttttttttttttttttttnnnnnnnngaaaaggctaatgcttgattagcctgaaactgtaattccgtggtatgatcctattatattgtaaaatcagcagtgtgttctaaattgcagctacagtaaggatttaggtgtattaggttaaggaagtcgtcaaagttgttaggttatttctttaagctaccgatttcaacattgagtatgtaatccttgaaatcttcattgatcatagtgaccttcccccttgtttttgcccatggacgttagcctatagtttactgtacaaaccacattaaattcctttctttttttgtttgtgcaccttgacatgactactagcacaggacatttgtcttgaaagcctttgttgggacttaaatattagcagattttgtgtttcctaatattatgtgaataataaaaagagtattctgaaacttgagatcttgcactggtcttatttttagaatctttactagtttttggaatctttagtatagttccagaattcctatcgaaaaacattctatcaaattattacttgaagcataaatccttatcttcgtatcttctgtttctttcttatgtattttacctttgagaatgagattgatatagagtgcataaatatttgaccatttttaatgtttaaaaaatctggctattgcattcttttctgtatttaaactgatatttcttcaggttcgtgatatcacccacttgccatttgctgagcgagaattgatgctaataaagattgctgtaaatgctgctgcacggcgtgatgtccttgatattgctagcattttccgggctaaagctgtagatgtatctgatcacacaataactctggaggtgaattttatgcagacttttcaaccaagtgatatggcatcatatttaatgtcaacttatattgatactcataaacatggtggatactggatacctctactgtggagagaatgttgaatttagtgactatagtgtaattacaaattgcactaaaaccaattttgtttagctaaatgttacattgttactgtgctacaagttcataggattctgcatttttaccagtttaatatctgttggatcatgcatcaagttttgttctaacagccaacgaaaccaccacaaattgggcagggtactagagccccaactggtcctcagtttatcataaagattttttctcggtcatgaaaatagataacattaagctatttatccagcatcctaacattctaagaatcctgttatgcccattgtctgcagctttccacgtccatttttttcattgacatgataagctatcagcaatagaattgcttttcttctcatgttaacaaatataattgtagatttaaataagaattgtaccctaacctttgtaagtaactttatttattcttcttccacattaattaatattaaatacaaaagtggggcactgaaatgacatttttcctcaaaaagtgtaatgtagtagaagttaacaactgatgacactgtattggtgcaaacttctcagcttttcttccaagtcattatttcttccttccaactaggcctatggttattaaaacaacaggctactgcttttttcttaataaggttatgctgatgacaaaaaattggaaatttgattttcatatttatttatttgcttcaaattatttgctagttttgaaatgtctgccatgatgacgtctgatttacagatcctttattattttcgatttttaactaattgatatgcttttgaaccagcttactggagatttggacaagatggttgcattgcagagattgttagaaccatatggcatttgtgaggtatgttttataaatttttttcacttaccatagtagatattttgctgagacagtggacttgtttaaattccttattccataaacttccagagtcgaatttggtgcatttacttcctcaaatgtatctcctgattctgtccaagattgtttactcagttgctattattttgttctgaggttttcctttgttttatgggtcagaatattcatactggaggaaagaactcagttttgctggtcttggctaagatgtccttgttttcttttgaagctctgtagaggataagaataggatgagccccctacacaggcagttagctgagtcattcttacacgtcgatgttcattttttattatctacaaaacacaccagtagccattattttaaaaaccaaattagggagtataacagtcaaagaagagggttaagaattgcgtttcaaacagaatttggagtacatgtattttattaaaatataaaaataacaaaatacatcagaaaaaatgaaaaatataccacaatgaataaatataaatttataaatattaaaatttagttttttgaataatttttcactatatatgaaatttggaaaatccttctcaaagtataaacgagtttctctgtagaacaagcagaggcgtattcacctttaaattttactatattatgatcatgatgcactttaaattcaatcaaagagtgaatattctggcaaatgtttactttgaaccttttccttaacattttgcttccttttagcaaaaggaaaaacaagctggccaccgtgcatgctatacttggtttggttctcttagtgtgctgtgcttcatcctaaaggttcaagattcaaattccattaggaacaagtgggatgtgatactcttatcctctaatggactaaagaaaagactgttaaacacagtcatttaccaaacctgtgctggatcaacactcaacagtttagtgctgaaccggccagttgtcaccagttcaaggctagtgcagttctaacatgtaatcggacacaactggctggttcagtcttgttttaagactatggtttttgctcatgctcctattgcaccggcactctttactttgaattcagtctttctgatgtttcttattgtttcaggtggcacgaacagggcgaattgctctagtccgtgagtccggtgtggactccaagtacttgcgtggatactcttatcctttgtaatcactttcacctgagtggaagaaccatcaaagtcttaggattttagagcttgtactttctcttaaactttgcctacggattcttgctttctgaactataatgttaagtctttcagtgatttgcaaatgtaggcttgggatgacattgagattaaaaaaaaaagttttcctccttctctcaactttgcttcattttttggttgaattacagtctactgttttgtgtagggacaaattttttacatgtcaaaatatttatgtttcgtacttggatgttgtctgttcaaaattaaattccttatattaatgctatcgagtcctatgttgtatgcattaggacattaattttattgcttatgcaattgtgatgtttttaaacatatcagtaatattttctcgtattgatttcttatgtttttcgatgaagaataattgtcttatgataataccaagttattaacattgtgttatttatatctatcaatacaaataatggaaggttccaaaatagtcgatgtattattaccaagagtaataaaaattattaattgatagtgcaggattttatgaaactaattgaaaactcacttcgacattcattgattgagtcaacaattttttttcagagtttttaatgtgcttttattcataaggtcttttaatgtatattgagtcaaatattagattttgtgtgataatatnnnnnnnnnnnnnnnnnnnnnnnnnnnnnnnnnnnnnnnnnnnnnnnnnnnnnnnnnnnnnnnnnnnnnnnnnnnnnnnnnnnnnnnnnnnnnnnnnnnnnnnnnnnnnnnnnnnnnnnnnnnnnnnnnnnnnnnnnnnnnnnnnnnnnnnnnnnnnnnnnnnnnnnnnnnnnnnnnnnnnnnnnnnnnnnnnnnnnnnnnnnnnnnnnnnnnnnnnnnnnnnnnnnnnnnnnnnnnnnnnnnnnnnnnnnnnnnnnnnnnnnnnnnnnnnnnnnnnnnnnnnnnnnnnnnnnnnnnnnnnnnnnnnnnnnnnnnnnnnnnnnnnnnnnnnnnnnnnnnnnnnnnnnnnnnnnnnnnnnnnnnnnnnnnnnnnnnnnnnnnnnnnnnnnnnnnnnnnngtaacaaaattcataaaatgaaaaaatttataattaagcctaatataaatattaggtgttaagttaaccaatgaactaaaatatgatcaaaagtgaagagataaaatttgcaaaaataatgataataacagacaaaatgcaatcaagtcaaattaaaaatgtaattataataaaataatgattaaataataaagttaacagtacacatttttactaaaaagtataatttaaccctttaatgtttgttattttaatattattagtcttaaataatctttttggctaataattaagttttaattattattttagtcttttaagattttaaatttaattttagtatctactatcaagaaagtaacaacattaattcatacataataaaattaaaataaaatccattgacttatcacatcacaagacaattatgtaattttgttatattaacgtttttaaatcctggtgagtttatcatcatttaacactactacttaatagaaactaaaaaaattattcaaaaaattaaaatcaaaacaaaaatattttaaatgactaaaatcaaaacctctttttataaagactataaggttatttaagccttcttgttatttataattttttacatatttgaattaaaatgaagattaataccaacccatatgaatttcaactaacgaaagataaaagtttccaaacacaaattgccagggggatgaaatggttggagagacgtgcaattaacatttaacaacatgaaaataacactacattaccaaactaaaaccactgcagcagaaggcaatgtatgaacacacaacagagcttctagacgggaaaaagttcccccgccacacaaatcttgtcttaaaaaaagaaaatatttattataaacgttaataacattcgttgtaagtccatcattacggaacccatcagcaacagatcatcaccgagttttctttactcttctgcagcactagcagcactaagatccacactgaggtcaataacctgttcaacattaggagtacaagaatcagcatgttacccaattaccaagaaagttatccagggaatatcatcaatcgtttttcaagatttcccatgcccaaacaggttgctagtccacccataaggtttctgattactcaatggtattaatacaatagcaacaaatacaaaatcaactagaatgttcaatatttttcattcaccgccattcttcaatcaaattattaacgagtctacacttagtttatttataagaatcagaattcacgaaaagcaagcaaccgattttggaatatataaattttcatattaagaaaaatgattggttaaagaataataaaagatcattttattaataaattacatcactgaaactgctaaccatcaaatttccagtgaggcatccattgtataaggaatagaaagatgagaaataaatttaaaattcattgtataactctacaaaacgacaattagatatccaactcattctaaaatgatcaattaaaatttatcttagccattttagcttttgggagtggggaagaagagaatctaaggatatttttaatttgagaaaatgttctgttttcatttcttattttcacttttaattacaaaaatgtcacttttaatctaaggattcctacagtatgtagacttataaatatgtgatacaatattataaaatacagtactattgtagaacaatctcagtcactatttgtggctcacaaattaattcaagaagtggaaacaagtggtaaccaaggcataacacttacctttccagttatcaatgtatacatgttgagaacgtcatccacagtcgactcaaagtgagtagtagcatcataactctgtcaaaaagttttaaatgcggtattgtcaacctatcaacatatggcaaaaatattaataccaccgagtaaactcactgttgatataaagcagttgtccaaagtgggttcgttgaccggttcatatctgtcatagatatcaaaaaatatctcatcaacaggtcctagaaggtcaattccaggttttagttcaattgccggctgatctgtctctgcctcggttgatacaaatgcaataaattttccttttggagcaacattgtgagtatacgaacaacaaaataggtacctgaccaggagaacagaatagagcattcaatttaaagaggaatacacaatttacaattgattggacatcgcatgcacaaaatattagtaattttttcaagttttaaacatcaaatcatcttagaaattttagtataccttctgtattggggatgattacaaaattaacagtcctaaccagatcatgagtttcatggtattgtttactatgtttaataagaagagtttaaaatcatacatttataattagtatagctgaaaaaggacgaaaagaaaaccaaaggacaacatgacgggagattgatattgatatgtaaaacataacacatacctaatggtcatttatactaataggtctaggtcaatttagtagttaataatgcaatacaaatagtataaccctgggtccctggcccaataggactgttaagatcatgagactccgaacatagaatccaaatattctaaaactccgtaagctaaagcttgttaagctttataaataaattagaagcatacttgtatttttcacttgtcagcttgacagctcagtgattttatctgtatcattaaatttttgaaattctcttattagcaatttctaaaataaatgaaatagaagcaaacttatttcatgctggaaccatttgataattcagatgagactgaacaatttagcttcagtcaagaaaccactgcccacgctaattaatggtcccagtagcacgatatatattgtatcggtattgcaaaattttctacaaatttaactatatagatatatgtatatttaatatggtgcatgtaaacttacatgtctgacttccgacccaactgtttctgtggtaaaataatttgcaccgaatgggaatcatcagtgctggggattgggtggctcatgatggctattgcccttgcaaccctaccaaccttcctcacctgttgaaatgattacaattttgttttaaagaaggacgcaggttcccatcaagagtcatttaagcaattaatatcagttcacctttcgccaataatttttttatcaacagtagttaaacatccttcagaaacaaaactatttacatagcattactcctagactttagaaggaagcaattattcactttcaccatcatctgaactggttgcaaataatcaaactacaggttggtttctaataccttgccggccaaatatgatggatcacaaacaacttttttgcactttgcagtctccccttcagatgtgacaccaacaacctttccttcctcatcaaactctacctggcattcaagcaaaaaattaaaaatccacaagagtgtatatcagcatacagttcaaacttcaaaacaaatcaaaatcacatggcaattatagtacaaaaatagggatggaaataaacacaagttcaataatttaagaaggtatatatattgggttaggatatactgacagtggtgtatatcaaattcacaatcaattatacaccaatgaataaatttttcaaagttagccttaattcatgcaattaatacatttttcaaagaaactaaaacatcaactacttgatgaccaattgacagcatgattttattcaaattttcaaaaatacgacattcaagatctaaataataattatagttcgaagactggattaataaaaaaaatcctattgaagttgtaattatgcaagtgtgccaagtcttacactagtgtcaattgagagatataaacagagaaatgtgtgtatgtatgtataatagagtatataccttgcactcaggcttattcaacatatatgttccaccgtaaacagcactaagccgtgcaaatgcctgaagaaaaaaaaaataattaacgaaccttgagcaaaacaaactccaacagtatattccagaaaagagatgaagcagatgggtagacatgtggagagtgagatacctggggaagctctcctaaaccatacaaaggatatatgtacggtgaccctccttgaaagcgtgcaagagactctgcatataactacaagtaggaaacatacacatgaatattaaatagggaaacacaataaagctaatgggaaccaaatggaacagaagaaattttcaattaagaagaatccacgactgagcatgaattacaagtgcatgataacccagtaaacttaccttcattctcttcacagtgtccagtgctggctcagccaagtagcgatcatccctatgaagcgccaaagcatgaccaatgaagtctatagtgttatcatcaaggccgtattttctgtcacacgtcaacaaaaaaagcaaaagaatcttcaaaatactcctttttcttctcattagtcagtacagggatcaagagatatagggaaatgtatgatcatcatggaatgcaaaataaatttgacgtgtaactacattatatatttacatacaaaaaatgccaaataagagtaaataatcaaatgctaagaatttgaactaataaatacatattgactccctatacaatataagaactacagaacagaccataaaccatacacttacattttactaccaactttacatgactgactcatgtagcagttcagacaaatccattatatataaaacacaaatataaataaatcaaaatttcatgacattattgataaggacagggaaaagggcaaggtaattactcctaaaccaatttctacatgtttatgcagactatgaaggcaacacagatgctgagcctgagatgttaaatctgcataaataatggacacggcaagaaaacaagtgcacacatacgctatcaactctttagtagtcactcttgtcaagtccatcccctcgtgggtcttgggatcactctcattgtagttttgcacataaatgaaaaacttgcgtgcacggcgtttttcaaatagccccataagtggggacttcaatgcctccatgtcgtttgcaggcaccttatgaacctgtaccaaccccacaagcaaaaaaaaatttaaaacatctaaaccaaaagaaacctcccattaagatagacgagcaacactaacacaaacatacctttcctttattaaacacatagctcccatccacagctttgaaatagagatacttggtaacatcggtatgaatgagaacccgcaccaaattgccattagccataataaactagaagaaaacaaatcatgaaataataatgttgcacaaattgagaatcatatcatatgcatccagatttagtatagcaaaatataataaaataaaaaacaaataaataaattataagaccttagggttcatatcgatgttgtagtccctgctagcgcccaaatgtggaggaggcttgtcatctcccctgaatctcttccaaagctgaagaggaggacagagaaaatcatcatttcgcagttcaaacttcgataataacatattcttaatctaatattattatttttgcagaaaatgaaaataataaagaaattattaaaaaaaaacctgaataagattgagcgaagtggactctcctccgtaatagtcattcctatccatatgcagaacctgaatcgaacaagaaatagctattagcatgcgaggattggatcgattgagaagaaaagaaaaacgaaagtgatgaatggaaatagtaccttgaggccatcgacggagagaagcccgctgagaatgcactccttgagacccgtgcccaacacgatcacatcgtactcctcatccatgttcgatcgatctcgatctcgccgaaaacggggtttagggtttccgaaatgagaaagaacagcgatggatagacagaacaacacaacacaaaagtgtgatttgattggtacgagagagaagagacaagatgggaacaaccgcaggaacaagtaaagaaccggatctagggccttgacctgcacagcactccacactttaaaaaaataaaagaataatagtaataattaatcgctaatgtaatgaaatgatatcgcgcgacactttcctcatccctgttactgttattatcaccgtgcccctcaatttcgccatgataaatacagtatctattttagtgcctaagaaggcgttccatacggggagaaatttttgatatagttgaaaattagcacaactccaatgctaagagtttatatgggttttttattgagttttgatggatactttttctaagatatagtttcttatataagaaactctacttaaatttaagcactccaaaagagaaaaaaagttaaaaaatgatgtcaaatcaactaagaaattctcctaaaatactgagttggagatggtattatgattttagaaaatcatgaatcctcaaatatttatttataagagtttataacaaatcttaattttttcatccaaaataaacaaatcatgtgatttttttccatattcgatttaactttttgaacataataaattacaaagcaaaatataatactagttataaaaaaaacagcattagcaagttatgagaatacacgttagatgatatgtgcagaaataaaagatttctggttgagtctcaattttataataattactttcatgcataaattttaatagataagataagtttcatataaatcaatttgtcattcctcaataatcaaaatctcccaacacgtttgccagcaagtgtaattaagtttgtagatctttagtatggaaacaaatccttatttgaccagtgataatgattatatttgtattaataatgaaaaaattgaataaaacataatgagtgtcatacacaattacatataaaaaagatatagtcaccatgagtcaaaatgtatgtgttcataatatataacaaatataaataataataaaaaattactgagaagcatgagaaaggagaagccacttatacataacaatattattaaatattattaaaggttacaaaatgttgtacataaatgtttatattgtcttaaaaacaaagagaaaaaattatgagtaatagaagaaaagaaatcaaaannnnnnnnnnnnnnnnnnnnnnnnnnnnnnnnnnnnnnnnnnnnnnnnnnnnnnnnnnnnnnnnnnnnnnnnnnnnnnnnnnnnnnnnnnnnnnnnnnnnnnnnnnnnnnnnnnnnnnnnnnnnnnnnnnnnnnnnnnnnnnnnnnnnnnnnnnnnnnnnnnnnnnnnnnnnnnnnnnnnnnnnnnnnnnnnnnnnnnnnnnnnnnnnnnnnnnnnnnnnnnnnnnnnnnnnnnnnnnnnnnnnnnnnnnnnnnnnnnnnnnnnnnnnnnnnnnnnnnnnnnnnnnnnnnnnnnnnnnnnnnnnnnnnnnnnnnnnnnnnnnnnnnnnnnnnnnnnnnnnnnnnnnnnnnnnnnnnnnnnnnnnnnnnnnnnnnnnnnnnnnnnnnnnnnnnnnnnnnnnnnnnnnnnnnnnnnnnnnnnnnnnnnnnnnnnnnnnnnnnnnnnnnnnnnnnnnnnnnnnnnnnnnnnnnnnnnnnnnnnnnnnnnnnnnnnnnnnnnnnnnnnnnnnnnnnnnnnnnnnnnnnnnnnnnnnnnnnnnnnnnnnnnnnnnnnnnnnnnnnnnnnnnnnnnnnnnnnnnnnnnnnnnnnnnnnnnnnnnnnnnnnnnnnnnnnnnnnnnnnnnnnnnnnnnnnnnnnnnnnnnnnnnnnnnnnnnnnnnnnnnnnnnnnnnnnnnnnnnnnnnnnnnnnnnnnnnnnnnnnnnnnnnnnnnnnnnnnnnnnnnnnnnnnnnnnnnnnnnnnnnnnnnnnnnnnnnnnnnnnnnnnnnnnnnnnnnnnnnnnnnnnnnnnnnnnnnnnnnnnnnnnnnnnnnnnnnnnnnnnnnnnnnnnnnnnnnnnnnnnnnnnnnnnnnnnnnnnnnnnnnnnnnnnnnnnnnnnnnnnnnnnnnnnnnnnnnnnnnnnnnnnnnnnnnnnnnnnnnnnnnnnnnnnnnnnnnnnnnnnnnnnnnnnnnnnnnnnnnnnnnnnnnnnnnnnnnnnnnnnnnnnnnnnnnnnnnnnnnnnnnnnnnnnnnnnnnnnnnnnnnnnnnnnnnnnnnnnnnnnnnnnnnnnnnnnnnnnnnnnnnnnnnnnnnnnnnnnnnnnnnnnnnnnnnnnnnnnnnnnnnnnnnnnnnnnnnnnnnnnnnnnnnnnnnnnnnnnnnnnnnnnnnnnnnnnnnnnnnnnnnnnnnnnnnnnnnnnnnnnnnnnnnnnnnnnnnnnnnnnnnnnnnnnnnnnnnnnnnnnnnnnnnnnnnnnnnnnnnnnnnnnnnnnnnnnnnnnaaaaaaaaaaaaagaatattaccttcaagataaaaaaaaaaacattttaaaaatctcccaattttaatctaaacatgcacttataagatcaatatcctaagggctgcattttagaagtttaagttgaatatcaactttttattttgacacataaaacatcaaccccataattgtcttgatcgaaatttgttagatggtttgaactttaaattttgtttaggacaatagttatttgtattattaaatatgtaaagtgttgataaatctattaattaaaatatgaaaatttaaattttagttattaaaaatgaaaaaaaatgtgataaatttatcaatttgttaattcatgtactttaccgttaataaaagaacgtacatgacacataagaactaaaatgtctcaaaaattattaccaactcaactatggaatagataaaaccaaaatgttagtaagttttcacttgatcaatttgtcatattccaaatttcgtaatatatcttatgcttttaagtttttaatgagacttaaataaaaatgcaaaattattaagtcaatccttaaaaaatgagatccaacttctttttttttttcactatataatgttgtcacaatatttaaacactgaatcatggcaaatttttcaatcacaaaaggggcgaaaataaaaattaaattatatttttcctttaaattaaacgaaattgaagtatgaaaaattagtctaatagaaacttattgatattttggtctaatgaaaacttactgacattttgatccaatagaaacttattgatattttgattcaatctattcagcaattatgttgacaatcatttttgtgacatttttgtttttctatgtcacgcagactcttcattaacggtaacttacgaaggtcaacatatggatgaatttgtcatacttttttcactttgaaaattttaaattttaaatttttatcttttgaagatgaatttgtcagcactttatatatttaataacaaaaataactatttacttttagcttatttaacttaacttaatcatagctcattctagacttaaacctacaaaatctagttgaaatataatgatttatttgaaatatattacggggaatagagtcataattatctaaaatatatttacaagtttcctaatgctagtcatatcttatgaaaaaaaaaatgttagtgtttccatggaaagaaagcaaatgagtccccttataattactccactttgacctaaaaaatgtcaagaaaagtgaatcttcgttgttttcgagcatgaataattgttgttgaatactttaacaagaactcacattaaaaaggaaaaagaaccaaaaaaaaaaatgcttaagatactataaaaattctaatgctaaaaacgacaaccaaatatatggatggcatgataataaaaatcaattctaataattaaaatacaacttgtatggccattcgtagtagtaaatcacaatcaagagatgtaaaatccaccaaaattttatccagtaaaatacatgaaaatgcaagtcatgtgagacatctccatgtagaataactaatacatatcgaagcaacgatcaagataacatgttcttatccaacaacccaaatcataatgcaatttttttgtaacctcgtataacgcataatacaattgtatcataacactttaccactaatcctgagagttgttacgagaggtttcaattactattacacaacaaatgaacctttgttcacacgtagtgttttgtacaatgcatcctcaatgtctctcaatttatcctactttttccatcttataataaatgtcgtgtaaaaaaaagttttaaaataactattattttaattatttaatgtaatattaatcacttctttctattaatatttttaataaatgtcattttagtttttcaatataatattaatatttacactcaaatttaatttatttatgcatattttttaattggtctaggtaattagttagttagtttttagtttaataaaaagtgaatacattgaaaatttaaaaaaattaagaaaaaaaaaccataacgatagatatggtaacaaattttgatggtttaaactttaaagtgttgtttcacataaaaagaaattgatttaagtaataattattgatttgagtaagcaaaaaatgaactgaaaaatagagaagttgatatcaatatagaacatgcaaacaaaataataaaaagataaaaacacatcagttagaagaattgaatatggataataattaataaaaaacatgaaacttatggtgaagtttattttaatatatataagtttataattaattttgaatttgcatatagttcatagtcaagaattccttattctatttctactttttatcggtgttttgtgggttttagtccccttcacttccatgctacatggtaccaaatgatgaaaaagtaggaatatatgataaaaaaaatcttcccaaaagatgtacaaggaatcagttttattataaacatttttcagtcttttgaataaacaatttgtccataattttgatttttatgatttttaacctggactgaatttgtattgataaaaataaattaaaaaaatattatatatatatatatatatacacgttaccttaaaaatatgtccttccattaagtatatattttagtatattttaatttctatacactgtttgcaatatttgtttacattattaatcaattacaaattataataatataaattaaaaataattataataaaatttaacaaacttattttatataaaattgtatgattgaataatagtatgaaaatacattttatattactaattcatgcactatttattcatactttaatacaaaacttatgataaattacaagttatatttgaatacacgtttagacaacttccaacaatttaaaattacttaatttttaataagagttatcgtcaaatttttattttttatttttataatgtacaaagaccagagacctatattaaaaatacaaaaaacagactttttattatttatttaaaagaaaaacagcgtcttcttcgcattaaaattaacccgcgatatcgtgttagtgaagagggagagaggatccaaatccaagtacggttgggttggagagaaaatgcgtccctgctgaaaacaccaaaccctaaaacgcgtaaaaggttctaaaaatttgcgaaggaaagagctagcggagatggagattcactacagtaacagctatttcgagaggcgccccatcctcaagtccaaggctcccgctgttaaatgggtcaaagaatggtattcccaatttcttcacgctctcatattttgcatcttatgttttagggatttcaatatcgcggaaaattgtcttgtttgtaacgaggctcaatttatagtcatagttccattattttgttatgtttcaattactcatataagagtaataatacgaaaatattgttttacaaataattagaattcatgaacatgtttttattaaaaattaaagcagtacacatatatattggagttataaatttttcctcgtgaatttgtaccatttcaaacagagatttgctgttaattaataaattaaataactaaaaaagttaaggaataaaagacaaatcaatcagtaattcgcgtgcattagttttctttgttaagtgttagtttgttagtttttttgtcaggagcgatcaaatctgtgaccttttcctccttcccttctttcttaaccacccaaccaaccttatatctactctgttattgttaattactgtgcttatcgaattagctttgagaatctggttggtttttatgtttagatggaggagtatggaggggaaggagggggagagtcactttttcatttatactaaaagctttcttagtaattgagttttttttttttttaatgagtggaatgaaattgtaatcagggattatcatgggaccttgctaccattcttattatttttataaacgttttacaattttctcgatttaggaatgtgaatgaatggatataatgtgtttaaggttagtctttccatgttgctgttagatggagagatcaggttataatgttttagctggccatgtgcagtttccattcttttcatatttcatttggttaagtgttatgctaatcatcagatgctgccagggttccccaagatcttgtgacgacgggagggaagtgcatgatcttaaaatgggtaacaggttggtcttttttactacccagcaagcttacatctttgctcattcctgcccccatttggccattctttgtctgtttacatctgtgtattttattttatttttttaaaaattgattaatgctactgtttgttttagcttctataatgatacaaaacttggtagaaaataaggggaaacaagatttgagacagaatttaacatggtgtaacctaatgactaatatgcattgttgacatgagataatcagttgtttggctgttttttgctgaatttgggtgagaggtggtaacagtttgtacgtctggagagatagaagttatagtatcttttttaatacttaatactaattcaataaacaaaattgttgtaaaacatgcaaaaaattgatgtttaggtgctttgctaagaggaccactgtatcatatgatgatgttattatatcatgttttgtatcttacatttctctttgttttactttcctaagaggataccttgaagaccttgaaagaaaaggtgaaagagccttcagtgccagagccagaacctgagccaactactgaagtactttttctttgcagctatgatggctgtggaaagacattcatagatgctggtgcattgaggaaacattctcacatccatggagagaggcagtatgtttgtcactacgatggatgtggaaaggtagtggttttaatacttacagatgcacaccgatacacatgtattttatatatattatatactatatatttgccattgtattgccaagttgtgaaataatagttttcattactgcatgctgcaaaagcagatcaaattacactttgttttaccagtctcttatccagtgattagcctaatagcctatagctttaatgaaacattgtgttgatccctctcaagcataaactctgtttttctttcatgccatgaatatagatttttgcatgtgtttgcttttggatggaagattacatgtctatcatggggggcagggttaggtaaagtgatctaagagctgcattatatttgcagacttcaggtattggcatgttatgctgcatgattggagcatacttaattaaaacaaatcattaaacctttttaattggtttatatttttttaattacactttatttatttatttatttaatgctatgtatcaagttgcaatagcttgctgtggactgtggtttactcaaatagcaggtctatttagcagtgctgaaagtactttgtttacattgcagaaatttctggatagctcaaagttgaaaagacattttctcattcatacaggggagagggattttgtgtgtcctcatgaaggctgtggtaaggtgatgatttgatccaattaagggtttgttgttttctatgacggcttcctttccctagttggtgttgcatgttctgtgtgttgttctttatggtttacacatttggatttgtgacatagtcaaattagctggatgctttccatctatttcttcctatcacaaagaccaacatgaattcagtcttcaactgtccactctgaatctgttttggttggaatgtttttctcaatggaaatttggaattaccagagatattcaagcagcaaagcttgagttcttaattgtgagacatatgtgtacatagtctttaaattgttgatatagagggtaaccaatgaagttgtaaatttttcaaatttgaatcaatatagaccaaatgttgttttatagttgagtatattgtgattttcataaatctgtcatgaactctctctctatacacacacacacacacttttgattggataaattactttatgtatgatatcatcttcaattattatccactatttcattcttgggtaagttattattagtcttttgctttggagtttggataatgtctttatgagtgtatgtttgtaatcacatctgctgcaggccttctccctggatttcaacttaaggtctcacatgaaaacacattcccaagagaattatcatatctgcccatatccagattgtggaaagagatatgctcatgaatacaagctaaagaatcacattgcatctcatcatgaaaaggttaggtagtgtttcctatttgtgtagctggtacattttccttatttttttaccactcagtctattaatattatgtgatgcatgttattatgtaaagcatacctgttgttttagtccatccatttggtgtttgtgcggtagtttcatttggtttgttagtatatctcaatacaaatatgtattatttctctcatgtatatcatgaatatctgtataaagatgtctctaatttgaaactgatgaattactccagtggatgtgactcagaaactgtaaacatttcttgaacagtcttttgatttgcaatttcaaccttatcttacagaatgcatccgtggatgtgacaaagtacactactccaccttcagagaagcaaacaaaaacttctaaaccatctggaggggcatatggttctgcatcatctgaccgtccctatgcatgtccctatgatgggtgcgaaaaggcatacatccatgaatacaagcttagactccatttgaagagggagcacccggggcttatggctgatgaaaatgcagagcatgctcaggctaatgttgacaatgaaatggatgaagcaagtgaccatgatgcctatgttgcgaaacgatcaaatggtaaaattcagaagcagagtaagcctaaaccaaacctcaagttgcctccttccaaaattgcaaaacgcaaagtgtccactcccactttaaatgtaaataaaaattcttggcctgtgaaagatgaaccttttgatgaagaagatagcgaagaaacagaagaggatcgtgacaatgttgaagatggttggagatatgcaggaggaaacaatgaagatgatgatgaggaaacagaatatgaagactgaatcagttatggcatcctctatggaacttaccttttccaagaaatatattttctcttcaacaaaaaaatttcagttgtctcttttttatttggctgaggaaatgacatcttgtcgaactttgtgttggctgttacgagccttaggaagaatttatataaataaaatgcgatgtaaaatgctcttggttcaattgtcatccgttgtcaccacaagattctgactgaattttgttgactttggataaaccttggtatggtggtatattcatcctgtcacagctatacttcaaagtatttttatcattatgtttgtttttaaatgtttaaaaggtcacaacatcaatcttttaatagattttaattttaaattagttaagtaaaattgtcattcattcttattaaagaccaaaagagcgatacaaatggataaattttaagatgtactgagcatgccgttcacgattctccttgccgaccatggcaccaagctccatcaccctttcgagcttagggtctgagtagttgtgtatccctagcaatgatcttaattttagactgaccattcaaggtaaagagaatacttaaatgtttttagactaattcaatgtttaatggtggaattgatattaataaaattgtaataatataatctcagatttttaataggtcacacaccttgtgccaagtatgagttttaatgaaattagtgttgcttataggaaatcatatttttaatattaaaagtatacatagaagtctaaattataatatttacttttaagttttaataatatacaacaatattcattaataatgggttcatatttaaaataataagaaaataacataatttaagttgattttttatttgtgtaagaaaaaactaaaacaatattatattaaatgtttttcaaggacaattgaattgttggtttttatctaggttagttttttggtataggattaatttcattttttttcttttataattatcgaagtaatttatgtaaaaaataatgataaatctttttcaaaaataatgaaaatgtataaaatgaatattattcttttattttatgatttcgtacattttgttctttaacttttatttttaagtttgaaagtaaggcaaaatgtataatttaaattttagaaatcgataaacacattaaaggtgagatttaaattctttacgcattctttacttgacaccaccaannnnnnnnnnnnnnnnnnnnnnnnnnnnnnnnnnnnnnnnnnnnnnnnnnnnnnnnnnnnnnnnnnnnnnnnnnnnattactacatttgttaattgaagttttaatcgactattgtgcaaatttaattttgatttaggataaataattattattttaattttaaagtaaaaataatataaatattataatattaaaataaataatgtagtataagtgatgtcacagcaaagaaacaaacagatgaaaagaaagagaaaaagttagtactatatgtttatatctattagtatatgacaaaatattaagagttaaaattataaatttatttattaaatgtttttttattttatttatagaaaatttaagatttttttgttgatatatttacataactgtcgcattaacagtaacatttaataaataagaagatgtattatccaacaatggtacatcacatatactctatgggtttatttctctcctatgagattcttcattcaataaatgagagaatattcttgagtcctaccacagatcataataatgtaaataaagatctcaaaacagatttttacccaaatctacggagcaagtttagtttggtgttgtgttgcactgttactgttgttttgaaggtaggaagaaagaaagagcggtgagagtgacggaggaaacatggctacggcgtcggcgtcggcgtcgtgggaggaactgacgctgaaagtgaaatggagcggcaacgagtacaccgtccgcgtctgctgcgacgacaccgttggcgagctcaaacgtcgaatctgcgagctaaccaacgtcttaccccttcgccagaagctcttgtaccctaaaatcggttccaaactcaacgacgactctctcttcctctcccagcttcccctcaactcctctctcaagatgaccatgatcgggtacgccactacgctgtcgtttcgtttcacacacttttatttttagggttttctttcattacattgctcacgaataatgaatgaatgatttggcagtactacggaagaggacttgctcgtggatcccgttgagtcccctgagatccttgacgatttggagcttcccaaagatgaggctgttgacatcaaagatatggaagtcaacaagctgaaattgaatagacgcattcatcaattcaaggttcaagttgttgttctttttccgcattttcattttgtttctttctattgtaactaacaatacctatctacataatatcctacagattgagcttcaaaatccgtgtcgccaagggaagaaactgcttgttctggatattgattacactctcttcgatcaccgctccactgctgagaaccctcttcaactcatgagaccctgtaatttcatttcccccctcttcgttttcttcttttttcactcagtggatggagtttgcttaaaattacaaaaatgccatttttaatcactcaagttatcgaaccttggcaactttagtccttagttttgtaattttagaggctaaaaggattgttggtttggtaattttagtgattaaaatgacattcttcgaattttaggaactaaattgatcaatgcagatgatttcagggactaatttgattaatctatttttttactattattattgaacttaattgaaaggcattgatattataaatgtctttttacactgtcattcaatcacatgttgttatgtatggtaaatttgtttgccttttctaaaagttatctcaagaatgatttctaattggttgatagtacaagatttttcacactgacagttaaacttggtattgtttctttcctctctcttgtctgtaacagaccttcacgagtttcttactactgtttattcggagtatgacattatgatatggtctgcaaccaggtactgtcatcttactttatctgtattctgttctgtcaattttttattcttttgggacgataatttgtaatggaatgaatgctacattcacttcctgcagcatgaagtggattaaagtcaagatggaacaacttggggtgttggacaatcctaactacaaaatcaccgcacttcttgaccacatggcaatgatcacggttcagacttcttctcgtggggtctttgattgcaagcctcttggtttgatctgggctaagttccctgaggtataattatgaatattatgcaataaactaacatgccatttattttcttaatggaaagttaacagaattatgttggcatatttgctcaatcatacattaccatctacagcccaatgaatagtatacttcttatatggggagaaacgggacacccagaaaatactattgctgtacttagtcttcctgaaaaactaaaaagatgttgatgcttgtgagtatagtcataagtgagataaacctaggtgggttatggagttattgattctagttaaataaaattgcaaaatgaaactatttgacattctaaattgctgtaatctatacctggttttcatttatttctgtattgttttcaattttttgcatcagttaaccatgcccttgttctagttgtcttgatgttggtttcttattctatttcagttctacaatgcttcaaatactatcatgtttgatgaccttagaagaaattttgtgatgaacccacagaatggtttgacaattaaaccattcaggaaggctcatgccaaccgagatagtgatcaggagcttgtgaaacttacccagtacttactagccattgcagagcttgatgacttgagcaaccttgatcataataattgggagttattcacagaggacaatgttaaaagacgtaggcacagataaatgataattgaatgcaataactggaatctggtaagcaagatgcaacttctagacttgtaaaagtttgcagttttataagagacattgttcagccagaggatttcagttttttatatcaagtatttatgtttggacggggtgaatgacagaaaggaaaggatttcttgtagcagctgtttggagtatctaagatgattaatattgcttatgcaatttctatctagcaattcctgaacagaatttgatttgatgcatgaaaaaaattctatcctttcataatttgttgggaaagggtataaagcatggataaattgcaaaatgattagttgtgtggcacctatggctgcaactattctccaaagtgatcaatttattctaattatagacaatgtattacatggaagttcaatcttctcctcgtgtttttcggcctatcatgtaatgtaacttatcattgttcttggattttatgcttcatgatctatattgtctttttttagtgatcatcttctaagtagggtaattattgtgtgaataactccatttggattaagtggggaaataagagagagaaatgatagggagaacataggtgaggtccaatttggttcgtcttaaagtgactgaagaaaaaagtgtatggttctgcttctgttcgttttaataactcaatgatttgttatggattctctaagcaaaagtatcggattagttaaaaaaaaattaaaaattgttaagtcagaatattgaattagaaatgtttggtaaaattagtctttgaattagttgattaattaaatataaagtgacataaaataagacgttatatatttttataaaactcttactttttgtaaataaaatgtatgtttcagctaattatagttttatgtttcacttaatattgaacgtagtgatttttgtttgaagtaatttattaaaaattaaaatgaatagtataataattaaaataaacactaaccatcaaccaactcacctattttacatattgatattttaacttctgattttggaggtttaactcgacacaaccggtttagttcttgactacgtccttcacactttgcctttaattcgacactacccgcaagtaaaacggtgttcaatatataaacgtgaacatgaaccacaaacatgttgcccaaatagtgtgggctttattgtgggttggattcacaccgtgggcaacacgtttaatataacaacatattagctcatcaaatgaaaagttaagttgctttgacttggaggaccttctaagatgcgatttaatataacaacatattagaacatcaaatggaaagttaagttgctttgacttgtaggaacctacaaaatttaaaagcaataaataacctttaactagacttataagtgaaagagaaacttgtagaaatcaatgacttgaataatatcctaaatcaattttctcattgctaccaaacatgttgagaaaacataacttcattaaaatcacattacaaacattagcttaacattatccatacaaataagacacattcaaatggccccgagatatttgctatttgcactggaccaaattccacaatagtggagattaacaagagggggtatacagctacatattcactgaagaaacagtgtgggtgaaagcttgaaaatgttggttaccacctctggtaggtcaactgacagaaatagaataagatttcggtaatgaccaccaggtgcacattaaatggtaataataagtaaatagaaaacggaaagactaagagaaggctgaaatcagcaaagctggcaggcagagagagggcatatgatggaaatctctgcacaatcccatgcatgggaagggaaggaagcaattctatcgtgggtgtggcaacaccggttgaatgtagaagcagaacaaggctacagctactgcaaatctaaattctgagagcagggtcttgccctgaattggtgtccttgtgttttagagaaaggtttgcgaactgagattcgaggtctctactgtttgtgcgtctgtgacttccagatggttgctgttgtggctgtgtctgtggttgctgctgctgctgatacaatgcacgtaatcttccaatctctctttcaagtacttcctgctccactgaatttcacattgcatagattttagtgtacaaaacatgttcctgtgatttctaatgaaaccaatcatgcttaaaaaaagaactcatgggcctaaagagaactcaggcaaggatttcagttcatgttttctcggagtaatattttcttggtctcctgcatggtgtccccccacctttttgggagccagacaaatccccactcactcatctgaatatttagtagcacggctcaggccacgtgtttccaggggaatatgaatcctgcaatgcaggaaaagtctgctacccacatgccacacggtattaggtggccaactgagccccacctcatttcttgaactcaaatgttaattcctaatttccatcactatcctatattgctagattcttctaatatagaaaggtacacaagaatggatttttccccatggttttgaagtccttgagctacagttttgaatttttcccaaattacttgaatacaacccttaaaagatcaaacctgcctttctttaatctcattacagtaattctcttgcaaccatgctctagcacatagaaaatagaacctgaactttctacttccttgccacttatatgatataatcaaacttagattaaccttatgtgttccttttctattaatttatactatataatatatcataaatcacaaggaattcactagctgaggtatctaaagcatatatacgcaatccaagttaaaaaaaacttgtgttacttgaaaatggccaaacttatatcatagaaacttacaatatttgataagctgctcttgtgctatattttctaaacgttgcttgagtgctttattctccatactcagaataagattctgctggttaagaaactcgagctcagccgagacttcagacccttctgcctatgttgacatagaaagaaatagaatcagcacttacataaaatgtcactctgcaaacatgcacgatattgccttgtgcagaaacctacctgtaaagcttgtacattcctttccagctcagctatgtattgaagtttccggacccgtgaacgttgagcaaattgcctgcattacaagtgtttcagaatttttttcctttccatatatgaattgattggttccaaaaaaaaaaacttctgtaaattaaatagaaaacaaaaagagaaaaacacaccacattcatcatataataagaagcatggtttaactgctttctctacatgacaattagtataccagcaatagtgatgcagacatcactttgtaccacaaacaattgttatataacttatatcattttcccttctacgtatattattaagatgccatatggcacacaggtagtatagtctagatttgatattataataatgtccagcctatttggtaaggcttaaaagggtcaataatggggatgacatgacttaatgggtttgccacaagaaaccattcagaacttgatcccccaagttagatattagtggcataaaatcaagcaatcactgtaataaccataaaatcaagcagagaaaataactacgtactgtttagcacgttttgtatcagtttcagaggcagatgactttgcatgtgaactgtcctttttttcaggaaatgattttgcatcctgtaagcctgattctactaaatcgtgcttttcacttgctgctggtggaagaccatctgcatcatgtggtgtacattgcaatcctgaactctgaaaggcagcactgtctttgcctgagggaacaccaactggatttgtcatggcatttgaaaaagagtcccatgacctatttttctgttttacggagttcatttctgcataaacaggtacatgacgaacatctttgctgcggtcaaagtcttgagatgaccaagacggaatagacatcatattcttatatttatactcgtcctgattagcataattaatgttagatgcattaacagtgtctatgtacgcaaaagaatcacttgatgaacgccgatggccacctcttcggacaggtgtctctggctcgttaaggagatcatcaagccatgaaggctgctcctctataacaaggctctcagatgaagtacgttggtggtgtgtgtttccatctctaggtctgttaccatcctttaaaccaacagggggatttgggacataatcagcatatgcttgggaaacactaggaagtggacttttaggaggaagtagaggatgctttccaggatacataaaatttctgaaacctgatgagccctttgaatttgccatagaagcagaatgaacaatacctgtcgaatttaaaaattaccaaagaatgtgatcatgtgaataaatcaaaagataaagacaacatagaaaattttatatttaaacataaaatccatgattcaacaatgaagatctgatatgcatgtgttctcgattataaaatataaaccacaaatacatgttactcagtaaaaagatcctataatgcgaatagcatagtatccttgaaaatgttccaaaaattgaaatttggtttatatgcaaatttactcacagcaccaaaagagtaactgcgctagtatcagagaatccacatgtaatgtaaccaaggcagttttgggagagaaaaaaaaagcatctcagtaatctcaataaccataaatgactaaatctgcatacttcatcgagaaaaaagcctaagagctaaatatctcagatctccatgatactatatatttcattggataaaagttcacaacatattggcagctttacggatttatctctttcttttattagtccaaaatacaattctaaaaattgtccacccatctcacaaaaatctcaaattttcattttacatatacattattaatcatttcagatagttgatcaacattgtcaatcctttcctcacggtacaggagcatcacatcaagattgtccattacaatttcatcataagcaatgcacaactcgtatgaaatagtaccaagcacaatagcaatcccatcacacataaatgacataatattaaccaatgttttaagttaaaaccagctccataatgataaaaaaattaccagcttaattttcttcaataaaaaaatcaaacccaaacacatgcatctaacaagcctggcatcgcaacagtgaactaccaatgtaacagaatactcaataacatcattttttttttaaaaaaaaggcagaaacaaaacttcaaaacttggaagccacaagaaactagctaggggaaagaaaatccaatccacaaagaaaaatttaaccacaataagttaaaaaataagaaaaataaaacgtagcacccaattgccaaactttctattttatactttcattttctcaggacccagatgaggggaacaaaaaacaaagatagaaacttcacttttctacctttcccaaagaatctgcccaaaacacgcactcagaaaacaagaggagaaaaggatcaacacagaatttgaaaacccgaacacggtgcaatgtgcgacactgtggcatcaaaagcgcaatgatttcaagctgatcgaacgaattgggaatgaaaattgaaacagattcgtttttcggaagcaaacaaaaaattaagacaacaccaaaaggaaagaaagaagaagaaaaaaaaaaaaaacctttgcagattaaagattcgagatcccgaaatgcaatggtaaaggagcttgaaatcaaagcaaagactctctctctctctctctctctctctctctcttagggttcgtttcttcaaccacctctctctctttctcttctctctgtcttcttgttgaagctgggaaatggggcttaattgtaaaaccatgataagtaaatactgttcctaaaactttttctatttaacgtttcacccctttaagtttcggttattcccaaaaaaaacaaccttgggctagcaacttaaaaataatactcgttgttgtatctctgtccaacttgtctagagacatggcaaaatagaaccataaattcgttattatataaaaaaaatccataacatggaaagattccagtaataggattttggacattggactgaaaataaattcacttttccttagttgactcacactgggtcacccttgataccaaaattttaataatgttaatgattatgattagaactattgatttttaaaagctcatccaatcatctaaatggcatatataaatgttgtttattaggaaaactgacacaagattttaatataacgttatcatataaaaatttataaaaatattaattatacattttgtaacacactcttttgaatatattttattattacatgaaatttattaaaaataataaattttatgagtcacacatcttatttaattagattctctttcttaattaattatgttattttctataaacttaaatcaataatataatatgtgttaaaaatagtttattgctataattcttaaaataaattaagacttttatagccatgtagacggtcgatgtaaaattcaaaatttatgatgttcaaaaataattattataaaatttttaaaattattatatatgtttacttgtgaataaatgaaaatataaaatatggttataatgttaatgtatattttttttatcattttaaaatttagcagggaatatctatttttttaaaatatattttataaatttttaaatgattattatatttcaaatataatatcatgtgtgtaaggttttttagcattttgtaattcactgtgaaatcaaaatggtgaactatattttaaaatgaaaataagttattaagttcagatattaaatannnnnnnnnnnnnnnnnnnnnnnnnnnnnnnnnnnnnnnnnnnnnnnngatatgtgagaataattattgtatgtcattatcgaaagttttatataagtatatttatatgagttaacggaaaaatttaacaataaatttaatttattgtattttttacaaattcaaaaaaaattcaattttttatctttaaaatctaattgccaataactaacaaaatcaaatacgtaaaaataagtatttatcccatattataacattttccgaaaataaaaaggtatattcttttgttcgaatcaggtaggtgtgccgtatgcgtatgccaaaagtttcgatacaagtgtcatggctcaaatgtcttatttcttactattttaatagaaaaaaaatgtattttttttagattaatttagttctaaattttcatcgcataaatgttgaggtgagacctgacatcctatttgaatgaaaatgtacatttaaactttttagctaggaattttttcaattaatggctatgacagattcggtttaatttagaagaagaaaaaatcaaaacaaaaaatggaacaaagtaagtatggaaaaaattgatcgtatatactttattttatttttaacaatcatctaataaaaagtagaaatattttttgcaaagtaaatatagtagttgaagcaaaaagaattatcgtaggaaaaaataatttcacctctaaattaattttaaattttgtttaagtcttactattatattatttttatttcgtctcataattgtttaaaactcattgtttgattgctatgcatgcagcaagtgttatgttccatccattctagtttgtttttatcctttctaattgataaaaaataacattaataagtactcttaagatattaattaaaaaattattattattttattaaaatacnnnnnnnnnnnnnnnacattaaaaaaaaaaaaacctattttagttcatctctattactagttactagtaattaaaaagatgatatacttaaatcaatataactttttttcactaagatcattccagttttattaaattatatattaatttggaaacttgcttttaagataaaaaaattaaatataaatagtttattccaaacataatttcaattataatagattttataaaatgtatagttcaaaaataagtttaccaaaatttaacttaaaataaattttgatatttttagtaattatttaatataaatcaaatctatttataacacagataattaatatgaagtttaaaaaatatattttgtaggccctgattaaggtatttttagttttgagttttgaagtttttagaattaacaagtagttttttagctttagtttcaaaaaaatcttaaatcagtttttaaaatattattaattttaaaataaactcatttcaaaagtttcataaaatattaaaattatttttaaaacatttttgtatagtggttatgataatagtaatatcagcaacaactctgataatatagatacaatggtgattacgatgaaaataacaatgacaatattatagatacaatggtgataacgatgaaaataacaataacatagtggtggtagtggtggtaatgttgatagtgacgccaaggataaaggtgatattagtagtaatggtggtgaagacaatgataataatgttggtggtgtcaatggtgatggttgtgacattgacaatgatgggatgattgtgatgataatgatagatgtgatattattggtagtggtgacaatgataataatattgatgataccaccgacaatgataataatactgacaaactaaaattcaaactcaaatatttttttttgattttgaaaataaatgtataaatatttcaacaaaaataatttaaaaatcttttcagttatatgtctatcaaacacattttttataattacatttaaaaatcaaaagccaaaaacttgtaaccaccacaaaactaacccataaaatattatgactacatagtatatgtattaacaatctaaagactctttatactataattcattttacgttattatttattgtaaatttaagcttaaatatattttttgtttctttgtaaatttttttttcgttttattccttacataatatgtttttttaaaatatatttaaaaaccattatttatgtgatttttaaataattattataaaattaagaaatttattagttattatagatgacttttatggctacatgatagttaaaagatatttatactaccagtgtatatattatttatttttaaagtaattatactttattgaaataataatgtttataataaaatcacattttagaaaaaacattttaataaaaatcagttataccaaaatttaaaataaacaagaccgtattattttaaaataaatacattannnnnnnnnnnnnnnnnnnnnttactaatattattatcaagttatttttttatatgatttgcaagattttaaactacggagaagaagttagattttgcacagttgcctacaaaagttacgctggatttcacatgagtatttatttctcttaaccgaataaaagaaagtactcttaatatcacaaaggaaattaaaaaaataaaatgataacaaggcattaatatttgtgtcttatatttaatataatttgtttgcttatttcatattcaatgcaatatgctgtttctatcccagagcagcgaaacgaaacatacgttaattgttttcaattaatgtttttttttatagagttttcatttttcatttttttttcttctttgaaaatctgaagcgcctgtgtgatttataacaattttttttataatttatattcacaataaacgatacaagtttttgagaaatttagttgtttgtttttatatttaaaaagtatatattaaactctaattaacttgagttttaattgtggaatgagttagttttaaaatattttgttaatatttattattttccatttataatacttaaataaaaaacttacttaaaaaaaagtaaaatcttagtacttgaatgcgttggttttggtggtaaatgaggagacagaaattagagtgagttgtaaagtggggagagagatgaacgacagccaaatccaagtatgaattgggacaaacagttaggagttcccaacctcccatcagccatagcatgtccaaaaccctgaaatctatacatgtaccgcagaatttaatactactgtttttactaaaattaattaaaatacaatcacaatatacatatacacacatatatatatatatatatattaatttagtttctttatttactttatttttgtacccctttatcttcatgatcaaacgtagactataaaactttgtatttcttcgaccttcatagttgcactcgatatgagcatcctaacatccttcgaacgtaggccaatcgagtcttgggcaagcaccaaaaaagatattacttatcttgggaataaatacccatgattcgggtttgggaatctcgtgatagccattacaacagttatgagtaaccgtccatggaatatcactacttaatcaatatgattaagggtatataaacctaacaatgaaccctaagatgatagattgcactgacataattgaacgattctggactaggtctcttaccttctagacacgatctaactagaggaacaattttcattttaatttctctacatatactttgtttttattttagtccttatttctatctctccataaggattataaaatgataaagatacaaaatggccactccaacctacctatcaattattaaccaaacaaagccacatattaatatcagtaattcaacatcagtagtaacaaacttcagtttctaaaacccacgcagaaattatcaaaaattgaaaagcatgaaacttcctacctctgttgcaagacaactcgagagcaattagtcgagagctcagtcatcaacacattacaagcgccaagatttttaacaaattctgttacccaaagtccatgctcattcctcaaaacacccccacaggttgcttttaaccacagatttggtttcacaaccaggttccaaacagatttagcataaacataacctcttagagatgagcattttaatctttattttgctggacttaggattgcatgtttttaattcagttccaggcttcagcttttatattcagcaacagattttagctgatgtagcctcggttcttttgttgggtttttagttctttgggctcttagcccctttcatccaactaaaaaagaacaataaggataaaactcaaagaaaacaaattacaagcttctaaggttgttgaaataacttataaattaataaaaacaagttgacttattaagtctaagccagtcaaataaataataagttagtttatttgacatgtcagacatacttataatgtttttttttcatgccttaagcattttttttctttataatatacttatgtttttattttagttcttttaattttttttatattccatttaacttaattaatgtcttttgtttgcattagtccttatcattactcaattattatcaactgctgaggtgtagaagaccacttcatgacttcaacacattaggacgtaataaagtgttattagtttcttttagtctctctaaatatgttttattttattttaatctttgtctctttaactctttccttcctcattttaatttctctaaattattattattattgttattattattattattattattattatacaaagataaaatcattaacttggtaaaaaaagtaatatatggaagcaaaatcaatacaataatttatttaattatatatgatagaatatactgaacgacatacaattgttaaacataaccaccaaagcaattaaacaattaagtgaataaaaaatcctcattctaaaaggttctttattaaaccattttagttttcaatttaaaaattttcataatacaattattcattatgaggtcccaattttgctatcgcaatacacaaggtatactctaaaaacacacacatacagctcatttttttcttctttttgacagaacacacaacacgcttaatagcatggattttggaatctataatattaaatttaagacttcataaacaagtttggatgactaatgtcaaaatcagacacatatatagagatatattaaaatatatatttaaaataaactataatgaatttgtaaattataaatctaaaagaatataggacatcaaattggaaaataactatgtccaattttaaaaccctaatttatttgtcgtctattgcaaaatttaagaagcattcataatatagaatacaattcatttttttttataccaaatataagttaaatatatatttatgtaaaatatatattagagattattgtaatgtttgtaaaaatctaatgcatactagaagtattgaanacatacaaatacaacgactattctaccaaaagtaaaaaaaaaaaaaaatcctcattagaattgagaagatcccaattttcttgatagttgtcgatttgtctgcttacaaagatgtggttgactattcatataaatcaagcctcctgtcattttttttttatgcaatttcatccgtcatgctcatataaactgaataagccgaaatacacacacggacccataacaaaacacaggcggaacaaactttttcaagatcctgtttaatattttccatttttagaaaactggaccctcaattgagaaatttgaagattttttttaagagagtaaaaagtgaattaacgaaagaggagagagaaaaaaatttgggatgattgataatgcaacttctctgctgggacatgtttgtgattccccaaatgaagtattacgtgaatgtgtctcagaaaatgtaaaagtagtaaaaattgttggtgggaattgaactttgaatctcttggttattaaaaataggcattaccatctcctctaatttttaatatttaacatatgttacagtaattaatatttgaggtcccttattttttggcctgtgtgattagacaccttgaatagatccaaaaccgcccctgacaaaacgaccaacacacactcatgcacgcgacaccataaagttggtaaattaaaaatgatggtgtcaatagtatcagctataaacacatgatgctaaaagcaatgttggaacatcctatacatcaactattacaattatcgtgagatagctgcttcataagccacttctccggtgaaacgtttgtgtctgttattcagatcactcgcggctgagattcaaattgccaattttcacaacagccttgccttatgatcccagcaatttcttccatcttgcatatgctaaaataagcaagaaaagcaatacgcaagctgcagacgtgatccaaacgaagggccaaaataatccatcaatgtgatataaattgcaaggaatgttcataccaaatgtaccagcaatcaaagtttcaatagcaatagcaaatgatgcaatagtcaacgtcaactgcagctgaataagttcatttcggtggttatcaagttggatgttgacatagtcttcagtgtcgtcaatatactccctaacctgcaaatcagtcaaattctcacaatatttggcattccagacacaataaccaaaatcagctgacatttcaacaacacaaatgctccctaaagcccaacatcttggtccatgaaacatagactaacttcctcccccctcaacattaacaatatagacttcctaccattttgttataaacaagaaatgaaaatcaacagtaggttacaaccatttgtttttaaatcaacagggcaggcaataatatattttgtaaatccagaattgcaacaaacttggacaaatctaccattaccattatcctatagggtgagcttaaattaatttattggagcttgggaattcttaaggataagctcccaatagtgtcacattgaaactagcaaacaattgagattccctccatcctcaagacaagagaaaagtaaaataatgcaatattatatctctggtaagtatcacaagtcacaactaagtttatgtggttgagtcacgtatgcaaatgaaacatatgaaatttatcatctaaaagcacaagtgtgtgatataaattagatagatgatagaatccaagtagaaaacgacagtttcatccttcaaaatttgacagacacatgatttgaccagaatatgattgttagaatacttacagataatattttgttacgcgttccatccaactgcatgaaatatgcatcaagcaacatctccaagtcctccacattgttataatcctcataatggctggtcacaagactttcacttctgttagaaccaagtcggcgaacaaaacgtgaggtattaggaaagttatttgaggttgtggcacccaaatgagcctcctcaaattgttgattctgcaaccacttcctcgtcaaatatagttgtgccatatcttcgttgtcatctaaaagatgttcaatttcatctcgcacctgtgaaagagggtcatacacttcttaagtatgatatctcaaagatgaaggaatgcatcttcacatacaaggtaaaaccgcctgcaataaattttctatatataaaagagtgaacaaaaacctcaacttaagagcataataaatgattattgaacaatgtaacaaaagaaattaaacaattaaagagtttggcaagaaatagcctttcattctttattcaaagactgcagaaatggacgcagattgcattccaattacatgttatttctctgaaaaatcctcaatcatcacaatgcacaataactaaaagaatctgttggcacttttattagcttgcacatttcatgggcttttaactggtggcttgaccagtccaacaaactacattaattagaacgaaattggacttggtacatctcttttcccaaaggttaatcctattctcaatttccaatttccacagtcatctataagtaacgaaataactatccacatcaacttagtaatagcaacaatcagaggaagaaccacatggtacttatgcaaaaacataccttctgcactcgtgccagcaaccgcgtaagattactcttcaaactcctcacatgttcaagattcttggtgctaacattccgagccaattcatccaacacagggtaagcacctagctcaaggtccgccacattcgagtccagataagtacacacagcctccaaagcaatctccagaacttgaaactcaaacggaagctctgactgcaaaccatcagctgcctctggcgtaggcaaccattgcctgccattagagacctgcatttcgccttcctgttcctccatgctgccgagaagtttaggttgacttttggcaggaagctgttgcctaagttgctcaacaaagggaagaacctcctgccgaagaggatcaagcaataacacttcttcagcagtcacgatcgcctttataaactccaaattaaccaccattgctttctctctagctgcaattttttatataaaaagacaaattataattctattcttcattcttcattataatcataataccatccaagaaaagaaaagaaaacacagaaccacagtcaagttaccaaaacaaacacaatttaagacatgtgattcaattcattcagagaaaccttaattttgagaacacgatgaaaatgaaaaaggaaaattgttgaagattgaaatactgttattattcagttacctattattttgtgagttgttattctgtttagattagaggaaagttgttattctgttacaaattattctgtttaggttgttattaatacttgtttaaatacaccttttaagaggtagcagatatgaaggaaatgaatgaatagttctctggattgagttttaatatggtatcagaagaaatttaatccaaagaactcaaatcccattttttttccgaatctgattcctttttttagccaacctgtaacttcttttccctctttgcacagtctccaatccctaatttccctaatttctccaccatggaaaaccctgaatctcctgtccatcccacctccctaccaacttcttcccctgttccatagtccaacatcatcatacagcaagacaactcttcctttcctgtcaccgtcatccttgatgattcaaactaccccctttggtctcaattaatggacaagcacataggtgcccgtaacaagtctgggtacctcactggtgcgatggccaaacctccgaccaatgatcctaattatgctacctaggtcactgaaaacaaacgagtgaaaagctgactcatcgaatccatgagcccctctctcatgcagtggttcatccgccttgaatctgcaagcgaaatctgggatgctgttctccaaacgttctatgacggatctgatgaaacttgtctgtttgaactcaaccaacactccttctccaccaaacagaatggttgtcctctctccacctattataatgagcttctctccatctttcaggagattgatcaccgcatggcttcttctgcaaccaccgtcgatggcgtagcccagacgcactcttccatggctcggctgcgtgtctacatttttctgagtggtttagactcagattttgaccaggtacgtggcgaaatccttcgtagagattacaaattggatcttgagagcaaatatgcatttgtctgttgcaaacatcagcaccccatcacaatgggacgccctgcttctacaacggattcttctatgtttttatcttatactcctcgtgcttcctctacttctacaatggatattcttactcaaacataaaatgaagtcttctctgtttttcagaaatttcataatatggttcaaacccaatttcaaagttcaatccaaatccttcaatcagataatggacttgaatatattttttttttttttttctgaattcctggactctaaaggtatcaaacatcagacttcatgcaacacacctcagcaaaatgggttagctgagaggaaaaacaggcacttgtgagaagtaacgatggcatctttatttgacatgaatgtgccttccaattactagggggaggcagtcctttcagcagcttatttaataaatcgtactccctctagttctctaaattttcttactccacagcaaaaacttgaaactttcttttctatccctcatgtaatgaatcttgaacctagagtctttggttgtactgcctatgtccatgttcccaaaactctacgaaacaagcttgatccttgtgctaagaaatgcatctttgtcggatactctgaccttcaaaagggatatcgttgttttgatcctacaacccaaaaaatgcatgttgcccttgaagtatcctttagggaaactgaagttctttattcaaggggagtttcttcttctcagggggagatccagaacaatagagaagaagaattctggctatctacttctacagttcctactccaataccttccaccacaaatgatcagctcacaaacactaattctcctcaaaactcttcacctgaagtaacctgtgaacctccagaagcagatctcaacgatgcaagtcatcctttatcccatgagacaccatgcctaactgaatcacctattgtacataattctgaaatacattctgaacccagaactgagtcgattcctgtccctagtacagatcattcaatttgtgctgctcctaatagtattcaaatcagaaaatcagagagaccgaataaaggcaaacccaaaactgtttatgaaccagaccctaaagtgaaagtaaagtatcctattagtaattatgcgtcatctcataggctatctggatcatatgctctaacagttgatcaattatctactgtatatattcctaagagtgtgcagtttggaagatcctagaaggaagcaagcaatgaacattgagatggaagcacttcagcacaataaaacttggagattaacttctctaccgagtgggaagaagacaattggatgcaaatgggtatacaccgtgaagctaaaagcagatgggagtattgatagatacaaagcaaggcttgtagcaaagggatacacacaaaggtatgaagtagactatcaagacacgtttgctccagtggctaaacttaatacaatcagaatcctaatatccattgctgcaaatagagattggccattgaaacagtttgatgtaaagaacggttttttgaatggtgatttagaagagaaagtctacatggaggttccacctggagtgaagctaactccttcaacggagaatgtagtttgcaaactggaaaaggctctctatggccttaaacaatcacccagggcatggtttggaaggctctctttagcaatgaagaagtttggttaaaagcaaagcaactcgaatcataccatgttcataaagcataacaaagggaaggtaacaatactcattgtttatgtagatgatatggtgctaacaggggatgatatagaaggaatgaaattacttgagaagaaattagctgctgaatttgaaatgaaggatctgggtcctctaaatattttcttgggatagaaagtgcaagatctgaacagggtatatttctgtctcaaaggaaatacattttagattttctgtccgagactggattgatggcttgcaagcctgctgatacccgatggaagtgaatcattctttgggtatttatccggatcaggttgaggtagataaaagcagatatcaaaggttggtaggaaaattaatttatttatcacatactagacctgatatcacatattctgtaagcattgtaagtagattcatgcactctccgatgaagagagtatgaaggcagtgtatcatattttgagatatctcaaaggttctccatggaaaggtcttaaaataatatagcgtgcattgaaggatacacagactcagacttggctggtgattttcagatttcccatgttcggtcccaggagcaacttgctgatgtattaacaaaagctgtctcagaaaaagtgtttgaagaaatcattgcaagttggacatgatagatatccatgaacgagtgagagtgttgaagattgaaatactgttattattcagttaactattattctgtgagttgttattctgtttagattagaggaaagttgttattctgttacaaattattctgtttaggttgttattaatatttgtataaatacaccttttaagaggtagcagatatgaaggaaatgaatgaatagttctctggattgagttttaacaaaaataaaggggaaaattataataccgaggatgttggaggagtgggagaagacggggcccaagattctcaagtctctagcgggaatcgctgcgtggcggatgatggcgttcttctccaactcaacaagttctgaccggcccgatcggtcaaacctcatccacaagcgggcgccgccggtcttcttcttcgccttcgtcaaggcgcagctgccggcggcggcggcgataggacggttgttgttgtcgtcgggtgaggttgcgattccggccgcgtagggaggctgcggcggagacggaggaggaggcggggcggcgttcttcttgggtcggcggcgagaggtggagcggcggaagaagggaccctttcccattgtgattgagaataataattggtaaacaaaattattattgttgttaaatgattaaattgaataataataataataataataatagaagagtgaagattgttgttgttgttcttctccttcaccttcaccttctctgctttgatcctccataaaggagacgacactccttctctgccgcacactccctatttgtttttatgtttgggacggctttaattattgacccaccgaccaaagcaaatccaaagtcaatgggtgtggaaataaaaaagtttgttattacttattagtaactgcatctccatcactcgattatcgttatttgtatttttttatacattagaaaacaaccatttttatattaaatttcttaaaaaacttatcgtttaatatcactttttatttattatattttacagatattttattttgttatattaaattttaaatattttcttttattcttttatatttttgaaatatatcattttttatttttattttttactaattacattaaacaatttcaaatttaaaagttaacaaaataataatttttttaagggaaaattgaaaaagaatcaaaatgatatatttaaaaaaaaatnnnnnnnnnnnnnnnnnnnnnnnnnnnnnnnnnnnnnnnnnnnnnnnnnnnnnnnnnnnnnnnnnnnnnnnnnnnnnnnnnnnnnnnnnnnnnnnnnnnnnnnnnnnnnnnnnnnnnnnnnnnnnnnnnnnnnnnnnnnnnnnnnnnnnnnnnnnnnnnnnnnnnnnnnnnnnnnnnnnnnnnnnnnnnnnnnnnnnnnnnnnnnnnnnnnnnnnnnnnnnnnnnnnnnnnnnnnnnnnnnnnnnnnnnnnnnnnnnnnnnnnnnnnnnnnnnnnnnnnnnnnnnnnnnnnnnnnnnnnnnnnnnnnnnnnnnnnnnnnnnnnnnnnnnnnnnnnnnnnnnnnnnnnnnnnnnnnnnnnnnnnnnnnnnnnnnnnnnnnnnnnnnnnnnnnnnnnnnnnnnnnnnnnnnnnnnnnnnnnnnnnnnnnnnnnnnnnnnnnnnnnnnnnnnnnnnnnnnnnnnnnnnnnnnnnnnnnnnnnnnnnnnnnnnnnnnnnnnnnnnnnnnnnnnnnnnnnnnnnnnnnnnnnnnnnnnnnnnnnnnnnnnnnnnnnnnnnnnnnnnnnnnnnnnnnnnnnnnnnnnnnnnnnnnnnnnnnnnnnnnnnnnnnnnnnnnnnnnnnnnnnnnnnnnnnnnnnnnnnnnnnnnnnnnnnnnnnnnnnnnnnnnnnnnnnnnnnnnnnnnnnnnnnnnnnnnnnnnnnnnnnnnnnnnnnnnnnnnnnnnnnnnnnnnnnnnnnnnaattcattagtttaaaagcatagaaattaagatattttttgactaaaaattatacaagaactaaaaacacaaattttcttagtttaaataggatagtttttttcttcgagaaaaataggattgttttttacatttacgggacacaaaaaaatttatttttgaacaactttttctaccttaagaaaatttctcaagttttctttaatattttcaaagttttcacttactttaatgggttgttaaactccttaatcaatcttagacaattaatctccgacgtttctattttcttcttttatctttctttaaagtcttgatcacatttttagttgaattgacatgtagtaatttcaaatatgcaatatgcttttagttcacaatctgattaagattttagtcaagaaaaggaattactcgatttgaccattatatgacatgcgtggtgatgtagaannnnnnnnnntattggatacatattaagaataaaagaaatcaagaaatttgaaataaatcatgcaaaatccttttgttgagtttgtgtgtaaagatttaatcatttattgacgcatttcacatttccctcttgttgaactacgttctatttttaaaattaagtaaatttaaacctatctattattcttccacctttttttgatacattctattttacttccacctaaaacacctactatctaggaatttacaaatgattaaacatttaataattaaaatttagtagaaacatgagaaaacttgaaaaaaaatttattgtaaaattaggattaaagaaggagaattgagttatttattttaagtaaaacttgttgaatttaggaaaaatcaaacaatttaattgatttaaatattttaaataaaaaatataataagggttttaaataaaatgaacagaccaactttgcttaattttaaaaagtgaaaaactttatttgacttgaaaaaccttaaagaaacaaaaccatagataatccaaactaaaggaaccaaatataaaaaattaactcaaatttatttaagagaaaaatgttagcaacacactcctcttataagataattccttggttaaaagaaacatgttgaaaaatttctcattcatgtaaaataacattgaattctgaacattagataggaatcgcgaccaagatttaaatcctaacttaacagcttcaaattcttcaaattgaatgaagatcatatctaggttacagtataggggacagaaatacaagaaccgcatgttatgcataatcaatgatgtcatgtatgcagcaagaatatcttaagttcccaactctttttccattactcatgttgatcccgtatattaaaaagccaccaaagtagcaactaaattaaaattaattgccacacgtgaaaggaaaatccatgatccaaaaaatacatttcatgcatcaactgaatctactactctgcttacccttggcattatatatgcgcatatgctaacacattataaatgttactctcaatgcaccagccaaccaagtacatcaaaagcagactcaattaggaaattagagcactcatgcagaatgtgaccacatcatctatattttccaagctccatcttaattcctcttgattgttctctgaccataatgtatctattattcccgcaatggtaaatataactgtgcaggaaggttggaatccatttctaatcagttgcgtgagacaaaaacttacatgtccttaatgtacagacaagtcgattatgaatagcaaaagcactcgatacatctagttcatactagctacaaatttaaattatactactttcatttagagcttaattttgatacattgtcagtctaaagatttttatatgacaattagggatagatattaattatacccagactctatgggtacccgctcaatgggaatggatcaaggtctgggtatttacagcaaaatttaatgggatggatgcaggaacgagtactattagtctagtacccagttcatcccacacccgcatatatatatatatatatatattaaaagagatctatgcactcactatcaaatacagaaatttacatacaaaaggtaattttaagtctataaattggctttaccatcattaccaattttttgagctgcaattcttagcagctatatcagtaggcgaatattctaagacttcctttggttaatcaggtggttagtgcatccggaagtgaatttggtgatccaagaattttgccaccaacatcaggaaaggattcataatcatcaagtgcactgacttttccatccctgctgatcttaactggatattgcatcaagtgtcccctcatccgattctcttcctcagacacatatatgtcccagtttcgtttggcaattttattgacatgtctgacacattccaggttatgaggttcagcaaaacaatgatcaagactaccaaggtgctcagcccacagtgacattctgtatccatacacctacaccaacacaatctttgagggaattgccaattactgagaaaagaaaagatgaaattacataaccaagatctattcacagatctgagtttatgctacgagtccactagtatgagagggtgtcatcaattatgcttacaatgatttattctgataaaatagtatacatgatttatccaaaagatataaactatttaatggtgggttggctctataacactttgggctgatacaaagattggaacctcaagattatactttcacacacacataaatatttagttaattaacttttttttggtagtgtctaattatttcgtgtgtttgcaatatgtgctatatatatatatatatatatatacatacatacttttatcttagattaatatgctcaattcctatctagtacaactattctagctcattaacaaacgtagctggagcttcaaacctggccacgtggatgagcattcttttctgtccatgtatattttggttgataggcacccatagctatttctgtgtcccttgaaccatctaaggatctctggttaatatttgctgatccaataattacgtattcgtcatcaactaccattcctttggcatggacataaatcataaaacgtctgaattttttaactgatacctgattatagaaagggaaaaaataacaataagatcataaactatcaccacataaatagaaaaagtctgcaaatggatctgcatgcaccaactgattacttctcaaatgtaaatatgtaatggccattatataatgctgacacttttataatttattcaaaactaagtaaatattcatttggtagataatccatgatcatttggcactaggcatatatttcattgagaaaactaatacaaacttatggaatatctgtgtgaaatgttgaaaatgataaaatcagaaggaaatattttcttctatttcttcctttttgaagttgtattttccatccaaggaatttgatccagaagaccaataaacattttataaatttaacttaatctaagcttgcaatcttgattatgtttaagttaatttttatactaataagtcacacagatatagatatgaaggtcgggactttaatctccaccaacttcattcttgctagacgagaaggagccaccttgctcattactcatcacacatgtatgaaacttgctttggcaacataaaaaccatttacaagtaagaatctcacattattatatggcaattttcttcactgctatgtttatatacacttaacctcccagacatgtgatttccaggacttattaaggattcatcaagattaggtgcttggaattcaaacttcaactatgttgtaatttctatttagtgccttgtccaatcataggtgggtaatgaatgggtaagacagaccacccattattcaatcatgcactatggggagattttaatacttacatgtagccagacatgagacaccatgaccactgtaatgcttacaattgattagtttgaattagctcaagagaaaaccctagggatactcatagctccattcactaatacacaatccaattacaaattagggatatactcaatccttgggattggttgaatgaaaatacagattatataatgtgaatgaacacactttttcaacaatatactttcaatattttcttttttctttttttaatcctataattaccaatacaaatctttttcattcatttcaaaatattattagtatacttttaatttttatttacatgttcgatccttttaattaataaatatatttttgataatgcaacaaacattaagccaaaaaattataaacagaagagacaggcaatggtgcgtccaaagcgatcccaatccattacatccaaatcatcctccaatctgaaccagcgtcgccacctccgttgtctagccaccgacggacttcgaccgcgccatcgccttcgcctactactccccctccgcgccgtctgcttcacctacgacgattgtcacgtcgttcgatccatcctccgcagcttcttcgtcaccaaggacgagcgcgaccgtgaagagctgcagcacaccctcggctgccggatgaagcaacaacgccaccaaacgcgcaggatctaagtttatttgttcagatctgagtttctttgtttttgatctaagcttttctcccacgcacattgccatttgaacttcaaccgctcatactttcgcaaccttcgtgactctgttttgtgttcattgttgttcttgtgttcatagctgttggtgggtatagggggttagggttgcgagcggaattggtgaaggtggctgtggtgcgtgcccgcgacggtgggtaaggatggttgttggtgtttaggaaaggaaaaaggtcagagattaggatttttttatttttaaaataaaataaagatagtaattattaaaaattgttactgtattaaattaattattttaaaatttaaaatactaattggattaaatgttttaaatgaaaaactgaaaaagtataaaatgatatattttaaaaacataaaagataaaaatgaaaatttttaaatttaatagatcattaagtctatttttgagttgtacccttttagtaaatttcttacgctgtaataactaataaattataagttgttgcaggattttttctgcattatgatcctaagccttagtacacaaggtaaagcaggcacaacctattgtcgaagttgttatcaatttgtagaattcaaatgttgctataactattctgatgaatgatgaaggcattattgtgacaagaattaaattcttgtgttttcataatgagcacgtcaagaattctaagtgctgttcaataagtatttcaaactgcatgcaatgcctaatttggatatggaaacacaaagggtagttaagtttagcataccaaagcgcgattttcagatggatttggtgttggtgaaatagttgtggattgtggttctctctttccaaggcagtaaaaattgagataatcttgtggatgatactgatgagagagacctgctttttcaagggcatcagctacaatctggtacatcatagacattgtctgtccctatagtcatccaaatttcaaatacatgggttgtgataagtacacttcaatcatatttgttatgccaaagaataaacgaaaaacgcagagataaaaagaaaagaatacatatattattgtggttcagctaatgtgacctacatcacagacaattgagtctcaaacattgaaacaatgaacatccctatttttactctaacatgcaagtcgataaatccatttacattctaaggaagtacataaaaaactggcctcataattcaggacaactcgttaacaaaattccaggcctcaacgatattcataaatttgtgtcacttatgttatgtacatctattaaatattgcgaatatcaaaccccagattcatccttccccttatggtttgtgagttcattttcttcaaccaattgaaggtgaaagaaaaaaataagtctatgccaatatataaattgaacgaaaaaatgatttaggatggcagtagaacagtttgaaggaatttttttgttgttttttttttttggtacatagtagaattttaatgacaataagtctgttgcattggacaagtttgcagtgattgtggattatcattaaccacattgcactcgtttccctcaaaaaaaatccattaccaggtaataatatataagtttgtggaagaaacacgttctaccaaactgacttcctaatttagacagactcacatgaaaagtactgaaaatgttcatctgcaaattttaacaagggaatatacagaatagaaattggtctgacctgccagaacaatatttcttgaacagcagcacttgttggaacaccctctggccacattggtataactatatatacacaaaaacgttcatttgcaccaatcttaccggcaattttcaaagccaactccatgggaaccaagtggtttgcacctgttaagataagaaataaaaaccttacacttgcagtgtatttgtaaaaactacagcaatgtgtatctcacaaattgacttaatattcaaatgctactgaaacttaggatcaggagagtgatatagttcccttaaatgttagcaagaaatatgaatttgtataatgtatgcaggcatttgaaaacaatattacaaaaagagaaaaaataaagcaataataagcccttcaaacaccttttggtgcacaccatatttacctaataaattctaagataagaaatctaacatggaaatgaatgcaaggttgcagacttatgtctttatctcctccttttttctcgcacatgaaccatagactttattgacttttactgaaaaaaacaagtgtatccttctttcaattttcaacttcctctcttaacatccaaaactccctctaatgccaagtctttatcttggatagtgacacttaacaggattaatatacaaatgatttgttgtatattcatgtgcctcccactaacctgtcatggttgttccttcatagatacacaattatatgttctgggtctgagacatatatataggtacattacctaaacgccagaattttgattttgtaacaacgcaaaaactagcaaatgccttataaagttgaagatatagaaaaattaagtttatctacctgcattgtttttatatgaaggccaatgataggaggagcccaaaaaatactgattctcaatatatacaaagtgctcagcggatcttattgctctcacataagcagtatggatgctttgatctactttcaaattttttccacaaaaaagattctgaaacaaattaatattaaaagttaaggactaatttatctcaatatgacttgaaaccacaccccaatgtgaaggtaatgaaaataacaagaactcataatataaaggggcatcacgtataactttgttctcacctgagccttagctttgtcaacatccttaggaaatcccttcacggatcctgaatctatggacctaaatatctgtattaaatgtaaattctagttcataatctttacttgattttatcaggggcacgtgtacatcacagattctatcaacatatttccatacctgcacattccaactctctggatcattttcatcggttacatgaacagatttatcgccgttggaacaaggagaaggtttgacaatccatgaaatccggtctagccttagcaaagcatcatcatgccaatttgtcacctttttgagcctgaagtcgcgccattttttggccttcctccatctttgttcaaaattggtcaatatatcatatgctgctggaccttcaattttgcaatgtaagtcatgccatggctgccttggtgcacacgaatttgaatgtaactgtttcatatagcacacaatttcagcaaattcccttatgttatttttttctcctttatttggtgctgatgtgtgcatttgttttccttctcactttcacccataaaaaccgtgaatatcaaaccatagcatatactatgtgtatataaacattgacataattgattttataatgacatatgaacactctcataaggcaaaatcaccatataaggcaacattgaggaccaacagataaactagcaaatgaagtttatcaaaattaacagacaaagaagaagatttgggaaaactcaagcaaaatcagaaataaaaatttggttttgtttagagcacagcatcattctttaatctatttaccaagcccaccccagttgcaaggctctcgcttcttgttgtcattattgttgacaaaaatcagaacacagaaaaagccagaagttggtattagtatctttattccactgtatgcacataaagatatgttttataaaattccctagtagtataataaaagagaaggcatgctatattcttgtgaattcttcaatgtttacaataaacacttacttgaaatgtaggattatgaaaatcattatgaaagactgtatctagatcacgaaaaagccgatgctcaggtgtatcatatctaccatcacatagatccaaaccaccaatgaaagctgttattttccgattattcccagaacctagactgtctacaagaacacatttctggtgatgcgtaaagagggttcccacaacctggaccagatgattcaatcaaattagtattgttttaagttatagctaaagtacacaacgtgacctcattatatctatgactactactaaatgcaagtcttccagggaagaaataatgacattgatggtgacatgaaatagctagtatctttatccaacacaattctaaactcaaatgcaagaactccgtgcctgttgcttgaaaatactgagcttattgcttgcatagcgtggagatagcacacaatgaacagtagaatgtttgaaaaacttcttagtttcttcatcatgagtctgcatgacaccatcctgcaatcaagaaaatcaaatattataatgtacattaatattaaatcttagtgaacaggagtaagtacaaagtttttatgcaaccatatctacattacaataatccatgaaggaaatatctgctaaaacttatattttaggaatcttgaaagcctagcatctcattactgaatgttaatggtgcatatacaagatagtctaagcaaatccacccccataaagaagatacatcaccactatcttttacttcagaacccacccaattttatgctaaataggacttttactttgtattactttatggtatgaaagtaatataatgaatttatttggaaagcagtgcaataattcaggacaaataaaaaactaacttccctagaatttgatgagggaatcaattgacatcatgtttatttttctgattagggtaatgagaattactgttttcaaaagaaacttgtcatgtgaagttctgtcatcccaaatcagcataaccactcggagcccttcttgtgacttgtacttcaacagctctccaagtgaaagctctcccccagaaggcaatggttttgttgcctctctcacaagcctcactgggtggtaaactgaccatcctataatgtatatcaggtgatgagcttccaaaattgcatggcatatgtcctcccaacatttattatgctgaaacacttttccaccctcaagtcgaatttcaggtagcataccatcaggtaaatgtgcatcttgatatagagtcacactccctcctttcctgagagggaaatatgttttaggaactcctaatgcttttccatccccactactaatactttctgaacggttcactccaatttgcctatactgaacagaaatatgcaattcaggataaggttttaagcagtttccatactgaccaatgataggaaaccaatcattaacagtatttcctgcaattatcttctgaacaggtatctccaccactccaatgagttcagccccaagaatatcattgtccttcacaaggaactcaagtttttgagcagggtgagcaacaggcacaataaattgctcatcccacaaagggttctcacagttagcaatcactctagtctgagcaatggtagccccagcaatgcatacagaaacataagggtcactagttatcatcttgtcttttccagagtgtgtctttagtccttttataaatggagggtggcacatgttgcccatagtgatgcattttctaactgtttccgtggataaatctaaatttggaagagacttggcttctattatcaacagatccaagtcaccatgtaagaaaaccggtccattaaggccttcatgctccctgtttggaaagctttgggaaataccaccatgacaatccatttcaacctgagaactcaaaaaagatgcatgttttctaaattagaacactttgttttcaggtgctaaaatccaaattctagatgcaaaaagcattatggaaaatggtttcaaaaatatataacatgcatgttgatcaccttatgatcctttcagttatttcacatcatcatcttttggttgtaaggaaaccatgcctcttcaacaaattctcagaggtcagcatctttgacaaagagaggagcagaagccaatgataagaaataaaagtaaaaaaagggaaaagaaaagaaaagaaaggaaatttgtgtgtatatggattcatgtaacaatgttgcagttcagagcatggtccaacaccacgtccagaagaagcaggagagaggtttttaggcctaaaatggtggcaaatctcgtggaattagaagtttggaacccatctctctcttggtttttcatttcctgaattggcatattccaaacgaaatccatgcatgggaggacaaaattataaacaaatatataaagaaagagattggtgaggtggaagctgatggagagaccgagagattggagacattttgcatggaaccaaggaacttcgtgctctcttctagttacccctctctctccgatacacgtggaaatgtttaataaaaggaaaaaagattaatctatttttaacatcatgaacatttttcacatttatgttttttctccttaaactttataaggacacttaacatttttcaacttttcttccattatatttttagtaatttttatctattttattattattttaagtaatttatcacatttattaacttagtttctttctttccatctctctcttactcttccattcatatctcttttattttgaccatcataattttcagtctttttcctatgttttgattttaaatccttaattttttttttgtctttgctctcaagtaacaacaattttaaatgatgacttaacaacgacgttgataatttattaacttgtcatgttatgacaaatagtcatacaagtttattttaaaaaaattgtgtttgtatgtcctcatatattcaaaattgtggacaaattttatatcaataactaaattaactattttttttataaagagtatgaattacttgaaagagtattgtatgacaaaagaaataataatatggtgagaagatgtgaattaattgaaaatatatattaacattgttcctatcacttctcttgttaataattatcagatatggttcacccatattttgttcaattactatcaaaacctatacacaaaacattacaattgggctagtcatgttacttgccaattgttagggattttcttactttaccatttgaatctcaaatgcaccattcaaattttgtctaatttcaacattgtccttttgtacttcttcttccttcctttcgttttccatttcttcttacaccattcagtttcctcttcttattttgctgacctcctccttccattggctcttggaggtttgttagttacattgttgtggtggtttgttacatgttgcattcacttcgtcgtggtggtggtgggtgttgcggtggcaacatcggaggtaagttttttacatttgcgaaatattgatctatacgggtcatacagattgtcaatacatttgcgaaatattgatctatacgggtcatacagattgtcaatctgtataggttcaaaacaaaaaaaaattatagttaatgaatttgtattatattaacacttaaattttcaaatataattatgattcatttggataaacaatttaattaaagacttattgaatgagtactcatgaaaataatttaaattaattgtttcatataagttgtaagatcttttcaaaagctattgtagagaatttattgaaataaatttaacatagcttaacatattataatctattttcataaaaactttcagatatttacacaagtgtttgtcaaaaaataagttcaaataaattcttttaaacagactttaaataagagatttgaaatgtacaactatgtgatcttatcaaagatacaactataatttcatattaatcttttagttttgttggtacatgatatcaattattagttccattaattaaagattatagatctaggaaaaaaatctcaagaatgaaaaagactaaatactaaagacaattatcttgccaacatgcttaataaataattttcctttgctatttttgatgcaattttagagcgagagaataatatttaattaatgatagaaaaagttttcaaattgaaaaaatatctattaaatattttaagaaattaacctaaaactcgtcaaatatcaaactgtattttactctgcttgattaattatttaaagttaatttaaactttttttactacatttcttaaaatatactacatttaataaatactagtatagttttattttcaatttaagagtattttcttgaagttgtgggttgatttgaagtattagactaatagtagggcaaatttttagattatgattagaatgagaggattacgtcaggctttaggcacacaggttagtggtgatgaggaagaagccctcaacactgaaggctgacaacatcgacacgtaactgttgttgagaatattaggcatgtggatcatgctgccaaagagcctcacaatccagttacggaagatttaggtgttgattcatagggtttttcaggcgggccctaagatacatcagtgttgacatcatatgttgatcatgtagcagctaaagtgtggacatgagaggtagttatttctttaattataacatttaatttttttgtcattttaatttacctaattaattataattatttgcaagaacatattgacttgaagttggcctctcatgggaggaaggttgagaaattaggaagacctgcacctaaattgaagatttagtggttggttcgagcttaagttctctaattacatgttcattggagacaagagacagaagacttttgtctgcttttgcgaagagatgacacaaggaaactaatagttttcatatgcccatagaagagatgagtattagccttgatgatgtggcatcgttgttacatctgcccattataagtgccttccatatctatgatgcaatagatgtagagtaggttgtagaattgttagttgagttgctaggagtgactacacaagaagcataagatgagacgcatcaatgtagatgagacagagcagactgtggagttgttagttgagttgcttggagttgttacttctacccattatatgtgccttccataccaaatgacatgcattgcttaattttattgcatccggttgtatccaaaatatatcacatacatcttcatccttcattctatgccaatgaatatatatatcgagttcatgtaacttcattaattgttacattttagtattactgtctcttatagaagaatgatatgcatatcttgcattgtagaattgcttcattgctgtacaattgttggcattgtggtccttcaaagttaaaagaatattttttgttttgaccatagactttgtcatatcaccaacaataatcttttcatcctcaattaatcgaccaacatatagatgtccactcaatgacttagtcaatgcatgattatgagtaacacatattaagttgatcatccacccttcacctcccaggattggtttcgctcacagcttgacaaccacattttttagtgctagtcatcgtctgtactaaatctatcatgtatgctctatatttttcactcctctcacaatcaattaaaacaaatgaggtctttcctctctttccagttgatgtgtcggacctcattatcacaaccacaaaaccaatatcatacgcaacaatacgagcccattgcaatatgtcatcatgggtagggaacacctacaacaaggacaatacatgtttcgtcttgttaggacatttatttacttactttaactaaatagaaaatcatatcaatacttgagacattagaacaatcaatattgttaaccacaacaggttcctctcccctatcttcattcatattaatttcttcatacataatgttctcatatattcactcatctttgttcatcttaacaaaacattaaaaagaaaaaaatttcaatgacaaattaagaaatactaatgaaattcgatactatagcccatacggattgacatataataattgatacttgtatatacatataataataatttatctcttaataaaatatatccattgttattacttttaattaattctaattattttaaaaaaaatccatatattttaaaaacttcaatgtagaaatttattttaaaatcttttacacttgagaaaaaatatcaatgaaacaatgaaagatactaatgtaacatgtatgtagatatatcaataaatatatattttaagatatagtatgacacaattttattatttttttggtacatcaaattttttagtttgtacatacaatttgtttttttttgttactagaaaaaatataaaaannnnnnnnnnnnnnnnnnnnnnnnnnnnnnnnnnnnnnnnnnnnnnnnnnnnnnnnnnnnnnnnntatactaatatagtaatatattatattgaaatttataaaagagtgcgtacacacacatatatataatgatttatatctaaatttccatatttcattattattttaaatatattataaataactattttgatacttttatatatttaaaaatcaatataaaaatttattttgaaattttctagacttgaaaacactatttatataaacatttaatgttattagtgtaataatatttatacacatatataaataaataaaatttttcttatacaatatgacctatttttgtaatttaactatttctttttaaattcattacaattttttttaaaaaatttataatgcttatacatattggtaatccgtatagtctttacatattgacaacttgtatggactttatggattgtcaatttgtatggacaatacggattaatatttcacggattagtatttcacatatgtaaaaaacgtatgtctgtcgttgtcattgcaacacccaccatgacaatgacgatgaagtcaatggaacaagtaacaaaccaccacaagccaacacaaggaggatgtcagcaaagtaagaagaaattaaatggtgtaaaaagaaatggaaaacgaaaggaaggaagaagtaaaataaaaaatattgaaattaaacaaaatttgaataatatatttgagattcaactggtgcatgaagaaaattccgaatcgccaaaattaaaattaaactcttattccaccccgacccattaaagaggaaagaaaaagattaagaaaaactattgtgcataaacagtaagaaaagcatcatcaaactaatgaattaaggtgcaacaatttcacttgttatcgcaaatatgacaaagtaataaactcacacttcatgatttcagctagctaactagccaatgccaaatcactataacaaaataaaaattgaacatatagatagaattagaatagcaatggataagattacatcatatatatattgatcattcgatctctccctccttgtgtgtctcaatgacaacgtctgacctaggttgagcaacacaggtgagaacccagccactttctatttggtcatcatcaaggaagctaccatctgactgatccacgttaccttccacaattttgccaacacaggaaacgcaagaaccagacctgcacgagtagggaaggtcaatgccttcgtcctctgccttgtcaacaatgtaaacatcatctgggcattcaaactccactggtccttctggggttatgagcttcaccttgtacgaggccatgcaagtgacacgaccacctcgtccacttttcagaccaaaaagagattcaccaacgttggggaatgtctttaggcttgtggtggtcataggttgcctcctcatgaaggaggtgctcaccatggttccggatagagctgctgtggtggccattgaatgcacaatgaaatgaaaaacactggaatatgctatgcacttggtttgtgttttgtgacaacttattaagggtgtgggcttgtggaaatagtgtgcttgcaacacataacaaggtgaagttgcatccaaccctatctgccacgtggcagcattgtatgcatgggtttattatctcctttatcaccacgcaaatagtggttggcacaaccctcgtatcattaatgttcaaatggaacaagttttttgtatggttctgacttaaacaagtttatagccattggatgcaagaggtctatctacttgaatggttttcaaaactccacttcagtaacaggtagggaattacgtacatatgagagccacaaagttcagaaagcaactcatagttgtcacagcagcaacaagatcgaaccattgttaattttataataataaactaaacggtaaagacactacaaacattatttatcatttaaaagttaaggaagcagataagaatgatattcagatgttcatacaaaattcatttccgagacttcatcccctctttacatatattgaatagttgaaacccatgttggggaattagacatcagtccttcaagggacccctattttataaggggatgaaacagtaaccacaagagttgaatattgtactacttatctaaaattatgaagataatcaattacagccggggaaagaatctcagggcttccccaatatagaaaaataatacatcctcattctcaaaaaccctgtggattctacctgtaaacattgttaggttccctacacatgaccagaggcttcctccaaaaatttattgtcttcagcaacaaacctatggaagtgctcaggtctgactcagaaaaccttaatcgcacttgatatttctgtagatcctcctcacgaacaaatttgaacctagaaaacccacagctcctgcacatttaaagataaattataacccaagtggggcttaatcagcactagatacgatatccaatcacataagcagggtgaaaatctaaatcaaattgaagaagacttaccacatagaattcctagtccaagagaaaacattaaagtgtatccaaaataaaagctggtctggaagaagcctgacatcttcgtcttcacatagaagtagtatattgagtacaaatacacataaacagctgttgaggcagctgaaaagaaagaagtccattgccagtggtagttctcagcatttaacaaaaagtatgtccccacaattgtcacacaaacggtaacgatgataagaatcagaaagactagcagcataaagccatacacatagtacacctgtatgccacaaagaaagaaaaaatatataagccaatgtgaaggttcacccagcttccactaaaatttacacatttttttacttaaaaagaccagtttctagtattattttccttgataatgctctgctcttttgacatgcgaataacttttataaccaaaccaataagtaaaaaagaaactttatcacagaaacaagtcatagtagtgccgtgattcaccttgtaattccagaaggaagtgaatacaaaatacatttcaatgaatatgctgccaaagggtagcagtcctcccatcagagaaaccacagagggtgtaaggtaccacttcttttcaggaatgggacgaggaatagtctttacgcgacagggattattcagagcaccactccagtttcttccaacaactgtgccaagaagtgctagagggaaggagatgaaagcccaaatgacaaaaacaaccaccattgtgccaaatggaattgctgctagagacccatagaatatagcgattgtgttcaatataaatccaattccaaagcacatgaatgggaacagagaagctgtaaggatcatggatttaatccagtgtttacctaacaaacagataaaaattagttacataatcattgaaaaccaaaaagagaagaccgagacaaagccacccaaacacacttggagcgaatatacagaaaattaaagaagattcttacccccatttcgggagtacatccccccactcacataaccagaaatgaaagatgtgagagcataacacacaatgaaagtagtgacaatggctcctcgcctgagacaagcaacgaaggaaacttacatgataatcaacgaaagagaaaggagcaaacaacagaaagtattccaactagtatgaagtagaaatagccaactgtgcaagcactgccacatgcttattacatctagtaacattagtacacgactaggttccaatgaattcattattcaaacttatgcttcagtcagttgaaggttatgcacatacccaacatacaacatcccaacaatagccaacaagacgacaagaagaaccagcaacgcaagctgagcacctgtgccaacaacagctgaaagaataactaagttgcgaggaggccgaaaaacatcaccatgcacaagtttccagccagattcttcactaacatctctctcctgtaagcatggaagaaatgaccaaatatttgacaattagaaccacaatgctttctctaggaagaaaggattcatattccacaaataattaagataaaagtcacgaaaccatcaccagactttccaaatcatcatcttcccgagcatactttgcatagtcatttctcagagttcgcatcaatatcattgacaccaaaccagtaaggaagatgaccatcatgaaagagttaaaaatggagaaccaatgaatctagggaaaaagaaaacaaaggagcaaaattctcagtgacagagctatggtaggaccaacatggatgaatgcatagcaattcacaaaaccataaacaacaccatttcaattttaaaagcaaagctgtacctgatgctcaaagaaaggatgatccaggtagacatcaaagcgacgcccgaaagtgatattggtagaatcccatttgacagaatatgtcatgtccaaatgttttcctacttccaaaggctttgggatatcctgagtgagattaacatgaataatctgcaaggaaacagaccttaatatgaaacttaaaggatccataacatgtcataagatagcataagatatttaagtaacttctaacctgatcatggttgtatttaacaataatgtttttgtgtgtataaatgacatgcttgccattatcactgttcttatcaggatgtaactcaccaacatatccttaaaatgaaaaaagaagtgtcttagataaatgactaacatgttaagtacaaaatcatattaaataaagagaaaggagaagaggcagttctggacataccccacaaaggtagatcatctgaacttgtgtttagtgcatcacatagcagaccaaaagaaataagaacagatgctagtaagtaattcagttaaaaaagaaagagaattcaataattattaaattatttaattaaaaacatacaaggaagatcatcctttggaaaaaatcctcacaacattatgacaatcaagacagaataatatcgatgattaattaacactaagttattgaaaatacttaagaaattacttcacacagagttcttaatttaatactttcagttgtaatagtgactatattatagaaattaacactcactaaagtattctagaatgcttatgaaaaactataagggcttacttggtagacaagataaaatataagaataggataggctaagaccataataagcttatatactattcaatgtttgatgtgcaccaaataatctattatatgatatttatgctaccctttgctatgtttgaggtgaattaggaaatgatataaaatataaatgtaaatgacaatattacccctttgcaagatactaatatataatttatatatatggcatatatttaaaaatactatatatatatatatatcataatatttataatataatttttacaataatttttatatagaataagcataagatattttggaaatttccatatactttaggtgttttctggttgcttctgctatacattttgatgttgtgtttattttattcttcatgttaccgtactgaccaaagaaataattttctgcaagcttccaacatttcttgaaagtacaatcattctacaagttgtcaattgtcatagtaataagtgaaacacacaaagcaaaacatacccatgaagaattcaaaccagtaattattctctattgcatccttgaactgtttcacctttgcttcatcgagatctatctggcaaaagacagtcttatccacatttcctgaaaaacaatagcatccattaaagccagtttgccaaccgactgctcttctatgaaatacatagtacgacagaaaccttcatactttggaacttaatttcaagttggctatcgatgagctcattgccacccaggacctcaccaagaccaccccatttgtgtgcagcacttgcactactagatggatgacaaaatgggaggctgtaatagttgtatgtttcttgtggattgttataaggaccaactttgttcacccaaaggttaactggttcatcatgttgatactgcaacaaaataaaatacatccttttaaaaacagaagctgttcaccatttgatactacaaatgaaatatacatatttaatctgtttcaccagctcagtggggaaaaattccaggataacaaatatagtataggggtggggataagcgtcacaactgactattatagaaagaaaaagagaagaacaacatatactaagttattgacatgattaacaatttgatttcagttcactgaatgataatcaattatataatctatgatagtcttctgggagaaatattaagacaccacacattggcaaagcttaaaactctatattttaaaccttctggcaaacatgtaatgggtgtccacatcaattggatatcaaatttatgttagaaaattaaaatccagaatctttgtctaggaagccagttgtattcagagaaccagataacaatgttattagagtaaaaaacatgcaactcataagatgatgtgctgatcttaaatattacttaagtactctaaatcaaactgatccaccattaaaaacttcttatgttagggtagaatttgatttacaaccttgcccagagaatcctacatattacatacattcaattagttacagatcaattttttttcatcagaaccgttccagttctaaaaagaatccatcagacagcagatatgactagcaactgttaaatttgttttaaaaactttgaatcttaaaaatggggtacacaaatagggctataattctccacatcaatcttcacaatactgaaaatagtacagatagataacaaaaacctatatagcttccatgttgacatcacaattataaccaaagacttctaaacaacaccgaaatttcttttctgttctgtccaatttcagacaaccctcttttcacacatctcttaatgggtccttctatggattcaatgacaatggatgcacacaacaacaacaaactaggtaccaaagcctaatcacaatgtaagctcttcccacttcccacgtcactagtcacaatacagcctctcggcatttcaaatcccctccaaaactagctcagcattaattattataaccttaaaaaaaaaaaacagatgatccaagatcatgaactagtaaaaggggacaaagaagtcaaattgaatctaattagcagagaaaaggccaaacaatgaacagcaaacacccacattgcaaagacacctaggtgagcacaagccaaaaacccagttgagatctaacactaggaaaacacaaccattacattacaatcttaaaaccggaagaaaaaaaaaatccgaagctaagagattgaaattgagtgcaagtaagagctaaaaacgcacgcggtaggcagatccaaatcccaatgcagcaaagagagtgtagatcgaatcgaaagaagggaaagggttttgtggaatgaggaattaccttgtgatctgactctgaagcgaaggcgggagaaaggaagagagagaaaaggagcgggaagaggagggatcgggattcgaagaacatggcagtgatggaactagaagagagaaagagaaagaagagacaacagaacaacgcaacaacagaggaagcacgaacggactataatggtaatttacgttgtcgacgacgaaagagaaaataaggttacgttacgactacactgaaatgaaatgaataatgacgatgagtgcaaatttttttcatttcattacggtttttggggtaatacggtgaaaccgtgttctgtgactttgacggtgaagttacatcttgggctatttggtttccaatctatagtccagtacgtgagttacattatggcccatgtattcagtattcacaccccctcccccaccaccaccctttttttcgtctttccactcctcacttttttttctattgtgaatttttcattccaccccattcttcacatttccctcactctctaagcaccctatcaagtctcaaccccacctccttatcttcttccagcatattctcactttctcttctacaaacacttctcttccttgttcctcattctcttcttcatgtgaggtttcgctaccttgtcacttcttcaacaacgttccctttcttaaattttttttacgtgtaattgatttgataaaaactagtttcgttaaatatcttgacaaacggagactaatttcaatcaaggatatttttgtaagaaaaaagtttggggtgtaaagattaaaaataagaggtgtcaatgacattcacccaaattgtatgtttgggggaaggaaagtgatctctacatttacaggaggggaaagttttttcattttatgtttgttggctattaaaaaaatttagataatttttttaggaatcaaaagagttatgtatattttaattatttaccatattatataatttcataaaaaataacatgatatttctatcataataataaaaattaaacttgaaaaaaaataagattctcgtcttccctaatgtaattttttttttagttacttgttaaaaatatttttgagaaacatcattttctatgaatgtaatttttcaaaataataaaaacatgagaaagtaagtttttcaacctattgttcttagagcctattgttcttagaggatgtttgataaggaagaagttttttcatacccaagaaatatgattcatataaatgtataaaatgcctgaaaattaatattaatataaaatatgtaactaaaattttttctccacttgaaaaaattnnnnnnnnnnnnnnnnnnnnnnnnnnnnnnnnnnnnnnnnnnnnnnnnnnnnnnnnnnnnnnnnnnnnnngtgacaattttttattaattgtatatcaaacataaaaaacataatttatactttaagattatgaaaatttttaagaaattcactaccaaacggcctaggaaaacaacatctctagaaatactacaagggcattattcaaatgttataaagtttgtatcaatgaaaaatctaaaattaattgacttaaagtcttgtatcatgtctagatggaaaaaaaaaagacactaataatagttattgcatcgagtataatttaattgttaaatatttattttatatatatatatatatatatatatatatattacttgagttaaaatgtaaacaatgatttattccacacacaaaaatgataactacgatttaattaaaatatttgaataaattaaaattttaaaaagtgtgaaatagatgcctggtaaattttctctaacctgatagtgataaaaatctgataaatatgaggtggagtttaatttttctttccctcgtattataaactcgaacctgagcttgtcgcaactttagtggaaatggagaaaatcaaactcatctcaggaccgtctcattgtcatgcccacgtaataatttcattctatttcattacaattccatttgattttttttttttttatcaatgttggaaaatctttataatttgctcaatcttaatgatttggttctgaaaatttacatttccttcattcacttgtaattactaattgcataagaaaatttataattactaattatatagatgtacacacaacctcggttaatagccacttaatgccgcaaaagtcgtttcgacccataaataattttttttacagtttgttattaattaaaaaaatgtgcttaccatgagattcaacaactaaaagaaaaatagattctttgttgggatccggaaattataattatattaagtatttttaatttctaaggaaatgattattttttaaatttaatttaaatatattataaagaatttaaatannnnnnnnnntaaaaacagaatttaagtataatagattgatagtatgaatagaaagggaaagagaggggagagagaagaaaaagagggaaggagaagtatagagaggagagatcagtgagagaagagagaagatagaagagaaaaaggcacgtgaggagtgaaaataggagataggtaaagaaaatgagcataaataattcaaattattatattttgcatgagatttaagatgttataattttatgtactcaaaatattttaacaaattattagaatttgaaatatttttaaggatctcattagtatgcacgtcaatcaattataaaatcttatatctttaaaaaaaagtttaagttttattttaattactttaaaaatcacaattatcataaaattttaattgaatgataatataatttttttacacttataccataatgtataacaattaaactcacattttaaatatactatccaaataatatatcttaacaccacaaattctaaattttcacataaattgaattactcacttcaattaatcttatctaaacacagctgattaaaaaaaaattatctaaacacaccaagtagttatagtaaaatttgattagagaatcaataattaagatcgtaattaaatatgttatttttatcacaattcttaatttatgatttttttatcaaacaattataaatgcctttatcataactttatctttatgttctgtatattttccagaacacaactgtatagcacgaagatgctacgtgttcactgtctgatcactctaactctgcaagtccaaggatatcaatggaggatgataccttgaagcagaagatcacagagatacaccaatgggagtggggtgtgtgctctgtgtaattgaaagagaaaaagctagagtgtgtgtgtacctttcaccaggaattaatgtgtatttataggtagattacctcataacgggcattggaactgctccctggattctcggcctcgtcctgcacgttctcaacgtccatcatggaccaggtcagcctccacgttccatagataagttattggcacgatcgttcataacaattgggccctggcccaaaccataacagttgccccccagcgcggttgccaagtatacttggtagccgggatgtacaaggtgatttgcaaacttcggggttacactcaaaccgactacaattgatcagactacgattggccgacttcccttgtacggaatctcatctatccacagtgtcccggacaacatatccgaccatgttcatccggatacaattctccacgcgttcggatacatactcctataactgctttattcagtctattttcgaaatcgcgtgaatatccgggtatacgaatacttccgactagacctttggggacatatgtattccgattctgctaaatgtaaatataatcaaatgtgtcgccagccaaacttccgaatagatgtggccggatttgccttggacgagtaatgtacccggaatggtttatggcgtatttgaaacggctgctggacttcctgattcaaatcggttactttttccgtccttaatggcaataaatgccttcattcgtctggtaatgattactgttgtcgtgaatttacttttctgcccttataattggacgtgcttttaccatgctacccctgcgtgtcgtttcattgtggtgactgaaccgtttcctttcgtctggcggttactgcaagttaccctcatatttcaaatttttatcttcaaaatagtttattcatgcctactctttcccttacttgtcacttctgcctattccctgatattacatcctctcttctctttcatcaacttttcgagtgttctcttgcatcttcttcaagttcccccttcattcttcttccattcagactccagttccccaataccacaggtaccttctttctcctttctttctatatcatttagtgttcctgcattatcttgattctgccaatatcaggattttttagggttgcatcgcattttctttccggctttttcttgatttctgggtttttcttcttcgcgttttgtgctcatatcgttcccttccccttcgagtctttcctgattttccttaattttccctaagaatgtctcctgaagaagaggcggagataaggaaaaaatttggccctagagccgcttggttgttgtttggccttccacttcctgcgagggaaagtgaaaacgacccccttcgccgtcacaccggaggttcctcctcctccggaaaacaaaaaatcaccacccctcttagcggttcggtcccttcatttctctcgtctcttccggttcctgtagaccctaagccaaaacccttaggcccagtatcaggcccaatttcttccaggactttatcttctttggactcttctcttcttgggcccaatattgatattggtaacccacaagatctttctttagtagtccctggtcgtcatcctaaccctccggttagcctctctccttcttccgatgaggaatcatcctcgtcctcggttgaagtaatggaggttgagtacgatgcatgtatggattgtgtgtccgaggccattcattatgttcaaataggttccgacgacgtcgctgattcaatctttaggtcatgtcgtcataaccccattttgcgtcctgcttccaaggatttgcaaccgggaccgcatactcgttctgtcgtcgacggggtttcggcctcggtttcttgtgattttaatgcgttacctccaggtacgttttgctaacttttgtttccccacttcattttcgtaggtataatgggtgttacttcggaaactatggacgagtctgcttctgtagagtcccattcagatgtgcccccagcattagcgtctaagttcccttgggtcacttatgaaatccttcgcatttcttccgtcctcgacctacccagcatagtgtcgaccccagtagggaagcaggatgggttcgcccttcaggctcccctacccggtgagccaatttgtgctcaacgggagggtaacaatcccaacttcttcttcttttttcaagatgtcataactcaaataggtattacctttcccttttcctcctttgagattgaagttttaaatcacctccgggtagccccttcccaactccatccaaatagttgggggtttatccgtacttttgaattattttgttcggacttaggaattccctgcacagttcccctcttcttctactactattctcctcatacccctagaacgggtaaggagccttctgatcggaaaggatggatttccttccgtagtcagagtaaacgaaaactcttcgatcctttttcagactccttccggggcttcaaagacaagtactttaaggttgccgcagaacctcatcggcaacccttctttttgtccggccccgagtcatctgatgtggaatgagtttttcctttgtattggtcggatgatcattacaaacaggatcattccaattattgttttgtcgaggaggagctttccgactcggacgcctcttctgttttcgtgatatctgagtttataggcactcatggtcagcctaagacttccgactacattggcagtggtcgtcgaaacggtctgctttgataactgcattttcttagtttacaattgtacttacttgtattaattgtaatgttttctgattgtagccggaatgggatcgcgacctcctcctaaggccaaaactgatgtcgcccacctctccaaaccaaccgaggtcaggggcaagggcaagaggccggccactgacaaacttggtgccccgtctaaaaaacgtggtcccccttcttacagggcgttttttgacgagggtacccaaggaacggcgttagacgcaccgcctgctccacagcctccctcctcaacaactctaaccccggtttcggtggtcgaaaccgtggatcttactgtggcgggaggctgcccacgtactacccctacctctgactccgagcatcttgaaacgcgggtacgctcggacaatttatggaaaaagggggttactgaagagttgatccgtttgaccaagccccccgcatacatgcttaaaccgggtgccccggtgggggaagaactgaccgaaatagttcggatcgaggagtatgccttccgcagtgcttctctggctcgggcgcttacccttgttcgggaaaggtatgtgttctccccatgaccttttatctctacttgtacaatgtatatatttctaagtattcgtgtcgcaggtacggggttgcagtggaggaaaaagatagagctttggaggaaaaggatagagccttgggggaaaagaataaggcctgtgaagaacttgtttcccttgaggctcaacttgcttcccttcaaacgcagtcggcggcggagcttaagcttttgagggaggaattacccaagtcccaagctgttgccgcctccctgcgggtagatttggcgaggtctcaaggttcccttgaagctgccgatcagaaggtggccctcctgacttcatccctcgattctgtcaaggccgacaaagaagcctgcgtccaggattacgagggtcgactagctgctatgaaagcgacctttcgtgatgctgccgaggaaggcttcagcaatgcccttgaacagatcacatttttgaaccccagggtagctatgactactgccgggatgcatttcttggcgtatgtcgaagatgggcaacttttcccccctcctgcatctgaagacccttcgacggctacaacagaagttttgtcgacgggagaacctactcttggtgcttccgttgatgccactgcttccgttgatgccacccaacctggtgccaaccccgtttctgataccactgcgccgcaatctgctactgactcccagcctccaccaaactgaagggccgggatgccggtttttacttgtgttttttattttctttgttgggcccggtgcccagaacaattactttccattttctttattgggcccggtgcccgaaacaattactaggttcgtttatatattgctcaagctctttacttgattcataaaatatcttgtgcgcgcatctttttggttccaacgaccattcattatatttgcatctattgcttattgttcacgttatctgaccataaataacttcactaatgaatctgttatccggcctgatcagggccgtttagcgtattatttatagtcgtaccataccacaaaatcgtatagaatgactcaatacttatggtaatcaataatacttgcatttatattcgttgttacgataacaatatgtgtgtccgagtaggatcagactaacacttaggaattacaacgatataacttattcaacaaagtgaaaatgatgtgctcagaaggtaggcttccgagttcgtatccattaacaatgtcttcatcgtgaaagaggaccatatgggctcggatatatctattccaagtccataccctcgataccgagattgcattgttctactgcctcgtgtacccttgatgaatagggaccatacggattcggatgcaacattttttggatccgtacccctattaaaaagaaggtcgacaatttcaactgtaatatttcttcaatttgtcggcattccatgttcgcttgaccggtttgccttgtaatgtttccaacatatacgcccatttgtctaattttttagtgacccgatacgggccctcccagttagctgctaattttccgtcctgggcatttttgtttccgacgtcgacacgtcgcagtaataggtcggtctccttgaactgtcgcggaaccacctttttattgtaggcgcatgccatctgttgtttcatctttaattcccgggcatgcgctgttatccggacttcttcaatgagtgccgactccaaagccaaaacttcattgtttgtttcctctcggtctcgcagcgtttgactccgtcgccatgactgttgtccgatttcgactgggatcatagcttcatttccgtaagtcattcggaatggggtttccccggttgacgattggacagaagttcggatcccccataggacataatataactgttccacccaggtcgacctggcctcatacattcgcttccgtagagcctccagaattgttttgtttgcggcctcagcttggccgttggattgagggtgctctaccgacgcgaaccggtgtcgaatgtgaagactagccatcatctcttgaaatcctctgtccgtgaactgagtcctgttgtcagttattacttctccaggaattccaaaccgagaaattatatttctctcaaagaatttttgtactcgggccgaagtgattgtggtcgagggggccacctcaatctacttggtataatagtctacggtgactatcagccacttcatctgtccttctgccggtttgaatggacccaaaagatgcatgccccatttgtaaaatggccacggcgccgagatggattgcaattcttcaggcggggataatacccttgaagcgtgcatttggcagttttcacatgacctcacatgttcggtggcatccgcgctcattgtcggctagaaataaccagcccggagtgccttcctcgttagtgccctgccccccatgtgttgtccgttaattccttcatgtatttcagataggatatattctactcgatctggggccacacataccaacaaagggctatgcaatccttttctgtatagctccccgtcaataatcgtgaacatagccgacgttcgtatcaaacgtcgagcttcgagctcgtcgtctggtaatgtccccttctccaaatagcttactattgggcgtcgccaatcatgatcggtggtaatcatcattatgcacgtcggctgcaacgtctgttgctgaattacggttcggttgttcccgggttttttagtgcttgccagttttgacaagatatcagcccgtgcattttcttctcgggggatatgatttaccgtaatctcgtcgaactcagacatcagttcttttactcggctcaagtactttgccagcaagggccctttcacttgatatcgtccttcgatctgagatgcaactaactgtgaatccgtgtacactttcacattcctggcttcctgttcctttgcctgtaagagcccggcgatcaaggcttcgtactcggcttggttgtttgacgttggaaagcctaattgcagtgagatttccgttgctactccttccggattctcaattataattccggctccgctccctttcttgttggaggatccgtccacgtatagagtccaccactctccgatcgtcggggtgtggggggtgagttctcggatgaaatctgccaacgcttgggatttaatcgcgtggcgagcctcaaatttccaatcaaactcggacaactggacggcccagtgggtcaatcttcctgccaagtccggcttatgtaggatctgtcgaattggctgatctgtccgtatgactatggtatggctctgaaaatatggacgcagttttttggcggcgacgatcaaggtgaagaccaacttctccaacttttgataccgcaactcggagtcgcgcaatgctcggcttacgaaatataccggcttctgcgtggactctacctctcttactagaactgcacttacagcttcttcgcctaccgacaagtacatgaccaatgtttctcctgcttccggccttgacaatactgggggcgacgccaaagatctcttcatgtcagtaaaggcggtctcacattccgagttccattctatgacggcctgtttcttcaacatcttgaagaacggcaacgccttctctgctgattttggcataaaacgtatgagggcggctattcgacccgttaattgttgaacttcctttttgctggtcgggaattgcatatccagcacggcgcggcacttatccggattagcttctatccctctgtgtgttaacatgaaacccaagaattttccggccccgactccaaaggtacattttaacggattgagccgtatgttgaactttcgtaatcgatcaaaggtttcttcaagatcctcgacgtgcttgctaacattcgtggttttgacgatcatgtcgtctatatagacctcgatatttcgtccgagttgcgactcgaatactctattcatcatcctttgatgtgtggcccctgcattcttgaggccgaatggcatgacgttatagcaatagttggctttgtcgcctatgaacgccgttttctcctggtcgtctgggtgcattgggatctgattgtacccggagaatgcatccatgaaagacaatatcctgtacccggatgaattgtccaccagttggtctatattttgtaatatcactaaatttaattaaggtaatttgggtgataatttcgtaattaaacgaatttacgaaagggcagtttggtctttgtcagaggggcgggtgcagttagtaattgctgaacgcaccccctgtttcttgttaaaagccagcagatacgttttctgcttgttggcttcttctttttttcttcttccttggttcttctcttctctcaagccctcttctcaccacttccatgagattagtggctgaaatcacaaataagctagaaagaaagctctttttccttgttcttgttgctttgagctttgggtgttggtgatttgaagagaagagtgggtttcaaatctgcccattttcgtttggcgccgctaaactgcgagtgggagccttagagtgctggtctaccctccaatttggtctattgaatcctaaggtttgaaatctcctcctatttcccctttattcttgagttagggttagggtttggagtgagattaataaatgctgagttttaggagggtgagacagttttgatgtgtgatttggagtgggtagaagttgtttttaagttgaaatggtgttccatgcttaaatcaagcatgcaagttcatgacagccaagaacaccacttgggcagttctggtgttttgctcataacaggagttatcggtgtccaaatggtatgaaaccggttccatttgaaagctaagagagttagcttcactctggaattttcgtgctatttttggagtctcctagaaattgtggtgcagagttataacaggctgttatgctctatttttagcatatttttctgctgcagagaaccattttgcagaaagcataactttttctaggatgatccaaatcgagtgttttcagtggctatagaaatatgggtatgtgaaattcatgcctgtaaaatatcagctcatttggacaagtaacctggtgtgggttgtcctcgaaagatggctggttgagttggtctgttgctgtcagcactattttagtgtgtgacagttctggtttttggtttgctgcagaggctgtggttcatggtttttgatgaaaccagttttgtttaaaagataagagatatatcttgatgcctctaaattctcgtgattttaggagcctcccacaaggatttgtgatttttccaagtgggtgtaaaacctgcagaattttatgcagcagtttatgcttttccgcatgttttgctagagatttatgcgttgtacggatagaatggtatttgatatgtgattgtatgtcttttaggacgtgagtccgataccgttggtggtggtagccacgagaccgttggtgattttaggagcctcccacgaggatttgtgatttttccaagtgggtgtaaaatctgcagaattttatgcagcagtttatgcttttccgcatgttttgctagagatttatgcgttatacggatagaatggtatttgatatgtgattgtatgctttttaggacgtgagcttgatatctctggtggtggtagccacgagaccgggaaagccggtgtgttgcttagagcaggtaagctcttggacattgattgtgtgtcctttgcttggttccaacatgctccagatggagaatggttatattgtgatatgctgtatgtgtgtggcacatgtatgagatgtggaatgaaaccctttgatgagggagtactatatatgtatgtatcgaatgtggtttgaacccttggatgagggatgattatatatgttgaatgcgaatgaaaccctttggtgagggaatgttgtgtaatgcatatgtatgcttgaatacgtggattgaaccctttgatgaggggattatatgcattgattgtacttgtatgacaggtgagttgaaccctttgatgagggggataatatgtgtggcctgtaatggtttgtcatgcttgaaatgtaaactgaacccttgatggggaagtattatatatattgtgtatagttaaaccctttgatgaggggatgtgatatgtaatggaatgttgattgaacccttgatgagggcatgttatgtatgaatgtgtagtgaaccctttgatgggggaatgacttacaatgtatgatgaacccattgaaaggggatgatatgtgaatcctagaattggatgaatagtatcctattgtcgtaggatagatgattgagaaagacctggtaagagatgagcctgtgatatggaggtagcctcctacgaggagatgttcccatatacacagaagaagcctccccaggcaatggtagggtgatagaggatgagatggccttgggttacatagaggtagcctctttgatgagagatgttcctatgtacctagaggtagcctcaccaaaaggagatgtgtctgatatatatagatgagcctcgtgagatagagatgtgcctgtatattcagaggaagcctccgctagggatttatgcaggagatgtgcctggtatatagaggtagcctccctgtgaggagatgttcctatatactacgatgtagccttcgcatgacagttattgatgtgacgatattatgtcacgagtacagtctgattgtagtcaggcagtggtttataacctgattgtggtcaggtagtgcttgataacctgattgtggtcaggtaatgcttgagacacttggttgtggccaggtggatgatgatttgatattgtgtttgcttgatgatatggttatgatgatgatgttattatgtgttggaaagtgaaccaggggaaggaaataccttcaagggccctgagtttactgagattttatatctcaccccgtgtatggggctatgttttgcaggtgaatcatcgagcggagcggatagatcccaaggcaagaagcctatgcagggatagctggatctgaaaaccataggctagataacatgagttgtagctcatatattttgtatatgcctttggttttattttgtaccccatagagggaagttatgtacagttttgtataagacactacagttgatgtatattcaccatgacttatgtacagtgtatatgatgacggcatttgttgatgccctgtttatgtttattgtatgcttccaaactgcttaactctgatgtttatctgataatgatagtgcttaaggctaggtaatgacctcggttgtagctggggcgttacatatttgacatgggatatgcgtctttggggcacattttgttcaagtcggtgtaatccgtgcacaccctccatttcccattcggcttacgaaccattacgacattcgacagccaagtggtatattggtagggatggcaaagtgggccagcccacccaaaaacgggccgggctggcccaacccactaaaaaagtgggccgggccgggctggcccacttttgcaaagtgggctgaaaatactagcccgccccactttaaagtgggttagtgggccagcgggccagcccacttaaaaaataaaaaaaaatattttttttaaaaannnnnnnnnnnnnnnnnnnnnnnnnnnnnnnnnnnnnnnnnnnnnnnnnnnnnnnnnnnnnnnnnnnnnnnnnnnnnnnnnnnnnnnnnnnnnnnnnnnnnnnnnnnnnnnnnnnnnnnnnnnnnnnnnnnnnnnnnnnnnnnnnnnnnnnnnnnnnnnnnnnnnnnnnnaagcaagcacgaaatacatgtttaacaatggttttcaattagctcctaagtcttaacaaattcttagaaatttgcttcacaatgatgcagactatcaaaacataattgtacatgtagtataactcattattaggttccaaataaaaatgtattagggttaaggattcaaaatcattaacttctttttagtcactctccctctaagtcactcatttaattacctattaaatattttattattttttattggtgggctgctggcccggtgggctggcccacccctggcccacatttttgtgggccgggttggcccgccccgtttaatgaatgtgggctcaaagtctcaacccagcccacattttttcgtgggttaaacgggccggcccgccgggccaggccctttttgccatccctatatattggacttcgcgtatgaaaccggcctgcaacagctcgtcaatatgagcctgcaaggcttgagctctctctggtcccaacttccgtttcttctgttccaccggtttcgatcccgggtacattgccaatttgtgactgcagaactcgggatcgacaccgggtatctctgacgccttccatgcgaatatatcatgatttttctttaaacaatggatcaattgctccctcagttcgggttccaatgcttcaccaatgctggtcacctgatcggcctgatctccgatcagaatctgcgggttccggtctccactcatccggggcttctcgcatatccagttccacgacatttaccgaacgtacccggttggagctgtcatcgttggcttctctttcactttttcgaaccgtatcgtagtaacattgtcgagattctttctgatcgccgcatatggttaccacctgtctgttgctgccaacgaacttgagtttctggtgttttgtggacattaagatgtcccacttatgaatggttggtctccccaatatcatgttatattgggatggaaagtctgccacgacgaattccacttcttcagacttgtaagcttctctcgtccccatggttaaacgcagacggatagaccccatcacattcgtgttgccgccattgaaaccgatcagcattgttttgcacggccttaattcctttacatccaatttcatcttccgaaatgcattcaacaggattatgtcggcggaacttccgttgtctacgtacattcttcttacccggcaatttcccaccgttgctgatatcaccagcccgtcttcatgtccgggtaccaccccctccatgtcttgtttggtaaaatacaagagtggaggttctggctttccaatccgggctttgaatttgggttgtgcctggaccgatagcacttctttcaggtattttttttctttgagtggcagtatccccgccaccgcccatgcctcctgagattacgttacattcgaactcgggctccgggaactcatcgttatcttcccggggtttctttccttcgtctttatgttgattctcgtctcccttccgtttgttcttccttccttgtgtccgaatgacgtactgtttgagtcttccttcccggataaacttctcaactgcatcccgcagatcccaacattgatctgtggtgtgcccgggtccgttgtggaattcacataatcatgatttatccaatccggccttgttgaaaactggacggggttgttcaaccttcttcatctctgtaagcgcgacctccttccagatttgtgaacgggatacgttcaacgtagtgtatttctcgtacttgttttcgtatctccctggtcggagtttcgggtcattattccgagctcgattctccgggtatcccctatttttcggaggtgagctcctcctttcatgacgctcctttcctcgtccagagttgttgacgacctccatctgttccaattccaagtatttctttgcacgggcacgaaattccatcaaagacttcatcgggtccttataaatggatttggcaaatcttgacgaaccgtcgagtccagccgatatcaagtatacgtggactcgctcttctaacccctcaacttgcagggcggcctctttaaatctatccagatagctctgcagcgtttctttgggtaactgtctgactttacccagggtgaactcggatttcggctgctttttgctggtcgcaaaattcaataaaaatttctggccaaagtcttcaaaattctttatcgacctaggcggtaaagtgtggaaccacgtctgcgccgggcccgtcaaagttgtgacgaatatcctcgatattatgggctcgtcaatgccccggacacacatttgcaaatcaaattcattgatatgcacttgcggtcctgtgttccatcatattttgataggaaagacccatcaaagtcgtccaaatatctagcctttacaatgtcgtccacgaatggactattgttttgctgtccccggctatatttccgacgatacactggtcctgcttttttcgcgaaaattctattctcccggcttatcgtgtccgccgttttgcggaaccttctcattgtttgccctgaaaatgggattgtcgtcgtgtttcgttcgtatgttcggattttcgtcagggctatggtttgtgtcgacttcgtcttgtgcctcatttcgtgcccggctttgactctgatgcggctcatctgtcctcctttggtctcccgggtcgacatctcgtctctgatttatgtgtgtcctcaaatcttgtggctcctctatccgtctttgactctccgggtccgtacttcttctttgattcaggtgcatcctcagatcctgcgtctcgccctcaggatttgaaatttgtacccggtcagttatcattcgcagctgctgctccaattgtgccattcgttgcgtttcggcacgtctccactcctcattacgttcttccatttggcgagtaatgtttcaaatgtcttcttgtctctgtaaattttgtcgtttctccatgttctcaattcgggttaggattgaattgaggacattgctgacgagttgtcctccgagctccccctcctgacccatccttcgcactgctggagtcctctgttggtctgtctgggcgggagaggaagcttcgtcgaaaacagcttccgtcacatgtacttcttccctccgtgccacgttctgattctccggtaggcaaatctccctgttcggcgtctctgaatgtggtacagagtggctatttcttgtgtttaccattgtggaaaggtgtgggactcgaattttatcgtttccccacagacggcgccaatgttctgtatatttcccagaacacaactgtatagcacgaagatgctacgtgttcactgtctgatcactctaactctgcaagtccaaggatatcaatggaggatgataccttgaagcagaagatcatagagatacaccaatgggagtggagtgtgtgttctgtgtaattgaaagagagaaagctagagtgtgtgtacctttcaccaggaattaatgtgtatttataggcagattacctcataacgggcattggaactgctccctgaattctcggcctcgtcctgcatgttctcaacgtccatcatggaccaggtcagcctccacgttccatagataagttattggcacgatcgttcataacaattgagccctggtccaaaccgtaacactttagtttattatatttatctaaaaaatcttcgaatttagattattattcaattgattttcccattatatcctgagtttgaaacaacttcatcactattaatatatatatatatatatatatatatatttgcaccgttttttaataatttagctttataattttgtctcagttaaaaaaatctcacatcttcaataaagttatattttattatccgttttcctctattaagatacgtgattatatcactattatctaataataacgataatatttctatctcttaacttttttatttatattcacactttggaagatttatattgaaaagtatctctctaattaatgcgcgtttttcttcccgcgactgatcatttaacagcttggctatttatctatatatatatatcgattagagtttgattgatcagtgatttgtgctagtgcctagttagtagttattggctgatcaagtgtggtgttagaactttgaaaaagaaacagaaaggaaggtgtgtgtgaatatggagaagtacgaggtagtgaatggggacataggggttgggagatacgcggtcatacggcttatgcgtcacaaagaaaccaaagatctcattgccgtcaaatacatctgacggaaatacatctgacgggaagacaaggtaagttgctacttatgtaaacacctgtattttgttttccgaatgatttgatggaggaaagggaaatcataaaccctaggagacgaatttttattttttattattattattattataataataatattgatatatctcttttgtttgtaactaatatttattagagacaaacgaccgtactgccatggaaggaaaaaaaattaccgaaatgccacacgaccaaaacatattatcagactgtcacgtatcatatttcgttagacctctcagcgaactacacatcacataattcgctactctttgtagctagcaaggtatgctgatatgacataaataactactgcactttccaataaataattgcctccactttcctataaggctataatatatttcatccatttatttttgcatatctttttaaactaaattgaatggtaaccgacatatttttattcaaaataattttaaaataaattgtattattttacaaaactaatttagttaatagaattaattttcaattaaataaaaaaatatttgaaaaaaatcaaaccaactacgtttcaaattgtttcacttattttttttttcaaataattgttgatttaaaattgaaatatcttgaatcaattttaaatttataataagaattagaatcattttaaatagattttttaattttttttatttttaaatattttttatttagttaaaaattagttttattaactaaattagttttgtacaacaatacaatttttttaaaattattttgaataaaaaccgatattttgaatcaattttaaattgattataagaaatagatcaatttttaattgattttttttactatttttttattttcaaatattttttatttagttgaaaattatttctattaactaaattagttttttaaaccaatataatttttttaaaaatcattttgaataaaactggtattttgaatcagttttaaattgattataaaaattaaatcaattttaaatagattttctaaatgtatttttattttcaaatatttttttatttagttgaaaattaattttattaactaaattagttttataaacaatatagtttttttaaaatgattttgaataaaaatttgtctcttaccatccaatttagttgaaaaattttgcaaaaataaagagataagatacgttatgaaaaaatggaagccgttatttattggaaagtggaagtagggaagcagttatttattggaaagtggaaataattatttattatatattatacgtaattcgctactccttctagcgaattatgtgctgtgtgtaattagctaggaggtctagcaaaatatgacgcgtgacaatctggtaatatgttttggtcacatagcatttcggtaattttttttttcttccgtggcgtcgttgtctctatttattaggacttgactgatatttttaatgaaaatttttctttttaattatgtttttttcatctataatatttgaatttgagattttgtttaaggaattatttatttatttctcaaatatgggttaaaaaaatttcttctcacgtttattagttggtaataaataattattatttagtatatttagtgttcttaaaatcggtccgtctcgactatttggaccgattgggtcaagaattagtggcctaatcggatcggtttctttattgaataagttgtgtaattgactcgggatgacccgatcaaatccgaccaagaagatcaccaaatctcagttggactgatttaattatgccggttttataactttttttatttttaaaaattttattttttaaaaaatttggattattatcaattgttattttggattttggaatatagatagacttttcttaatcaaataatattatataattttaaatttttaatatataccgagataaaatgagtcaaatcaggttaattaaggacccaccgattagaccattggtctattacctcgatcgggtcaatgatcggatctgatttcacaactatgggtatattattcatttttaaaatatttaaaattatatttttcatcttatattttaaaaaaaaaatctcaaaattaaagaaataatctgtgaaataaaacgtgacttagatctcttgcttttaaaaaatacaaacacccattcactttaataaacattgttttcaaagcaaatttaacacttttttgcagattattgagaaggtggcaagggaaatcgtaaaccttagatctcttcgtcatccgaatattgttcggttcaagtaggtatgatctgtttttactctccctctcttctttcaaaatatttgcttggcttctattattataaaatatgaggtttaggttaattttcataaaagttaataaatttatcttatataataatagattgtgattgatcagcgataaaataaaactgttttatatataatgtcagactataatatattttttcataaaataatagcattgggtaagattacaaataatataagtgaaaagtataacagtgaataagttaaattttaaatgaaatcaataatacaaaagattagaaatattcaatgaataatattaattggtcattaatgtctttaaccactcgttatgtgtttatacagtacattagtattatgttgagataatttgttctatatggaatttgaactttgaaggtggccttgactcccacacatcttacaatagttatggagtatgtagcgggtggacagctgtatgaccaagtttgcaaaagatgtgacaaatttcacgtaaaatggttatggagtatgttccagattcattttggagtaagatttgacaaatttcatttctacaatgctatttttttaaaaaaaaaaattagaagatttaatatactttagagaattttaaggtgcattttttctaactattttattctgattaaaatgacaaaacataactcctatgatatcataaagttgaaatcttttgatgtcattgaatttcatgattgaaaatttcatgttcaatttgacatgaaagaaggtgacatattctataatgtgttaagtgattttacatatattattgaaaatgtgtatgaatattaatgaattaaaagatgaaactttttatggagattacttgttaaactctttaaatcttcgtctagctatatagtgaatataagattgcaaaggagatatgagatcatttgagcactcaattttaaaaacaagagagactttctaagagtcttctagtatagaagttctttgactttaagtttaatatgaattcaaacatcacttctcaaataagtgaacttgagaacatgaggaacaagctaaaagaggacaattttgattggtctattaatctttttgttggtcttatgttgagtaagctacttgttgaatgaaattcttttaagactgacatgcacagactaaaagaacagataagactggatgaacatatgggattggtcttatgttgagtacctactgaatggattatcagacaaatctcatatgttcatccggtttcatctgttcttttagtctgtgcatgtcagtcttaaaagaatttcatttagcagatagcttactcaacacaataccaacaaagagattaatagataaattagaattgtcctcttttagcttgttcctcatgttctcaagttcaattaattgaaaagtgatgtttgaaattcatattaaacttaaagtcaaagaacttcttccctagaagaatcttagaaagcatattttgcttttgaaattgagtgttcaagtgatcccatatctcttttgcaatcttatactcattataagtgatatccagacgaggatttaaagagtttaacaagtaatttatacaaaaatctttatctttaatccattgatattcatccacattttcaacagtagatgcaaaattactcaacacagtgtagaacatgtcacgttccttcatgccaaatggaacatgaaattttcaaccataaaattcagtgacatcaaaagatttcagctttatgatatcatagtagctatgtttttccattttaatcagagtaaaatagttagaaagagtgcaccttaaaatcctccaaaatatatcaaatcttctaacgttttttttaaacaacattatagaggtgaaatttgtcaaatttgaccttaaaaatgaattcgaaatacccaaaaaaccttaggaacgactttttttgttcgccagaaagtcgccggtcgctagaaaacaaaccagtcatcggaaaactgtagaaacttccaatgactatatctcattcgtccgaccttcgttttacgcaagtgaccagtcaaaatgatcgtctcggagagtagaacaaagtccgcaaggttttaactcatgaaatcggttgaaatttttgggatctggattcaaaggttgcggcaagaaagttttcaaactcagatcccggttaatcctttcgtcaaaacacgaaagtgataccacctttgagttgctcttgatgagatcttcgaaataacaccttatttgctcaaatccgacacacgaagctaatacttcaagattgttagaggtaaggagtttgagagaataatttagtgttggatgcttgaagtattacactaagagacatcaaatgtataatgttcaatagtgttaccttcagcaaaggaagaaccttaatgatatagtaaactattggactctaacccatatggacccatataaacatacattaacttatcatgtttgtatgtgaacatattatttatttattgtttaaatatatatatatatatatattaaatatattcaactaaaagtatattactgtatttcatattatcaatgcattttcataatgagtttcaatatttatttattaatggtataaccatatacagtgattaacaaaactgtattagaaataatagtggggtgaaaatgctaaacattcttggattaattaatataaaataactagagtatccaaaaaattgatattaatgggtatgttcggttagaataaaaaggttttgcacagttgattaattagataatttcaacgaataataaagaattagtttgaaagcttgtctggtagcatttctcttctataaaagtataatataataaataaattccaatgttcacaagtcatggttactgttcgtaatatgcaatttctttctcattcttcttgtgtatacatatttcaggctcgatatttcttccagcagttgatttcaggagttaattatagccacagcatggtagatgaaatacacattagtacattactatgagaacgaattgtaatttgttttcagtgtgttggtagtgatatgtttttttattttgtatgaaatatgtcatcgagatttgaagttggagaataccttattggatggaagccctgctaataatcttaaaatttgtgatttcggatattctaaggttcaattgacaaaatcatatataccaaccttgaatgcttaaacatataaccaattaaatttaaatatacattatttgataattttttcttctgacaagacaacctttacttttctagtcatacctacttcattcgaggcctcattcaatgattggaactccagcctatattgcaccagaggttcgtaatactacagtttctaactttagatcatgaaaaagactagaagattcatgttgtattaattatagactgatacaattattcaacagtcacttagcacacgcagtgacatttcctttttaaagtgaaatagaaataacatattttagtgactactatgaagcacttaaaatgccttagagttactgattctgacttgatgagtttctctgtattatatggtagttttgttcattttttggctgatgtgttactgttttgtacctgttcagttggcagatgtatggtcctgcggagtaatactttatataatgctggtaggagaattgccatttgaggacaaagaggataccaaaatctccacaaaaccataaaggtaatttgctttatttttttaatttaatttttatatactatcagtataaaagtttttagaccgtcaagtgtcaatcaatcagaaattatcttaagtatgacttaagataatcattatagaagtgaacaaacttatgtgaaatctctaatctctttacaccatttagtacatatgctattttactttttatttttgaactagctctgttgatagattcatgaatcatcatgtcttatatgtactctttctgactccctatgtgtgtgtgtatatatatatatatattatccagagagttatggctgttcaatacaagttccctgacaaagtttgcatatctcaagacagtaaaaatctgatatcccgcatttttgtggcaaatccagcaatggtatgtatatgaacatagtcatttaattattttttggagggaacattataaaataaaaacacttataactgtagcatgatattacttggtgtatgttattgtaactatgccttataattatgttgccgagaatcatcatgaaggaaataaagtcactacatccatggtttttaaagaacttgcctaaggaattgagagaaggggctcaagatgtttactacagtgaagaaaatacaaaatatcctcttaaaagtatagaagagatcatgaacattgtcaacgaggccaaaactacacctgcaacttccagtccaaatctataagagagattgattggggaagggaagaaatgataatgccgaggtagatgaaatcatttatgagaagcgagtcaaggaagcaccaaccatattcatttttttggataataaattagatttgttgttcacttatccccactaacttaaggtaaatgttttgcctgtatctatgtatcaaattttagttttatgacataaagttgaactgtacatttttgttgatatggtacaaagtttgtagttgagttgtgacagcattattgtgatttataagaggtcttcgttttctccctctgaatatgatgttatgttcagtcttcaaagcaatgagctatgctaggaatagatgacacattaacacatcacttgcctctatcttgcgcagtgatttagggtcagattgctatatctacatttatttggccttttcttggtttttgatttctttgagaagaaaactatataggggtctaattactagttgtggatgcaagtattatgattgttctgttaccattttagaaagaaatctttcatgaaagaaaatagaatgaagtaaagtcaaacgaaagaatttcattttttttcttttattttatcacaaaatcttcaaataataaaataacaatttaaatatatttcctggtgcattttctcattttcttcaatttcttccatcattaaatatccaaacatagcctttaatgcttgtttgacatctaaaatgcaccattataattataatttcagaacaatttcatgaaattacaaaataactaaattgaattactttcaatttttaatcaacaccttaaaaattgttgcatgtctcagaagtacaggtggataaaggttcgagcaataacctgacttgatttttttttttttgagaaatctgactcgacttaaagcatgaaggatagatgaggtagggtaaaaaatcataaaactcgtttagtttcagtcaatattcaaacctttccaatgaatattttaaaacctttatttttcaatgcaactacaccctattcagactaaacattaaaattcccaaaaatcaacctgatcctaacctgcctactttaatttaattggtttggaacaaaatgatccgtctgaccttgcttttgtcccccgaattaattctcaggttcatgcatatttctccatgttagatagcattgctagtccaactatagtactatacctacgtgttcatcattcttaccatatatcaatgtaatttagtcacacattaattctctttttcatggaagctgtaaattgtaattacatacttggtcaagattaatctcaattcacggcaagaaataaactgggaaacataaaaaaacacaagggaggtggtggtacgctatgttaggacatttgaaacgtcaacttcctttggcacatacaatgtattttcgcgaaaagtaatcactaatgctcctatttttacaacgcaaatgaagcactttttcacaaattttcaatggagctgccacggacgagactttgatagtgacccttattgataaagacaagcgtattatttacaaatgaatattggagtcgacattaaggggattatgcttggatctctttgtgataactgattacagaatatgtcatatctattctttcatgcttatatttgtttttgttatctttaatccaaggtaataatccatactcctattttttataacttttttatttatttatcattaacttcatctattataaatccaattagtttaagttaaaaatattattgatgttgatctttaactgattcttttgagtcatttatgcaatttttaaatattatattttttaatgaatttttaaatattataattaaaccttcggttattagctttctaaattcgaatttctgcaagaagaaaaaataaaataaaaaaatgactctgcccttgagagttcgagagttctttttgcttcatgcaagtaataattgggaaaagattaactataatcgcgcaacaaaatctttgcctgctaattgttgatatatatatatatatgagatgggatcattttacaccgtttaataattttttattggataagtattttacaaaatccaccgttagattgaaagcttatatcatgtagatcacatatatcaaatttcacaaaaatctgaaataatttgaaacctaatcaaaatagtctaatttttacataatttagaagtacatataccgttaatatataccgttaatttttatatatatatcaattaggtttcaaatgatttcggatttttgtgaaatttgatacatgtgatctacatgatataagcttttaatttaacggtggattttgtaaaatacttattcattaaaaagttattaaacggtgtaaaactataaagttttacaccggtataaaatgatcccatctttatatnnnnnnnnnncattaaaactacaatatttttctttttttttatcatagcattcatcatatatgttactttatttttctacctttccttttttcttccaatttttctctatctactcccagttcattccatattaggatggataactcattccttttcattaaggttaaatttaacaaaatattttagtcagtttttagtttttttactagctgaaaaactcgataaacaaacttattttaataacttcttaatagattctaacatttcttgaaatgtcatttaagtaatattttttaaaatgnnnnnnnnnnttatatatacatatatataggtgagatttgactttaatcattgcagactctatactagatatttttaacttgattgttcaacgagttacttatttttaaatattattactttttattattattggagatgatctacatattatattatattagattacttaaaattaagctaagatagtttatgagtaaaaaaatattttcttgttatttagagattctttaaggaaataatttaagaatcacttaaaattatataattggagtaaaatatgaattgtttattaactatgatgtgatattataatttataagaataaattaatataaagtaaagaatttaaaatgaattatttaaattatatcgattaaagatgttgaaagtaaactatttgacgcactcgaacggaattgaaagccaagctaattaatatcctaatcttgaggctaaaatactaaactgtcttcattcgttgttgttttatacaagttaatttacttttctgtttggatttccagcattatattactaaagtttgattacgagaaaaaaaattatggcctttaaaaagaggaggttattaaaggtgggacaattattaaaaaatcaataaaaatatagtatttgtaatgtaaannnnnnnnnnnnnnnnnnnnnnnnnnnnnnnnnnnnnnnnnnnnnnnnnnnnnnnnnagaggaggttattaaaggtggggcaattattaaaaaatcaataaatatatagtatttgtaatgtaaaagtttttgactatatcatttagtgcatatttggttagaggttactattggttgtcttccgtaattttggagaagcatcacctttattatttctatgctaaagtgcattggtattcccactatttaggttttaataggaatctaaacatattcttaattattgattgttatgcattataagattattaactcttataatcttataatattacctgtagaataaaatataagaaaaaaaataatatatgctagaaatannnnnnnnnnnnnnnnnnnnnnnnnnnnnnnnnnnnnnnnaaattttcttattatcttttttaaataaattatgatttcattatttttatgttattttacatttttcagctatttcaataattaattttagtgaaactaacttttcaactagttttgtcaaatataatctaagatgtatatgtatttttgggagttacaaacttgccttggtgatgatgaaaaaagaaagaagagaggaaaatataatttattcaatttcttttattaacaaaaaaaacttaacaattaatatttttctataaaagttgatgtttgcatttttattccctaaagtaaacctacactttaaaaaaggtaaatgtagagaagaaattcctttcattccccgaccgttcaccttaaacatgataaatgcatatgagtactagatttcccccgccgaacgttattaaactaaattagcactaggccatccttactttaaagtaaggaaattaattgaaaaacagtagaaaattagatatccaaaaaggaggtgaaaagagattgtcaaacaaggtgaaaaggaaagtttgctatttcattaaaatataaatttgttgtctaaggttctccctttgtccagtgagcagacagcataatcctattttctatgttataaatcattatcatatctactttcttcttttcccagacaatcaatttaactttaacagaggaagatctgttcttgttgttgagttatcaaccacccttgggactagaaagctttatttgaaaggtagatttcacatagtacttcatatttttcggctttatatggctgtcattcttggagaaagtttttctcttttgtgtcttatgtcttaaccatgtctgcagataccgttaacctttgcagaaaggctagattattttccctacataattctgtttctcttctttacaagctaaaaacgacccatttaaagacaataatacaatatagcaacacgtttatttgagtcatgatctttaaaaatgaaatctaacaaacagaaatttctttaacctgcagaatagcatgtatattcgggtaactgggtttttacaaggagtgaatggtttgagtacatgaacgtgcggtgcactatggtttattggtccaaaattttcttacatttaattgatttttattgataaaatctgcattatgatagaatgcaagtgagagtaaaaagtctcatattggtttgaacaacatataaatgacaaaaatatatatactcgatgtcttaaggttttaagtaaataaatgttaagtattaaatttatctgtaattgactcatgatttcattaacaaaagtttcttcaatattttatctccttgtattccgtaacatattttttttatatatctaatgtaaaatacagatgaatctgttcaaaatattgaatatttcaggatataaaatttttattcaatattgagatattgagtggaaattctcccacacaaagatagtagaagcatattgatctctaattattcttgacaaaagattctacttgactccattgataaagaaaaagcatcatttttattatcaaatatcatctagtcttttgaattctatttttttttttttatttctttcccatgtacctaatacaggaaaagaatactactactctgtctagaaagacgtttctcttattacttgaaggcattggcattttaaaattctggtttctcatgtatgacgagagtaatgttgctttacttcaaagcaagcatcacattctcttttgcaattttttttttctcttttctttgcttttcattggaaaagcttcttcaaggcctcaacaccatcaactcagcaaataaagagaaacaagggaagaccagaaaaaatttatgacattgcttgcatttttcaacataatttttcctttcttattttcccttaaagagcttcattttgctctcaagtatttttccacatttgctatggcttcactaaaccaaattatatacatctacttatgactacacatattcaacaacttcttccttccttccacaatttcatcaaagaaatcatcaagttgccctgttatagtctcaaccccacatctcaacaacccaaagcaacgtttcaagttgtcaacttttgcttggatctcatattgtgcatcataacccaccattctctccaactccactttcaattcctccatggcaatcttggcttgtttgaattcaagaagcagaatccctggctggacattattctggtcaatctcttgtgcaactttctgctgcaatcttgccatagaagccataaaacctgagccataaaccacgtgctccacgtgcccctcatacccttgttggtcaaagcatgaggaagaccaacaatatgcaaccccacatagcaaaatcatcagaagcaatgagctaaccctcatcattgcacaaagaacacctcggaagccattgaactcgtttaactttgatttcatacacatgttctgatttagacattgagacaatgcctgaattctattttccatcaagcttttattttcctctaccaatcctagactctccctttgacaaatatttatggccctaataacctgcaatatatgttttctagaagaatttagtgcatgtttggaaactcataaaaaaaacaaaaaaaatcacatcaatttagcttaatgaaagctataactattagcttctgattaaacatgaaaaatcacatctgaaacgtgcaatcaaaacacgctattagagtcattaattaaataaagttgatttagttttgtaaaagcactactaagcttttgactaaaaagtaattttgaacagaatttgaggtgtatatatactatataccaacctgatgtgaaaactctggagtcaaatgatggtagccatccactgaggaagctatgttggagccagttaaggaatagttctctattccagaaatggctgatttgagtacatggcagatatcccaaagccttgagctttcatccatgtattcattcagccattttcctccaactgacaagcaaagcctttggaccaaaatggttaactgggaatggaaggattggagggatgagaagacctctgaaatgaattggattgacatgaagtcatgggagaggaaggattggtgaagctcattgagtccttgagtgaggaagatgtagaagccattgacagaagagtttgtgcatgaagaactactcatcatgaaaggttgaagggaagttgatggagattgatagatttatataattggaagattaagttgaaaagagattaagcaatcaagaaagtgggtagcttagaggattctaacttcttttttatggtatggtgaaagttactattgggtgtaattatggctgtttcctatagagtggagtggattttttttttttcctttccaatttacactatttatctccaaataattctcaatttacattacttcttaatttaattctcgaaatacactatttttgagaagtcatgtttttaggatttgaattcccatctaagtttttttttttggtaaatgttatttttattaaatttaatttaaaagaataattttgttatattatttaatttaaaaatgataatattttttggtttaataatttattagtaatcttaaaataattaattaatagtcttaaaataaataaaaagagcaaagtgattaaaaaaataagttgattaaaaacatagtgaatatatagttatcacatctcaattatattatataaaaaattaaaacactcaaataacaaaaaatactaacaattagagagacaaacataataaatggaacataataaaacaataataacggaatgtactaagaataacaaatgaaacacgaaaatgacgatcatagtttgaaagatgttatgcaccagacatgttttcttccatttaaatcattctagcgagttgtttattatgcacaacatgcatcggttattgcaatatgttgattggttattgagactggtttggttactagtttgctaaaaatagctaaaatttatattggacaagaaggcttctggtagttagattccgctaatatctttaacacgtcttcatcgtttttcaattctgttattttatattcgattattttttttgaatattttgtatggcctaattgtcaaaagaacaattttctgatcacctgtgattggtgacttccataaggaggaatccctagaggcacaactcgcttgatgacatccttaagtattttgatgcttcatcttgaaggaatttcaaatcttattaggtttgtttcagtgaaggagtaacctaaaaaactaccttgtcgtggtatctttcacttgctattataatacaacattgcatcatgagtaggaactagtgatggtggatcgaagtaggttgagtatagtatcgggtgttctattgatgatataggttgagtatagtatagggctaacaagcggatatcgcttattgcacattaacattggggatatttgtgcgaataagccaagtgtagttgaatgacttgattaattgtacaaaaaatattgggtaaccagtatccttggttaattccatgttcaaannnnnnnnnnttttttttttttggtaaatgttattttattaaatttaatttaaaataataattttgttatattatttaatttaaaaatgataatattttttggtttaataacttattagtaatcttaaataattaattaatagtgttaaaataaataaaaagaacaaagtgattaaaaaatagattgattaaaaaaatagtgaatatatacttatcaaatctcaattatattatataaaaaaattaaaatactcaaataacaaaaaatactaacaattagagagataaacataataaatagaacataataaaacaaaaataactaaatgtactaagaataaaaatgaaacacgaaaatgacgatactaatcatagtttgaaagatattatgcatcagacatgtcttcttccatttgaatcattctagcaagttgtttattatgcacaacatctgcataggttattgcaacatgttgatcgataattgaggctggtttggttactagtttgctaaaaataactaaaatttatattggacaaaaacacttctggtagttggattccggcaacatctttaacacgtcttcatcatcattctattatttcatattcgatttttttaatattttgtatggcctaactgtcgaaagaacaattttctaaccacatgtgattggtgacttccataaggggaatctctaaaggcacaacttgcttgatgacatccttaagtgttttgatgttgcatattgaaggaattttaaatctttttgggtttgtttcagtgaaggagtaacccaaaaaataccttgtcgtggtatcttgcacttgctattgtattacaacattgcatcatgagtaggaactagtgatggtgaatcgaagtaggttgagtatagtatcgggtgttctattgatgatacataataattctataaggtcaacaagcaggtattgcttattacacattaacattggggatatttgtgcgaataagtcaagtgtagctgaacgacttgattaattgtacaaaaaatattgggtaaccagtatccttggttaattccatgttcaaaggcacaaaaatatttgtctgtgtcattgtttgttgaggagacgtattttaagaccacaaaactttttgttattagaggtcgacaaatacaaacaatgatcaactccggctcgtagtattccaaagtcgtctctaaggcaataaatagcggtcaacatgaatcaaatacgcacattgttaacaaatttgacaaacacaacaacacatttattgtaacagagactcaagtcccacttgaaactcctatatcacctggaaagtttagggttatgttataatcctagaattgcgaaagtggcgaatttcagactaagcacttatcgtgttttcatataatgaatgcctataaatctgttaatgttgatcccataaactatgtgccgctatttactttacaaaacatattgcacgcgtctacgataactcctttggtttactgtcacacgaattaatatgacaagaatatgaaggagatcaatgggtcatgatccaaggaaaaggaagagtgcaaagggtagttcagtttcaaattacattcccactgaaaatggatgaagaaattgaacaagatataaaaaaaatgtgaaatatatcaacaataatgtcataattgaaaaagttgttattattgttcatgtattttatttatgatgtattatggataaatataaaatattaaactaaaaatattatcatattctaaaaattaaataatataaaaaattaattaaatttaacaaaataacattaaacaaaactcaataaagaagttgggttaagcgaaggtggagaatcggatctgaaaacagaaatttttaaaggatagtatagttcagaaattaaattaagaagtaatgtagattgtgaattattaggagataagtaatatagattgataaaaaacctggagaggatgattgggaatctgctgcaattactttttattcctattgaacaaacaaatgtcaagagagagaaagaggcaaataatcttaagaatatatagtactgtggatcatatgtagagcattaaaaaaatatgcattatgaaaactatataaatagttccccccgaccccaatttctcgtacttgatggtttttctatttcttttgttattccatcgaatcgaggtttcagtatgagattggattctgctacttgttggagtataaaagattgactactttggcttaagattctgcttctcattcttctatttggatttggctcgctagctgttgcatttaaagtgcttcccttcggcttcttttctattttttattttctctttcttctcggcccatgttttaacctcttctacacgagcacactgcaccttttcgttttggtattcttaaaaaacgtggtacgtcgtccattttggtttttctcatcctgtagagaagaataagaatgaatatatcaactgtgatcctcaaattaaactcaaaactattgcggctttttttttttccttttcatattcactacaaacaaatgtctaatgtcatatactaataaaaaaatattgatcgttaagcttattcccattaatatattttttagttaattaaaattaaattgttaatcaacttaataaataaatatataccacagtagttttttttattcagtgaaaacaagaacggaacaaaccatcacttacgaataccaacaatgcctaactcatcccctaaaagaagggattaattagacctcaattggaagactataaccgcagtataatacaactatacacccataatataaggtctatatttaattttattttctgataaatggatattatattaatggaggtaagtttaataactttgtctttgttaatatatgtaatgtttttgtaatgactataatgttcacattatgttcttgctattgacgttcacactttgaataacaatttaaggttgacttcaattttttctgactgagtttttgttgtgtagatttattttcaccaaatcattgcacacattaagaatagccatttgaaaggctaagttttaacgaaaggataatgcaccaaagcataatcaaactaatctatctgaaaggacaacacttatatatattgctttttcccacagtttagctgattttaagggtgcaggaaaccaaatcaaatattcatagatattagtcatgtattaagaaaatttctcacttataatcactttttccttgagagtattcaagtatattagtgatgttatttctgatattgactcatcgtcgtcctaggtgtgtggctagttctacgtataattgattcgatttgacacataaattaagaccatattcattttatttagatgatctataacaacattcctatgtagatttgtttttgttggtgtccacacaattgacttgtctagatcttatacatgatttcttttatttgacattgtgaagtctgttgcaaggtatttattattcttgtaattgtcactttccatagttcatgagcacatcatatatacccaaaattgcaaaattagatacacgcgttttcgatagtaagataacctttattattatacaagtgagaatgataaatatttactattaaatcttattataagttatcaagatcaaaatatataaatcacgtgagttcttttttataaaaaaaatcatgatttttaaatttttttacataacatcaaatcttaatcattataattgtataattccgatttactgttcttctcacttttatataaacatgactttctcactagatatgttcctatacagtcaacattcatttatatttttaaaagtatacatacactaaattaatataacgaagtatcagataatttttaaatgatattaaaatttatagatttgacctattgaataagaatttttaatttaatgattgaattaataatgtttaatatgtacaaatatttattaaaattactcttacagtaagttgaaaaagttgactttttatactatgaannnnnnnnnnnnnnnnnnnnnnnnnnnnnnnnnnnnnnnnnnnnnnnnnnnnnnnnnnnnnnnnnnnnnnnnnnnnnnnnnnnnnnnnnnnnnnnnnnnnnnnnnnnnnnnnnnnnnnnnnnnnnnnnnnnnnnnnnnnnnnnnnnnnnnnnnnnnnnnnnnnnnnnnnnnnnnnnnnnnnnnnnnnnnnnnnnnnnnnnnnnnnnnnnnnnnnnnnnnnnnnnnnnnnnnnnnnnnnnnnnnnnnnnnnnnnnnnnnnnnnnnnnnnnnnnnnnnnnnnnnnnnnnnnnnnnnnnnnnnnnnnnnnnnnnnnnnnnnnnnnnnnnnnnnnnnnnnnnnnnnnnnnnnnnnnnnnnnnnnnnnnnnnnnnnnnnnnnnnnnnnnnnnnnnnnnnnnnnnnnnnnnnnnnnnnnnnnnnnnnnnnnnnnnnnnnnnnnnnnnnnnnnnnnnnnnnnnnnnnnnnnnnnnnnnnnnnnnnnnnnnnnnnnnnnnnnnnnnnnnnnnnnnnnnnnnnnnnntaagtccatgagcacaagattgtttgagcatgaatgaaaaagaattcgaaaggattatgacacctagacagatacacaagtcacagaaataaaagatttagttcgcaataaaagattatgaaagctaattactagacatcagttagctaataacaaaatagtcttgggttgatcagaatgctctgcttcaattataggtagtataccaagttaattttgaaacattgttaacgtagaagttcactttattatccaaatatattgtcttgttacttaacgtgtttgacaatacataaaaatattaaatccatttaagtaatataatagcgtattaatgtgaaaacttttcatcgatattcaagttaaattataatacaattatagatagaatcttattatgaatatttattatgaatatcataagataacataaaaaaagttatgaataacccaattttacatattctaataaaaatcttttatttaatcaatgctatttaatcaagaacactaattagcatttgccttatacataatatgatgtggttatatgataataattgactttcgtcaaaaattggctggataagagaggttgacaaattcctgtaggtgcataactgtataaatagaaatcatagacaattgtttatagaaaaatgctacatagctatacaaatgataaaataaaaccatagaaatttagcaaaattcagtcaaaatttatcaagagtcgcggttaattattagacataaaagcaggaaaaatacattcctgtaagaattaggggtgctgaaagacacagaattcagtcaaaagtaacatggttttcttatattccagtctgttaccagcaagttcaagcacccacaatgtgagagacacatgaataatcaccaaaaattatgttgatgctgtaagcaaacttgtaacaagttaacactatcactgtaatatttgacattcccaaaatccagcattcttccccattgaattaaacaattatcctgagaaaaaaaaaaggtgaggggttgattgctggtatataacattaatgaatttagatggcctaataggttactatgtccacagtcatcaaattgaaggtacgattcaaattcactaaaagtttcttctaatcaagatctcctttgagaccttggaattggcactgtttggatggaaagaagtcatgatgctacatggtgacaaattgctgcaaggatcatagatttcttgaataaatttcaacttgcacaacatctgtcccttgttcataactcggccctggattccgtgtcctcatttgatgaatcttcactattgaagtccttggattgattagggggttgtattgattctgattcttgatcatcgcccaagatttgtgctgtgaatcttcttgcctcaaaatccaggtctggccactcagaaactattcgtctagcaccctaatgttccgagataaagtagtaaaaaaatggacatagaagacagaggagtgcaaaaacataagttgtgataggaaacaagtttccatgaacacaacttaaaacagcaaaacatttacctgcagtttgggttcttttgtcatgggattgttgcacagatcaatggtttttgccttgtattttgtagcattaccacaccatgattcacaccatagccattcttgcggcaaagagaaaataggcacggtatgctgagcgtaattaggaagatcctagaccatttcagggcaaattttagcaaaaaggcacctcaaaccaaaaacaaaagcatgcattcaaaagagagaagaaggctacattggaagtacataaagattaatcttcataataaataatatgaaatatactacgaaactagtaacttgattttacagtcctaagtatccaattttagcccttcatacaatttatgaaattgactctttcaaattctgaaatattttttcaaatttcaaatggtaagaaggaaagacctgattccaacttgcacaaaaatgatattgattcaacactaaggtagtgtttggaccagcttattttgcctttttttctccttaaaagctgggccaaacactcatatatatatatatatatatatataaaagtccttaaaattataagtagcttatttttaagactaaaagatgaaaataaggagcttattaagaagctccttggagtagctttttatagcttgtgcggagcttttctagcaacaaccatccttcgaatcccatctaccggcctttcatgtatttccttttctaaaataaattcatttcctcctttcttatatgtgcgtgcccctgcagcttttctgtggaataatgatgctgctttttttattcttcccataacattgaaatccttatgcttaacaatatatttttgttgttgagaaagtttctataagttgtactttcgtttgcaaattatcactgaaataaaattatattaattgaagtaatttcaaatttttaatatatttattttaatattttaatttacttttattatcattaaaatgatttaatatgaattaaattaatttaacacaatatttttttgttttataaatatactttgataattagtttcaaataaattaccatacaacttttaacttaaaaagagcttttagttagaaaagataaaaacttccaaacaacttttaccttttctttaaagttcttaatttagctttaacttgaaagtaacttttaagaaaaaaaaaaaaaaaaaaaanaattttttacgacagtgatcacacaatgtttccaacaaatacggaaataccatcttgatcaatgggtataaacatactgaaataatcaaattaaaaagtttctattctctaaataaattatacaacctgttataaatttataatatgatcactcatcaatagtcaccaaagacagattcaaagagcatatcataaagttgctccctagttttcctttcatttttggttaacggattgaagaggttacatattctttaagaattcactttgataaggcatatacatcaaaagttaaaacaactattctttggcccttgtttaacagcatactgttttaggttaaccgttttgtttagagcagtgttactaatcctaagtttgttggtcatgggttcaactccagaaacagcctctttgcatatgcaaggataaggttaggtataatatccttcccccttacctgtgcatagcgtgaaacctctgggtaatgggatacgtagtagtgttactaatcgtaagtggattagagatggttccttatgcctccatcttatgaagttgttggaaagtttccttaattgcggtcatccctacgccaaaaagggctacctaagaccagaaaggctgagtttaacatggtagagtgcagccactaggatgcggctcttaggggattgagatccccattgattagagataaggcctaagtagtgcttataaggcttgggtaatcctcaccttgcaagcaagttttatggggttgagttatgccttaaatccaaattctaagagaaatgttggagataccacatcaactagtgataaggccaaagtaatgtatataagtgggggacaaccctcaccttacaagccccggtcttgtggggttgagttaggcccaaacctaaattgttaaatgctattgagtgtatcctagagattatagttaggcctacctagccatctagtccttggtgaggggtgtgtattggagatcccattgtgggattaagttacgtccaaacccaaattgtgtcccaattctatgggaggattttaggagatacttacgtctttcacttagacaaaaatgatgagttgggtattgatactcatgaccattataattgttataaagcctctctcccatagaaatatcactagttattggggttagttagtgttggaatataagtaatgaacacactttttcattttttcagattgaaacccaaagggttcattatatacaactatgtctaatattctagaatattccacaacttattctaatactctagaatattccacaactaattctaatactctagaatatttcacaactaattataatactctagaatattccacatctaattccaatactctagaatattctacaactaattctaatattctagaatattccacactccccctcaagtcgggagataaatattaatcattcccaacttgctaagtaaatcctcaaaggttggcttgtgtaatcctttggtaagaatatccgcagtctgctctttggtaggtatatatgacaaacatacactaccatcctccaatttttctttgataaaatgacgatcaacctccacatgtttagttctgtcatggtgaactggattttgagcaatactgacagcagccttattatcacaatacaatctgataggtagggaataagagatcttcaattcctcaagaagtctttttaaccagattccttcacaaatgccatggactagagctcgaaattctgcttctgcactacttctggcaacaactgtttgtttcttacttctccaggtcacaagatttccccagacataggtacaataccctgaagtagatcttcggtccattactgagccagcccaatctgcatctgtatagatttcaatcatcctcttgtgtcccctttgaaagagtattcctcgaccaggggtgtttttgaggtatttgaggattctataaactgcactaaggtgtctttccttaggagaatgcatgaattgactaaccatgcttatcgcaaatgcaatatcaggccgagtgtgagataagtagatcaacttccccaccaacctctgatactgctctttgtcaacttctttcccatcttcatttcccaatttaatattaggatcaattgaagtctctgctggtttgcacccaagcattcctgtttcttgcaacaggtctagaatatatttcttctgagttaaagaaattcctgccttactacgagcaacctccatgccaaggaaatatttgagaactccaagatctttcagttcaaactgatcagctaaacactgcttcaaagagtttatatcctcacaatcatttcctgtgacaattatgtcatcaacataaacaatgagaatagcaattttgtcaccatcagagtgtttataaaatagagtatgatcagtctgagcttggaggaatcctcttcctttcatagcctgggtaaacttttcaaaccactctctaggtgattgtttaagcccatagagagacttcttcaacttgcatacagatccgtctcctttctcaaaaccaggtggtggatccatataaacttcttcatgtaaatctccattcaagaaggcattctttacatctaactgttgcaagggcccatcaaggttggcagcaaatgataatagaactcggatagtgttcagtttggcaactggggcaaatgtttcttgataatctatcccatgagtttgagtgaatcctttagcaaccaacctcgccttatacttgttaatgctattatctgcattaaattttattgtgaacacccacttgcaacctactgttttctttcctctgggcaatgctacagattcccagtttccatttttttttaagtgcatccatttcttcaaagacaacattcctccattttgggtcatcaagtgcttcttggatgtttttgggtatttttgtactgtctaaaatagtgttgaaagcacgaaaacctgaggataacttttcatacgagatatgatgagaaatagggtgagcagtacaagatctagtaccttttcgaagagcaataggtaaatttaggtcggctgcatcagtgtatttaggtattgggttgttggaattaggactcgagtcagaatcttggcagtctagaggcttttgaagtgtttttcacctgctgtaaatttttccccatttaccaggaggatctccagtttttggcacagtagctcgccctatctcatgctcaataactccccctgtctccaaaggcaaaggtagaacaacagactcatttggtttccaagatttatcttcatctatcccaatagactccccttgaagagaagtcgaaggaaaaaaggattgtgtctcataaaatgtgacatccatagaaacaaagaccttacggagagaaggtgagtaacatttgtaacccttttggttaggaggatatcctatgaagacacatcgaatagacttaggatcgagcttggacctttgatggggaggaacatgtacaaaagccacacagccaaacaacttgagaggaagggaagaggagttcggaaaaaaggaaaggcgtcggtaagacaagataaaggggaatgaaaatttaggatacgagaaggcatccgattgatgagatatgatgcatgcaagacagcttccccccatagatgtttagggacatgcatggtaaacaaaagagcttgagcaacttcaagaagatgtctattttttctttcagccaccccattttgttgaggggtgttaggacaagaactttggtggagaataccatgttgggtgagatagtctccaagaacagaattaaaatattcagtaccattgtcagttcgaagaattttgataaaggtctggaactgagtttgaatcatagcatgaaagtttttaaaggtggatgcagcatctgacttatcctttaaaagatatacccaacataccctagaatgatcatcaataaaagtaataaaccaacgagcaccggagatatttttctcacgggctgggccccatatatcactatgaatcaaggtaaatggagaaaactcatgatgagctctaggaggataagaaacacgagaatgctttgcaaactgacaaatatcacaaaaaaaagaactgggttttttattgataaataagtttgggaacaacttctgaagataaaagaaatttgggtgtcctaaccgacgatgccacaacaaaacatcattacaatcatcagtcaaagataatgagtggtgtgcaaaaacttttgtttcattaggatccttttcaaaatagtaaagcccttcttcctctctagcactgccaatcttcagccttgagtcttgttcatgaaaatcacaagcatggacagagaatttaacaacgcaatttaactcagatgtaagtttgcttatagaaatgaggttacaagtaagagaggaaacatgaaggactgagttcaaagtaatgtgttcagaaattttaatggatccctttccagcaatagtaaagaagttgccatcggccgttcttattcgtgacagtagggatggaaatgggccaggccgcctatcaggggcctttggcctggcctatttaaggcctggcctggcctggcctgtttattataaaggtcaggcttaggctttttgaaaagcctatttaaataaaaaggccgggcttaggctttaaaaaaagcctgttaggcctatcaggctggcctatttaatatatatatatatataattaaaagatataaatcaatctttttaaaaaagaaaaaatctaaataacctaatctacttaaaagataaaaataaaatagaagatttgaaacactataatagatttgtaaaaaaataaaagtatatatatatatatatatattaaaactaaaaagatataaatcaatcttttaaaaagaaaaataaaaataatataatataaaatctaatctacttaaaaagataaaatannnnnnnnnnnnnnnnnnnnnnnnnnnnnnnnnnnnnnnnnnnnnnnnnnnnnnnnnnnnnnnnnnnnnnnnnnnnnnnnnnnnnnnnnnnnnnnnnnnnnnnnnnnnnnnnnnnnnnnnnnnnnnnnnnnnnnnnnnnnnnnnnnnnnnnnnnnnnnnnnnnnnnnnnnnnnnnnnnnnnnnnnnnnnnnnnnnnnnnnnnnnnnnnnnnnnnnnnnnnnnnnnnnnnnnnnnnnnnnnnnnnnnnnnnnnnnnnnnnnnnnnnnnnnnnnnnnnnnnnnnnnnnnnnnnnnnnnnnnnnnnnnnnnnnnnnnnnnnnnnnnnnnnnnnnnnnnnnnnnnnnnnnnnnnnnnnnnnnnnnnnnnnnnnnnnnnnnnnnnnnnnnnnnnnnnnnnnnnnnnnnnnnnnnnnnnnnnnnnnnnnnnnnnnnnnnnnnnnnnnnnnnnnnnnnnnnnnnnnnnnnnnnnnnnnnnnnnnnnnnnnnnnnnnnnnnnnnnnnnnnnnnnnnnnnnnnnnnnnnnnnnnnnnnnnnnnnnnnnnnnnnnnnnnnnnnnnnnnnnnnnnnnnnnnnnnnnnnnnnnnnnnnnnnnnnnnnnnnnnnnnnnnnnnnnnnnnnnnnnnnnnnnnnnnnnnnnnnnnnnnnnnnnnnnnnnnnnnnnnnnnnnnnnnnnnnnnnnnnnnnnnnnnnnnnnnnnnnnnnnnnnnnnnnnnnnnnnnnnnnnnnnnnnnnnnnnnnnnnnnnnnnnnnnnnnnnnnnnnnnnnnnnnnnnnnnnnnnnnnnnnnnnnnnnnnnnnnnnnnnnnnnnnnnnnnnnnnnnnnnnnnnnnnnnnnnnnnnnnnnnnnnnnnnnnnnnnnnnnnnnnnnnnnnnnnnnnnnnnnnnnnnnnnnnnnnnnnnnnnnnnnnnnnnnnnnnnnnnnnnnnnnnnnnnnnnnnnnnnnnnnnnnnnnnnnnnnnnnnnnnnnnnnnnnnnnnnnnnnnnnnnnnnnnnnnnnnnnnnnnnnnnnnnnnnnnnnnnnnnnnnnnnnnnnnnnnnnnnnnnnnnnnnnnnnnnnnnnnnnnnnnnnnnnnnnnnnnnnnnnnnnnnnnnnnnnnnnnnnnnnnnnnnnnnnnnnnnnnnnnnnnnnnnnnnnnnnnnnnnnnnnnnnnnnnnnnnnnnnnnnnnnnnnnnnnnnnnnnnnnnnnnnnnnnnnnnnnnnnnnnnnnnnnnnnnnnnnnnnnnnnnnnnnnnnnnnnnnnnnnnnnnnnnnnnnnnnnnnnnnnnnnnnnnnnnnnnnnnnnnnnnnnnnnnnnnnnnnnnnnnnnnnnnnnnnnnnnnnnnnnnnnnnnnnnnnnnnnnnnnnnnnnnnnnnnnnnnnnnnnnnnnnnnnnnnnnnnnnnnnnnnnnnnnnnnnnnnnnnnnnnnnnnnnnnnnnnnnnnnnnnnnnnnnnnnnnnnnnnnnnnnnnnnnnnnnnnnnnnnnnnnnnnnnnnnnnnnnnnnnnnnnnnnnnnnnnnnnnnnnnnnnnnnnnnnnnnnnnnnnnnnnnnnnnnnnnnnnnnnnnnnnnnnnnnnnnnnnnnnnnnnnnnnnnnnnnnnnnnnnnnnnnnnnnnnnnnnnnnnnnnnnnnnnnnnnnnnnnnnnnnnnnnnnnnnnnnnnnnnnnnnnnnnnnnnnnnnnnnnnnnnnnnnnnnnnnnnnnnnnnnnnnnnnnnnnnnnnnnnnnnnnnnnnnnnnnnnnnnnnnnnnnnnnnnnnnnnnnnnnnnnnnnnnnnnnnnnnnnnnnnnnnnnnnnnnnnnnnnnnnnnnnnnnnnnnnnnnnnnnnnnnnnnnnnnnnnnnnnnnnnnnnnnnnnnnnnnnnnnnnnnnnnnnnnnnnnnnnnnnnnnnnnnnnnnnnnnnnnnnnnnnnnnnnnnnnnnnnnnnnnnnnnnnnnnnnnnnnnnnnnnnnnnnnnnnnnnnnnnnnnnnnnnnnnnnnnnnnnnnnnnnnnnnnnnnnnnnnnnnnnnnnnnnnnnnnnnnnnnnnnnnnnnnnnnnnnnnnnnnnnnnnnnnnnnnnnnnnnnnnnnnnnnnnnnnnnnnnnnnnnnnnnnnnnnnnnnnnnnnnnnnnnnnnnnnnnnnnnnnnnnnnnnnnnnnnnnnnnnnnnnnnnnnnnnnnnnnnnnnnnnnnnnnnnnnnnnnnnnnnnnnnnnnnnnnnnnnnnnnnnnnnnnnnnnnnnnnnnnnnnnnnnnnnnnnnnnnnnnnnnnnnnnnnnnnnnnnnnnnnnnnnnnnnnnnnnnnnnnnnnnnnnnnnnnnnnnnnnnnnnnnnnnnnnnnnnnnnnnnnnnnnnnnnnnnnnnnnnnnnnnnnnnnnnnnnnnnnnnnnnnnnnnnnnnnnnnnnnnnnnnnnnnnnnnnnnnnnnnnnnnnnnnnnnnnnnnnnnnnnnnnnnnnnnnnnnnnnnnnnnnnnnnnnnnnnnnnnnnnnnnnnnnnnnnnnnnnnnnnnnnnnnnnnnnnnnnnnnnnnnnnnnnnnnnnnnnnnnnnnnnnnnnnnnnnnnnnnnnnnnnnnnnnnnnnnnnnnnnnnnnnnnnnnnnnnnnnnnnnnnnnnnnnnnnnnnnnnnnnnnnnnnnnnnnnnnnnnnnnnnnnnnnnnnnnnnnnnnnnnnnnnnnnnnnnnnnnnnnnnnnnnnnnnnnnnnnnnnnnnnnnnnnnnnnnnnnnnnnnnnnnnnnnnnnnnnnnnnnnnnnnnnnnnnnnnnnnnnnnnnnnnnnnnnnnnnnnnnnnnnnnnnnnnnnnnnnnnnnnnnnnnnnnnnnnnnnnnnnnnnnnnnnnnnnnnnnnnnnnnnnnnnnnnnnnnnnnnnnnnnnnnnnnnnnnnnnnnnnnnnnnnnnnnnnnnnnnnnnnnnnnnnnnnnnnnnnnnnnnnnnnnnnnnnnnnnnnnnnnnnnnnnnnnnnnnnnnnnnnnnnnnnnnnnnnnnnnnnnnnnnnnnnnnnnnnnnnnnnnnnnnnnnnnnnnnnnnnnnnnnnnnnnnnnnnnnnnnnnnnnnnnnnnnnnnnnnnnnnnnnnnnnnnnnnnnnnnnnnnnnnnnnnnnnnnnnnnnnnnnnnnnnnnnnnnnnnnnnnnnnnnnnnnnnnnnnnnnnnnnnnnnnnnnnnnnnnnnnnnnnnnnnngtttattttgtttacaatattttgttgaatacttaaagtattccaattataattattaattggtttgttgtgattagtaaattttaatttcatattagagtgctctaattaattttattttttttcacgcacaaattaaaagggaatatgtgtcttttttatattaaatttacaaaagtattatgcgaattctcgaagttttactatatagtcattagattttttttaatatataatatttattttaaagtaggctttttaataggctcgtaggccaagccaggcttttaaataggctaggccaggcctaaaaaaaaagcctatgatagataaaaaggctaggccaggctttatatttttaaattaggccaaggccaggcctaaccaagcctggcctggcctggcctgtttccacccctacgtgacagttgatagtaaggggtataagaacaaaacaaggttgcattacctgtcatatgatcagaagcccctgaatcaagaatccaacgattactacgatcagcatggaatgtcgtaccttgttgagcaacatgactagttgcttcagcagattgaggcatcactttctgaaattgctcatactccgccttagagataaaaacaccatcagaattaggagaggcactagaagaaatgccggatgaagaagaagaatccataagttactgtgaaggacaggaacaaatgcaattggaggtgactagatagtgtttatgggaaatgacagagagagatgacttaaggtttttcaaaaaaatgggtttcagagttgcagaacgataatagggaaatctgctcttgataccatgttggaatataagtaatgaacacactttttcattttttcagattgaaacccaaagggttcattatatacaactatgtctaatattctagaatattccacaacttattctaatactctagaatattccacaactaattctaatactctagaatatttcacaactaattataatactctagaatattccacatctaattccaatactctagaatattctacaactaattctaatattctagaatattccaccgttagacttagcagctttgtattaaaatctataaataagggggtgtatacaagttgatttgattttttctcaataatacaatttcctctatgatttctctatctttaaactctctcaaatctaacaagtagcaaccaaaaaaaaccttgcatttaccatcaacattgtatctcacacatccacacttctgcttcttcctaccttcctgtgtacgattgttaatgccactgataaagtgagcgatgtttccacgtttatcagctcatataacaagactttgagaactttctcccaaaagaagtattgatttcttcgggatttggagggagttctggtgatggtaatgacaagcgtccttctcaggatgccaagtgttggaaaaattcacgacctctgatattacataagaaacagaggagattgttaccatttgttcctacaaaagatcctgcccagaccatgcttctgctttaacagcattaaatatggaattcagtgatcacctcaaatgcttgcctggaaaggctcctagatctgtgaatcaagccacactaaaaaacggtggcatgaagattctttccaaggaagacatggagaccatagaacactgcattgctatgtctaaaagaggtgaattccctccctttatggttgtttatgattcgtgtgaaagttatactgttgaggctgatgacctaatcaaggatatgacaattattgctgaatacattggcgatgtggattaccttgacaaccaggaacgtgatgattgtgacagtattatgtccattcttagagcagaaagttctcaaagtgttgttagctgtgctgataaacgtggaaacatcactcatcgctccctttatgagtggcataaacaatcatacacgggaaggtaggaagaagcagaactgtaaatgtgtgagatacaatgttgatggtgaatgcaaggttttttttttttttgtggttgctactcacgacatttctaagggagagaggctttattatgaatttatgatcataatggtcatgagtatcaatacccaactcatcattttgtctgagtgaaagacaaatacctcctaaaatcttcctatagaattgggacacaattttagatcctcgagaaaggagtctatctatattcttgaaaacttcaactcattgttgttgcatattccacaagttttgatataaagcagtcatttataatgcactgggttttcatgttatattgggactacaaaaaccagtcaaacttgcttaacaacacgctctcttaagtaaggattcatttgcaggtaaaggaactattaacttaaacctcttacctgatccaagttggctagactatttggatccctgcttagtgtttcataaataactctaagattatctccagctgcagtctctcggaacttcttcagatcaacaacatataaagcactgaaaaccgaaattgaaacagtaagcattgaaattatatttggcaatagaatataaaagtagctactaacctaatatggtatggtttcccccgcaaatgatcattccagaaaccctatgacacagggaaaaaaggttaacaaatatttatagccaatactgcattaaaattacacgggcgtaatgaaaaccaagagtatcatatagattggaattgaacaataattagaatttcgacagtgacatttacctgtctccaaaacctatatccatccatctccttattattatcacaaaatggggtatatgccaggggttttcctcttatatccatgtcatagagtactcccatgtctgccctaacaacttgatcagcatccacaaaaatgacctgcatatattggtagattttagacagattaccttgtaagggattttcattcttcattatctttgtcataacattgttattgggaaaaacccaagtcccacattggatagagataaacccaagatagaatatacaagtgagaggcaaccttcaccctatgagctagtttttggggttgagttaggctcaaaccaacatcctaagaattgtgtagtgtgacattgaaattaattgtacaaaagacaaaaaccaaaagcatggaacttgatgcagaagaagaaaccatgataccttctccaaagaaagggggaaaatgacatctaggaataagattttatatgcccaaattattcgctgcttttctttctgcttatgcaaccatgtgggccacttgtacgtgactagttcatatttaaaaccatattctagggccatgtgtggaattaagtcctgtatgttaagtcaaccaaaatggttcaggatgtcaggcaaactcatcattctactttacattccaatatacaaatgaattaaaatgtaagcatatataatttgggtggatatataaccttaaaaggaggagagaggtagttctttatgaaccagaatttaactggacgatgagtattctttagaacacttagaatcataatcttcataaagcgttcatatctggcaaattgacaagaagcacaaagtgaagattgcatccctgatgacaaataaaataccaccaggctcaactaaatatgaaaaaatattatagaatccaagtatggagtttaatagttaccatgcatttggaagtgtataacatttgtttgaaagattgtgcttagtaaaacttgcacaagaaattaacgtccctaaatttcctattaattacaggcacttgaaactgaaattgtattctgcaatggaaccccaaatcccattccacgaaatctgaatcaacatacatgattgaccccattccatgaagaagcataaaaacatcaataaatgatattttctgctgtacaagacaatttttccaacatgatacatcacatatagtaatcactgtttaaatttcgaaataaaggaccaaacttgaacaaacatatgttaaaaggcaaaactaaaaggaaaaacaagaaaggaaaattgtaacaacttataataagcgaaccacttacaggtgcccagaagcaatagaaaagatattaatagtttttccatgccgtccaccccttcctttctcctatatgggaaaaaggttcaatctgttacaactttggaaatgatgacacaaagataaaaatggaaggacaaagcacagggtaaacacttaataaggttcaatctgttagggtgtgtttggatacacgttgaaaccacgttgaacggagattttgtgcattccaatgtaaaaatgccaaatcattacatcaattaaagcttcaaagcctaaaagcaacatcaatctgataaaatcttttcatataacagtaacttaatgtaccaaaaactaataaggttttcaaggaaatataataaatgatgatttttgtaaaatagacgggtggaaaatgttaggaagtcttacatcgtctgccttaattctcggggtgcagcttatatatttgttgagcagctttacttagtgccaattggttttatttcagctgttggtgacattaattctgtcttctgagatgtatttgtgtcactggaacttgcttctaatttaatttcggttgggcaattggtggataataattgtaatgttaatttctcccagactagttttgtgcaggatcaggtgtcggggaaagtgatcaagaagggacctaaagtaggcagattgtttccagtccagtttacttctcctagtttttcctcattttcttgtactactgtcccgtcctcattcgaggattggcataataaactaggacatccaaagtcagttgttttgtctcatttaatagagaatggtctgttgggcaataaaactcttgtttctgactcatcctttacgtgttcagtgtgcaaacttgccaaaagcaaaaatctcccattttcccataatgctactcgtgctaacaaatgttttacaattatacacactgatgtgtggggtgtgtctcctgtcttgttgcattctaagtataaatactttgttatgtatattaatgactatagtcgttttacttggatttacttcctttgttctaaagatgaagtttttcctatgtttaagaatttttttgcttatattgagaaccagtttcagacaagcattaagattttgcgcactgactctggtggggagtacatgtctcatgcctttcaagaatacctacaacaaaaaggcatcatttctcagcgttcttgtccttatacacctcagcaaaatggcattgcagaacgaaaaagtcaaaatttgcttgatgtcagacgctgattatttcttgcagcatctgtcccagccaatttttgggttgagactctgtcaacagctgtctttctgataaatcattttccttcccaagttctcgagtttgattctcctttctttcgcctctttcaagttcatccggattatattgatcttcacccctttggttgtgttttttttgtccacttccacctcctaaacgtcataagcttggggcccaatcaatcatgtgtgttcttaggttatagtaccactcacaaaggattcttgtgttatgttatgatgccacctctcatcactttcatttctctaggaaagtggttttctttgactattaaattttcttcccatgttttaagtcttcatctaatgatattgttaacctccctaatttttctgatatttctcattctatagaacgtttcaaaccaggtcatgtttatgttagatgtcagccttctttgtccctttcggctgctgatctgccacctgtgcctgctctactgcaatgctcgtctcaggtgtctcgtgccccagataggcatgaatttgggcctatttctcttacagctactctatctggcacatctgttcctacatgttattcacaggccattaaagatgcttattgggtcaaggcaatagacgaagaactcgctgccctccaagaaaatttcacatgggacattgttcctcaaccccctagtgttaagcccattggttgcaaatgggtctattcagtgaagctgaattctgatggcactgttaatcgtttcaaggcttgattggttgcactgggtaacaaacagaaatacgggttggattatgatgagacgtttgcaaccgttgcaaagacgacgtctatttgaaccattctttctattgctgcctctcagggatggtcaatgactcaaatggatgtgaagaacgcctttattcatggtgatttggcaggggatatttacatgactcctcctccaggcctattttcctcgtctgctggtgtgtgcaagctcaattgttctctctatggcttgtgacaagctcctcgagcatggtttgaaaagtttgactctactctcctttgattttcttttactcagaaccggtatgactcctccttattcattcatcgcacaaatattggaattgttcttatttatgtcaatgatatgataattactggttatgatcatgccgacattcaacgtcttaagcagtaactcaaagcctcctttaatatgaaagatcttggttgccttaagtatttcttgggccttgaagtttatactgattctagaggtatctttcttcaccagcacaagtatacaaacgacttaatttctttggctggtcttgcttcagccactccaattgatactcccctagaggttaatgttaaatatcatcgtgatgaaggagatcttttgtcggatcctttattatatcgtcagctggtgggaagtcttaattatttgacgataacattcctggacatttcatttgcagtccagcaggtgagccaatttatgcattccccatgtcatcttcatttggccgttgttcgccccatcattcgttacttaaaaggcacttcaactcgtggtttattttttcctactgggaagtctcctagtttggttgcctacagtgatgcagattgggccggttgccctgatacaccaagatctgtcacaggttggcgcatgtttcttggtcctgcgctaatctcttggaagagtaaaaagcaatcatgtctatcgaagtcctccattggatcagagtatcgagctatgtcaatggcttgttctgaaatcatttggcttcgtggactcttagatgagataggcttccctcaaattgcagccacacctctctatgctgacaatactagtgccattcagatagctactaatccagtttttcatgagcgcacgaaacatattgacgttgattgccattctattcgagaagtattggacgctcatgttatatctcttcctcatgtcacgccgcaacttcagcttgtggatatcctcaccaaggttgtacctcgtcctcgacatcagtttcttagcagcaaattgatgcttctagattagccgcatcaatttgaggggggatgtcaataagggattctgttattatgttgtttccagtatattattagctttcctgatttaggttgtataaattaggaaatagaatcattgcgtcttaatggctgaaatgcgtctttaatgacaataaatctgtattatttatggatgaacagcagaatgaagggaaagcattcgagacagaaattctgacagaaaactaacggacaagtaaataaaagacatacttgcgaacttttttcagcctttttagataatttgttgccgccaatgaaaccagaagcccattttaagaagttggaattcaagccacttccctataaaaatatcatgaagatatctgttatggattgcactggctttagcctttaaataataatgtttatcattttatgcttcaaaacatgtttttaaagaacaatttttaatagaaagcactcactttcttctcatcttgtgcattgtcatcaggaagaagtaattcctcatgctccttgcccttttttttcactacttccatatgaaatattttaccccgtaaatcattaatagtaatgagttttgatgattgtttatcgtaacttccttcaccatcttcctttaaaatgtaaagctcggaacttcttccaggagcaagctgcaagtaccaaactccaggtgagactttcatttgccaatatcccaggttggccatcacaagggtatcaactaaatggggagtagtctttgtcccaaggatcagctgaagtccccgaggaggatcgtgatctttctcagaacagtgacctgattagatttgacaagagtgacaatagattagtacacagtgctcattaatgattgttaacatagaagagatgacagaattaggaatataataattagagagattttaggaaagttgatagagcctctattagttggtttgggtatgtttagtgaatactggtagaaacaccaataaagatgtttaaccagatggaacatatttcattagttagaggtagaaggagaccaatcccatatttacagttaaacatatgacagtaatttatggcctcgtatgatccctttagccaatcacacctagtgggaaaaagctttgttgttgttgtgtttcataattgtaagctaacaaggagaaaacagaagctaatgttatagacataactacacatattaaacatcctaattgcacagaagtgtttaatagaaatttaaccagtgacatgctgctggttcacaggctacaaatggctatattcactttcccttactgtgtaatgagcagagtaggttccccattttctttgttcttaaattgttctgcatctgtttcttcatgaaattgtttgtttcacatttcagtgtgttgggtgtgccctaggtccatggattagattttgttgactagctttaattgttatggtagaagtaaagaagccaaatttttatggtaatgtgcaatctatgctacactttgatgattatgcaggagcattatttttgtttttaagggatccctttggacaagcatattctttgggataagattaggcatttgaattgtagtagttgtagggacttttaaaagtggtgtcaattacaggaatgttaaggttgggaaactttgcttcatttttttgttgttgtcatttcgtggctgttcttttttcttttttttaaagagggcctctaaaagaaaaatttcttatataactttttttcttaaaaaagcgttaattatgctaatgaactagactactacacaaatagatgtggcctagcattctaacaagtagcaatgattatttaataatatcactaacagcttgtatttctaataaacaagatgcaatcttaccagtgaggacaagagcttcaagctcaaaaactgcttgcaatgtccttgtgtcaccaaggttctcaagaagaatgttatccaggtcatggctgcagcatgagagatattactaaggactattaaaattcacaaaaagtagtcattacatataaaaactcagaaatgtattacatagacctccctcaaggcatggaaaaatcatatttatttcccccattcccgaaatatcaaagggaatgccttcgcttgacagaaaaatacaaagcattcagagtttataatttaattcaacaatttaagttgattatttatctaccagagttggtgtgtgtcactaattatgagattcattcaatttagatgccaaaaactttattctttttaaatgttcaccccatttttacgctattaattcaactttataacatgcttctttattaacaaagacaagggtacatttggactaacataaacattgacattagaatggtttaatgagtctaacagctacttaatggaataggttacggttactataaattttaaatgaggaagaccagtgtaatttattcacaataatttactcgtctccagttacattcaaacaaaaaattgataaaagaatcagtatattaacaaattctaaaataatacatacaatgcaataacgggctcaacaagccaagactcaggaacatcaagattcatggtgagagtcttagacaatggcatgtttgcaaagagtgcttgtgggccatttattgcagagtcagtgttgctaaaatcatcctgcaaaaatcagaaaccctgtgagacctagcatcaaatatcatgtctggaattatcttagagaattaagagttaaataaataagatataccattgttggtaccacatatctgtagtagctcttcagaggaagatcagcaagagaactctgtcataagatgaaaaacagcattcaatacaaattagcaaatgtataaagaacttggcaacacattttgctggacgaaaattaaaagaaatatatcttgtagaaaatctcgcataagactatcactagaaatcaggagttcaatccttgttgctccattcttctaaataaaggctaaatttcgatacaagatagatcgggccttcacattaatggatcttgcaagagggagtgcaatggatatcaaactaatcaagagccttcacctaaacagttaagcatttgggagagttggctcttggcaggttacaagctaaaaactatttacagtagaacagatgagggatagatgaattaactcctacaagcctattgatcataatgtgaatggactaatacatgcacatttggtttaagtgtaactattgcatcaaggagttcctttggataagcagctactttgggataagataagatcagacaattggtttttacttggtgtaaagccgacatggttttttatactaagtttcatttacaactcagttgagggattggatagattttctttctttgttctctgttgtctgtatttcctttttattttaagaaggattttaacctcctgattctttgtaatcatatattctgtgtcaaaaataaaaggcctaaacatttttttttatcggcataaaaggcctaaacataagactgaataacagaaggccttatgaaagccaaattaggggaaaattcacagttccacaacacaagggcaacactttggcttgtctcatccaatcacaatgagagagaaacaatttttttccatcttcttttttattccaaatgcctaaaaagaatcttattgaaggaacaatttcagttgcagaaaaaaaattattatataattatatatgtttgcagaacaatagatagatttgaaccaaccactggattcagtacaattctcatgctgggctgaatgtatttccacaaaactcgaagaattccagacaacctctggctggttggacttaaaggatcaagaaccgcttcaatatgaatacttgaatttacattatttagaataatgacactgcacagataaatgatggaaaaagaaatactgacatcatataatacatataaatgagcaatccaaaaatgactaaatcataaggaaaaaaatgtttgagtgcattgtaactaataaaaataacctatgctgatcattcagaatctcaaaacgagcactttcagaattccgctcccgcatggccattgaagatgataaggccatgacaatatcactaatgaatttgctgcaaacaacatagggcaacattaaagaattgttaaatattcagtaaacagacgtgattgaacaaaaaatctgtttaagttactataaatcagaggacttatggcacacccaacattctccaaaaattctcaagaactcaacaaatcagtagtagcagaaaaatgtaacaatagatgagcttgcacagcacataagacacagtatgggagtttgctattttaaaagaaaagaaaatcataggcatattgaactgaaaccgtgtgtctgaatacaccatggatgagagtttatataggcttatagtattcattgcacataaatagaggatattcagtttcctataaatcagagattatatgcctataaactacaattattacaatgaattcagaacattatattctgattcccaacatgcttcatgtgacctatcacctatgcactttttaattctttaatttcttgtttctaaacttactttctattcaactgattcccatattcatttgcttgaatataaattctgcagaaattggtctatagctagcatggtttctcaatcaatcattgggaaacaatacttatgattatctcatcactttattctttgtatgatctgtgcacttgcgttgtgccaaaaatgtcatgtaacacctcacttttaggctttggttttccagaccctccctccaacattttttagttaaaagaaagcatgtcataggaaggtgatatatgtaatgatccatagagaaatcaaacaaaaattaaaggtgagtcaaacagagacagaaaagttcaagaaaccttgttagcatggcggggtaaacatcatgccattccaccttttcaataatttccacaatgtgctttgtcctttgtttaaattctattgattccagaagatgcagatcagcactcaaaaatgtgctttcgtcaattggataagttacctattaaagatagatattaaggaaagaacacaagattaataaggaaatttaaggattggtgaaaattcatcagcaaattttgagagagaagagcaaaattatatttgtaaacaagcaatgaaaacaattattcatcagaaatcagttatactatgaaatagctgaagacaccaaaacaatattacccttccattagtgaagacagcattgacaccagattcaagcccaagcaccctatacaaagaattctgcacctgataacaagacgtctaattaatacaaattatcatgattaacagacaaaaaaatattagtgaaaaactctgaaattgtttaacatagtgcaaactaaaatgaaatacataaaagagaagcagaaatggaaaaaaaaagcagcaggaaaccatttccttcaggtattagtatcaaatagaaaaagtaaaagtatgaggcacagggttgggttgttaagaactaaaagcaaatgtccaaatggcaagataaactagaagtaccttagtcaaatgctttctcacttcaccggcaggaaattctaggagggcagacctatagcccttagatggtaacccattggcttcaccaagctcgcaaacaatatcaacaaatgcttgagtgctttcagcttccataggaggtgtaaggatgtaattcttctcatacagtgagcaaagctgatccaagaagtccaatacattcgtcttatgactgcacaccatgcattcaaacatttgatataaaaatggtgcttccactttggaaaggaattgacaaaatcacagaattgaaattaaacaatcaattaaaatttaaccagcttttgaattaaaagcaaaatccaaacacatacctatacaaggatgcagtgatttcaaagaccttaacaaataggaggctaaacaaattaggattccgattggcattaaatagaagacctacacgagcatttttggatccttctatctgtagcattatgttcaaataacaaaaacatcaaatatgcttaaaagcatcaaataaattgctccaactcataataggcattaggcacaataatttaaaaagaaccaagaagatttaaaagaaatgcatattggtattaaccagataatgtatgccttgttgaagtaatttcatcccattccttgaagtgatatcaacagcaagaagatgtgtcacagccttcgtatcatccattgctggtttggatcaaaacaattcacatgtgacaacaaaagaaacagactgtacaaaagaaattaaagattctaatatttaaacaacttacttccaggagaatgcaagtagacaatgtcatttagtacagattcctccccaaaagtaaacattgacagagatatgaaccttggtttgctgtcagaaataatctataccaaacgattagcattagaaactggttaatgagtatcactataaatgttcccaaaatttaaattattaaattatttaactactataccttaggattataacgttgtataccagcttctgatagaaacttagctaatacatcagtgtcagacattatttgtccaaaatatacttgttcctgtattcttggagtctcatcattcaaggcatttataagagcttcctggtaaacacaattgcatagaaataagtagaggaaaaatctattctactaacactattaatacatcacagttatactagacaaagaaaaattgggcacaactcaccttaaactaaagttgagcacatgcagaatatccaaaattaaacaacacactaaggaaaactacaacagtatggataagtgcaagtagtcaaacaatgataagtatacgaaggggatcttacaaatttatagatagctgtgagtttattagtgcattgtaagagactcatctgcattttactacataaagtgtatccagtgctatttattttattttgttttgggttgccagcattaagaaaaagcacatataaaaaacaaagagaaagaactcattttacaaagaagaccacaatattactgttaggtattattacagaaagtagtattagagatcacctctcatgcttgcactgtaattttctttttctgttttgggcttcagttagtggtctgggccaagcttatcagctagcccatagtcagcttctatcagttgtaactgattttttcaagtgtcaaagattatatgttttaactacagcagtttagtatgagatgatttccattattactcattattttgttttcttattttgtaaacctccttcattataaataagagtatttcctgtggtctgatacgacaacacaacagtaaataattcttacatggtatcagagcaggttattattgacaaagaaataatgaaagtcgttctccatcggggacctactgtcatcggtggacctttatgctcactgcccttcttttgatgaccctttctcctttcttctacacgccaaacagttttggttccattatcactgcagtgtgccttcgttctcgcatgaacagtaccgcaagctgctgcaaccctctattggcagtcatcgtgccttctatctccgacgcaaccatacccccggagtctccacctcccggcgaccagcgtgcaccctgtcatgtcgccgttcaacgacgcacacaccaccactctccagcgtgtgtgcatcacatgccagctacccatgacacctaccaccaggctgtccacatgtgcaaccaactcaacacaccgccacagcaaccccacgcagggcccttttccagcgagaaaagttcaagcacataacatgtgacgtgtcacactggaaccgcatccttctgcctcagggcatgctattttcaaaggtgaacaatacccatcgccactacaggctttcgttggttgccgccgaggtttattctgcacaaccccatgatcggaatcgtcttttgtttctgttgggtttgccacatttgtaacaagcttggttcatatgatatatatgctccagcttgaggggaagtgtcaaaaatatctgatatgttttaattagagcagtttagtatgggattatttccattattactcattattttgtttccttattttgtaaacctccttcattataaataagagtatttcttgtggtccaatatgacaacacacaacagtaaatcttacaacaagaatcaataatacagtttactttcagttgcacaaatcttttttctctttctctgaattctatcagaattaatgtaaacagagtaattataggtcgattatgtaattagtgatatcacgtaattacagtaatcatgtaactataaatccttgtacggtacttattacactctatatatataatttgctctttaatacacagcaattcatcacatttttcattttctctttctctcaacacttatatcttggccaaccaccttgtacaatataaaatattgtgaattgacagcagaattgaagaaaaagtacaaaaaaaaagaggaaataaaattttaaggcagtggaaaatgttaaaaaaatcattacctcagtgggatcaataacaaggccattcatcaacaatgaacattgaagcttagacaaaccaagcttaaatacaaacttggagctttcttgtgacaattccttcaacttttgattcttatacagctttagtaatatctcttgaggtggggactttacctttgatctatagaaatacagagaatatttaattcatgtttaaaataaattagaacgtaatgttactgctaaaatattgaagcactacattagtcaaatgtcagaaggatactaatcaacaaaaagtactataaaacttacaatattgtttccacaaacactccttcaacatggtgcagttcaagagcatcatatgcattgccatctgactcgatgtgtaatttgttaacctacaaaaatgtacaatatagttcctttaattgaattgaaaataagattagttttaaagtctcaaaacaactgctaaaatgtgtttcataaaaatcttagatataatagcatcatctatttgtgtatgctaattccaacagcataaacatttttatttttatcaatataaataaaaacctctaaacaaacctttcagatttatttttcccttttttgtcatgttaatggggaagagatgaagccacttaaaaggttgtcaaatgttacgcactaggttcatgattttttttaaaataaataattgaattcataggaaagtgattatctagaaatttgcatagtgatagacaaggggaaaatttaaaaagaaaaaaagattagtgagtcataaggttgaaattcaaagttaagtcaaatcaagcaacttggaaggttcaaattttgaactttaatgatatcaaatagatatgtagttaggttcaagatgggtggagtaaaatgaaagaacaacataacaatattaactgcatctgccacttttctttcctaattttggatttaagtcatgtgcttctggcatatgaagttttaacttttaaaccagacgtaagtaagttcatggaaagacattgaactgaagatgacactaatgactaagtatcacactcatacattgctcaaaaaccggtaagccatttcagcaccataattctcgttgatataactgaagagacatataatctgaaaagagaaaaaaaatgatgtcataaacttgccagtgaaactataacatatagaaaaatttctatgacatttatcacacacacattcctgaacaacaaaaggtaaaaattaccgtagttgaaatatctccatcgctgtgctcttttgtagcatgattttctaactgtgtaacaaacatcgaagaatacaacacaatcccaaacctcacaggaaaattattttcatacaatgatatgatcatatcaatggactgcaaaattccaaacaataaagcaagtgactaagattttgcttggaaacatatacaatgaataatgtgaaaatgttaagcttgaggaaaaaaaacttgcctccagaccacaacgggttgctggatcaagaacaaagacagcatggaaaaggtttttacggatgtaacgtagctgcccagggaaggctggcatcaagaactaagcaaaataaatgtaaaatatgttaggttaggctaaatctttacacaaacagtacttcagtcagaaaaatctcttgaacactttgatttttatattttttaattaaaaaaataaagctaatccaaacacactaattcacctcttctaaattgttactccaccatttatatttagcatcttcttccaagttgttgagataatgaacatgactagaatgaaaatcaactcgaaatatactggactctggaggaggtgaagttgagagcaatttcttcaaagtggcttgaggaatctgcaaatagtgagaatatcaacaatacagttcaggtgtatgtacatatcacaaatgagttttataaagagaaaaaaatggtagcaattaatagaagtttaaaaaattaagggcttgtccagtttgagaaaaaatttatgtttccataaataattacaaaatgccaccttggtaattatttatgaaaataggaaatgaaaaccaaaacattttcttaatccaaacaggtaatcgtgccattttttctatggaaaaaataccattaacttcttcacctcccactcatcttccctcctttcaatacaaattgttttcttgggagactatccaatgttacttttgaaaacaacattttcttaggtaatatgcatcagatgactatttttcatctgtcaattactaggtcagtgaatagttaaacagaaattagtgcaatagtaaaaatatgacaaaatgaaaattagatggcattcaccttcaattttgagaactgatcagtcaacaagagatcctgacggatcaagtcaatcaacctaataaagaataacaggaaaatagtatcagaaattcaaaaatttcagcactgccaaaccaggatcaaaccactgctaaatatttacattcttagaacctaaaaccaattctcccaaacataataacaattagttgacaaagcatttacaattatatataggaaatgactttaatccaacataaaaaaaggaattccatacgataagtaagatactttgaataggctcaactcaaataaacacaaaaccaaaccataggtatataaatagacctgggtttggctcttccaatcttgtgctaagtgctaactaacatcaaaagaaccataaatatgagacagcaaagtcttaatgtgctggaggggattgaaaaatactaactctagctataatagaggcacaaacatgaatacgacaagataatgtataaattatcagtaggaaaaaaagttattacagatagaggtcaacatcttcgacattgactaaagcaccattgagagccattaaagacttgccaggtgggaccatccgctggtttgccattatttcatctcgaacagaatcatcaagctgtcatgagaagcagttccgtaagaataatagacatttttttccaaggaaaatgtctaaaaatatgtgagtgcctaacataaataacaattaacaagattatgtaccttcatgcgagacaaggaagaaactatgctagggaagttttgattgatttcctgcattgactgcagaggatcagaagcacggacaattctctgtacagtttgatgtcctagatctgttaccatcagaaagaaggggaaaaaacatagaacactgttcattgaagccaactgcgataggattcagcttccaatctttccaattatcagaggaaaagagaaaaatattttaaataccctttaattcccaaacatcaagtgtgtctgatacagttgatgacaatagataatcccgaaaagccatgacctcagatgttaagtcaggtttacgttcctgtgagtaaacaaaaacaggtaaatttattggtaacactagtgtctggataattttgaggtggggcaataaatatacttcactataaatattaatatacttttataatgttatgaaattaaccaaagcaaataatgagttgacaaccatatggaagcagaaaaaaaaatctaatcccacaaaagagactaggaaataaatttctgattcaaaactatgcactcttttctgttcataacaccacaagtatgcaaaaagtgggcaatgccaaaggatcttagcttccttcatcctgccaaaacctttcatattaatcgattaaaaggcattaaataatatcctacagtaaatatatcaagctgcaaggcagtgagaaggcaaatggacacaactttacattatatcnaaaaggcattaaataatatcctacagtaaatatatcaagctgcaaggcagtgagaaggcaaatggacacaactttacattagatctcgcaaagcacataatattatcacatttaacactattttataaaaaaaagaaatgctagcaacacaatctctaacacacatcttctattattggttgaaatttattgaaaattacaaaattctcattatcatgtgtgtgtccaaaaacaaatgtgagtttacacaccagaagtttagagaatatgaatcctctgacttcctggctaagatcttcagttcgaggatcctctaaagtcacacctgcaatcctcaactgtgttaatgagagaatcaatcatttaatcacaagtaatctttcttgatgtatataaatatccaaccattttaattggattagcaatatacaaaacaccaaaagaatttgtgaatccagaaataatttaacactaagaaatgtacttttcaattatctatttcaaagttataattaataaaatcttcaaacctgaaactcattgtaggaaaacaagatggagagtctttaacgaacgataaacttataaatcaatgcattgaggtaaggttggagaaggtcaatgctaactaactcaagtaaccagatagaaagaccataaagggtaaggaaaacttctttaaatagcagaattagaccttgagaatagtacatattaccatgcaaaatgaatgaaaggacattgttggaaactgcaacaaatctattgggaatagctgaatttaaagcttagattcatgaaattttagattcatgcaaggtgctttaattcaagtacttaggtagttgcacttgtgcttattcttcttgtaaatgtaatatgcaattaattaattcaaaagtgtgtgtattaactctgctagtgctaatcactcaagcatgtcacaggtttcttagtccaaatctaaaattgacatcgtaaaaaaaaaaaatgcaagttcaaagaaaacttacataaagagtattgttaggatccaattgccccataccttgcaattggttcctaacaaggattaataaaattgtcaaatcctaggaatagcaatgcaagcatggaggtcatgaagtcaaagaaaattaaagaaagaatacttttataatttctcgaaaaatatgacattttaaaaattacaaaaattacaaagagtaaaaaattggaaaggatgatcaggcaatcacaatttcatgtactaactttcttctacaattgactcagtatgcaaagttaaagagaactagaagccttcactcaacatgtgtcaatcattctaacctttttttactgtactgtcatccatggccttatattccatattcttcagtgcaagttccacaccataaccacccaagttcactgattcaccagcaccaacagaactacaatgattgatatttgattcacatccagcaggcaacactggccgtacaacatacttaactttcccctaaaaattattcagtcaacatattaatatagttgcatgggaaatatattagataagcattacatttttttttcaaattccaatcttaatatatgggacaacaatataaatctgtttaatgatttcatcgtttcacaactccttgactattaccatatcttcaaaaaacattagtgttgcatacaactaacatattaatctaaacttcacttgaagagatatataatatctgggatattttataacacagaagatggacatctcataattcaggtgcaattcaaataatttacattactcttatcagttttaaaccttttgtttcacattcttctctccattgaaatctcctggggttttatcaaaaaatgattatgtttacatcatttgatacttgaaagcaaatccattttggaggcttgtacagcagaatgctaaatgattataatagctgccaaaaactacatcacattatattttctaaagagttaggcaaacgctctgttaagtaaacaaaagtaaaaaagtttttataagaaatgagagcttttattatattgggtaatacaaaaatcattttacatgtgctttttaagtaaatagaagcatttagaaatgcctaaagggcattggttagcaagatcctaaattcctaatagttaataccaaaacaagaaataaaagttaaggaatgtacctctttggcagctttaactaaagcaacatgaaactccttaaaacaattggttccaagtgcaccgtaaaggatagcaactggacttccaacacttaactcataatagacgtggtcaaaatcaaatatttcaggtgtctgaaatgaatcacctaccctgaaggcaaaagtttacaattgacaacaacattggaaaattttaaaaaaaataaataaataaaataaaaaaataaacaaacaaacaaacagaagtgcactaatggcaacaaagtactcacagctcagcagagccctgaagccactccagtaattcataaacatccaaaaacaagtgttcaccggtatccacccaacaacattttcctccatggcttttcaggtttacaccatgcaggggatctaattttctcctttcaatcttttctgttagcaacttttcctcagtctcatcatctgaataattttcatcacctaggggaaaagatgcaagagattcttccgctaattgctggtagagcatcagtctaggggatgctgatctcagcataagagagaactcaaataatgattttaatggttcccttagaagagggcgcccacattccaaaattttcttcagacaatctttagctgtttgagatctaacagcatcgttatcagtattaagccaaatctcaacgaagtcccagaaaaggtcctttttttcgttagataataattcactgtttccaaacaataaatggatgttataacatggaaattttacaattggccaaaaattgtagacagatttaaaaaaagaaaaatagtgtatgataatgtaaaagacaatatgtgctgcagtcgaatgctgcatatgaagtaacaaggcatttaactcggttgaaaacagtaatatatgttgtacataagaataagagggaacgacacaacaaaagtatttcacactcatcctcataagtcataactaaccacatgatgtaaagataaatcaaattccatgattttcagttcagccgaatatttccatatcatccatctatatgaatcataagacgagcaccatgtgccaaacttaataatctgatgatctttttgtcatctaaacaatctcttccgaccacaaaagacttcagaaagaaaaacaatcaggaaaagtatcacataatgcttcaaaattccaccacctgacccccacacactactaaatttgagttggaaattctagttttagacactacagtccattatgtcatgtctaactcaaacaaatgacaatgatattcccatttcacactcctttacacgcattcgtatacttcaacacaatttcaacaaaacattagaaacaagtctaaaaataacaccaccccacattacaaaaacacataaaaatgtttgaaaaaggaagagcaaggacatacgcagcttccaaaagcaggggagttccagaccacttagcacggagtgcagtttgaacattcttgggtctctgaggagtgtcagcaatggctgaaccaatattcgacaacaccaacacaatgagaacccaacatcgagatctccaaaggcaccccatttgaatttgtggagcgagaatgaatgtgggttcagaattgatgccccatttgcacgtgcgacagctgaggaagtgagaggagcttcgaaagtttcgatctttgttctcacttcgaggactcgcaggttttttgggaagagacgaccaaaggcgacgactgcactaagtacgttagtgcagcgatcccatgttacatcttggttaccttttttagataataattacatttcggttactaaaaataaaaaggattttctttataaaaaaaaaatacttttttgcgcctttgataaattaataacaatattagaagttattcagaaaaatgtagtattatattgtttatactttatatattataatatgtcagtttcttaactatttaaaatttttccataaaaactatttagagtttttaaaataagttcatatatttcagaaaaaaaaatgaattttaacttataaatattttttaattgaatttttttactccagccagcgatgaaaagttcttaatgttaagttgagtgctgaactcttcaatggattggcccacaataatacatgttgcttctcctaatttcggcaagtgatcatttcaaaaattattttttatttaaaggtgtataactaaatggataaactcacactagcctgttaatttggaaatcaatttgattccttagaagatatcataaaggaatttaggaatgtaataatattattttggttgatcatttttttgagtcagatcatcttattggtaagttattacctcacaaattagctaatcaaacacgagctctttttcaagtgaatttctttttttactcctcaatattaatagtctttttcagttgttgttcctcattggattctattaagtataagaaattgattaaaattatagtttaattttgatatatttttattttaaagatttttatattatcaactaaaaaaatattattaaatgtgatttttttagtaattatgacaaaagtaaattttattatatgtaatagatgacaatataaaaatttttaaattgtcaatgtattttaattatattcttaattttttttaaataattcaagaaacctatgaatcatgtcccttgaatctttattctccatactattacatgcttaactcatgaggctgaactttgatatcaactgcaaatacaagagagggaaaaaaaacataagaaaataagaaagaatttaaattatgtttttgagatctcttaaacctttttgaaattgatcaaaagcttttttgaaaaactttagcaaccaatgtaagaatgaaatgggttttgtgaactaggaggatgattcaaatgcaacaaaacattttataaaagctttgtttttcatgaaaaatgtttatttcatataataactccttcttcatttgtaaaaaaagacaataaagataagaataggagaaattaaaattaaatgattcatggaaaaatcttgaactacatttaattcttgattacttagtagttcatttacgaaaatactaattgataaaaatcttaatttcttacaagatttaaatatgtttttggttttaataagttagcatttttttatttattttaatcttttctcccaaagttgtcagaattattcctaaaataaatctcaattcactgaatcataggctttttgataatctaccttgaagaccaaacaacttttgtttttccttttagcttctcccaccacctcaatagccacaacacactatgtacaataaatctcttgcccaagaaggcacttttgcctttgatcaataacatcattaagtactttcttcaagtgtaacacttttgtcacgatcttgtacatacatcctactaggaagataggtctaaactccccaaggccctgtgggtcgtcaacctttgggattagagctatgaatgatgaatttgagcctcttgaaaaaatacaaaatctatgaaattcttccataaacctcacgatgtcctccttcaagatatgtcaaaaagctttaatgaatttaaagttagattcatttaaactcaggcttttagcacttccacattgccatattgcctcctttacctccttctccccaaacctctcaacgaaaccaacactatcaatttgtgtgatttgattattttatgtctttcaatatttacaaaactaaatgccaattaaatctttgaattactatattagtattttagtgttaaaaagtttaaatgggaaagacatttctatttacaagagctagttttaaagttgtaaattatcaaaatatcacgtttacgtttctaacaattaatatgttgttaattagaattcattatggatatgattcatgaactaaagaaggtaactgaaattatcttattcttactaggtgatattcttttactagtaagaataagatagtgtcaatttcttaaacaaattaatttaaaaatttgaattgttatcttatcgttattctttatcttttcatgtttttttattacattatgataatgatatatatatatatatatataaaatatgatatactatcaaataaatttaatttaattattttataaaatgatttatgatgtatagtctacatttatgttaacatttagataaaaaaatcatttttttataattttaacatgatttcgtaagaaaaatatttaattttgtaatttttttatccactaatgatcattattatcaaaataaatatcacatttagtttagccttctttattagttctctgatatgaccgtttcgttctttctaacggcgcttcaatttattcattctttcttagttctttgacatgaccgtttcgttctttctaacgacgtttcaattgattcatctataaatacattgctattgtgtctgattcttccacaatcctactttcatcaaaacaggcttctgcattgctttatggttcaggatttctattcaagaaggaagagaaaaaatctaatagagggaagaagatgagagaatactgattttttcttttgacatgcatgcatggcagaaagcatgttctctgcgtcttccttcttctcttatgttttctcttctttctcgtactctttagacaattgcttggactgatattgaaggtgaggttttatctaatatgtattcatcttttaaggcagagttcttgattgcattgataagatatattgcaggaaattattaaagaaaatgaccaaggtgacttgttctaaagtattgtttttcaagaaggaagtattgtttttctttctacccttcttgtcgtgttaattgctccagaagtgttggattcttcccctgaaccccaccacgggcaccacctatccctctttcaggtttgaattaatgagatactgggagttagtggacatgcaacggtatgtgtatgacaaaaatgctgctttcttctcttgtttccttaatattcttgtaatttcaataatcttggaattgtttacttatttttagattgaaaagatggttaaagacattcatggaccagcactgacgctaattgttgagaagttgaaaccatatggagtttttcaaggcacgttctttggttcattcttcttcgcgaatgttggtgaatttgtgcttacatatcttctcttaactccctttttttttgtctttagagtcatttgagtcagctagaacagtttcagtggatgcaacatcgaaagcaaaggctgggaaatcaactgccaatggtgtttcaaaacatggaaatagagctgtatcttctgcatgttgatttttctttggttaagtacttttagatttgttttgatttctacctatttgtttcattatcacataagagagttgtggcaagtggcaacaaagggtgccaagtctgatcaatatctgttcaagatatagcggtccagtctcaagccttgttaagtaccaaggattcacataaggtattgtaggctgaactggagtacaccaaacgttgcttaaaatcttataaatatgtggttggactgccatctggattttcttggaagcaggaagttcaagagagaattgtggtttgaagttttaagtttcaggaaccacgtattgagtaaattcaagatcttgacgtgggaattttgtattatcaaataatgtttgaaaaactgagaattttattgtagctttacaagatcatgaaggagcataagaaccccaaggttagggaattttgcggatggtttctgctgtttaagattttggtgtctcacatataaagcttaatgtgcattatctgaatttgcaagttttttagatattttatttgttgttggaagtttgtatggtttattgtaaatcctattttgcaggacttaattgattttcttaaagaaatgggctgcagtcaagtaatgctgctactagaaatgcatcaattaattcttgggtgttctgcatagatttgttggtcaaggtcactttgcattaactttcaaattttgatttctctcaattttgttttcaaggctctaatgtttttctccttgcagacattaaagggtttcttcttactgatgtaaagcctgcactgttcagtgccccggatacaaagtatgagatgaatccattttaggtatattatgtttgatgaggttagttctatgcagggtcttaaatagaatgctatagcggtgtagcagagcagagtgacccctgcccgctacgggtgctgctgtagtgaagtagtttagtgtagtgtccacagtgaaccaaatagcgggttgaatagtgtctgtagtgggtgctatgtgttgattccaaaaaatccctctgaatagagacattagggcttgtttggagggctatttgtgggatttaatttcctaaaatcatatttgtagatgtaattatagtgaaaatgatgaagaaggctttgatttaaaaaatgattgttgatgatatataattcctatctaggaagcttgtatttaacgtttgttggtatttacttgtatgttttgtataagacgtctagactttttgttgttaatgatgaatgtcattggaagaggctaataagcacattcaagcaactggaactggtactccattagcattttttttaaccttatgctctctctttctctctctctctttagtctcccttttcatcaacttcctccccaaatggataagttgcatggtatctttttgtagttattctagatttctagctgattattttgataattgttcctaactgttttattaccaggtgagttgtttggggctcttaggggacgacttgttgatagcaacaaaaacattgtcatggcttccttgacagcaattggcaatgttgcatcagcaatgggtcaagctgtagagaagnnnnnnnnnnnnnnnnnnnnnnnnnnnnnnnnnnnnnnnnnnnnnnnnnnnnnnnnnnnnnnnnnnnnnnnnnnnnnnnnnnnnnnnnnnnnnnnnnnnnnnnnnnnnnnnnnnnnnnnnnnnnnnnnnnnnnnnnnnnnnnnnnnnnnnnnnnnnnnnnnnnnnnnnnnnnnnnnnnnnnnnnnnnnnnnnnnnnnnnnnnnnnnnnnnnnnnnnnnnnnnnnnnnnnnnnnnnnnnnnnnnnnnnnnnnnnnnnnnnnnnnnnnnnnnnnnnnnnnnnnnnnnnnnnnnnnnnnnnnnnnnnnnnnnnnnnnnnnnnnnnnnnnnnnnnnnnnnnnnnnnnnnnnnnnnnnnnnnnnnnnnnnnnnnnnnnnnnnnnnnnnnnnnnnnnnnnnnnnnnnnnnnnnnnnnnnnnntgctgtttgaacatttctggaaatggtttgttgcagggtattctgtctgatatatattgaaatgtcttggtgacaacaagaagcacatgagagaatgtgtgctgaatacattagatgcttggctggctgctgtccatctggttgaaatggtctgtattctgtgctggttctgtgttctttcattcttttgtcctggtatctgtgtccttagcatggttttcctataggttccatatattgcaattgctttgatggactctaaacttggtgcagaaggacgtaatatttttttattggttatcggggcaactttctgtgttaagtagttttgctgaaggtgcacaactgctgaagcctgcctcttctgcaatgacagtatgatctggttactctgcattctgctttttcattttttataccatttatcgaattaggtctagtgttccatgttcttggaacaaaatgtatgatgacttcttcttaggataaatcttccgatgttcgcaaggcatcagagcttgtattaatgagatactgagagctagtagacatgaaatggtatgtgtataagaagaatgctgctttcttcccttgtttccttaatattcttgtaatatcaagcatcttcattgtttacttatttttagattgaaaagatggttaaagacattcatggaccagcaccgacactaattattgagaagttaaaaccataaggagcttttcaaggcatgttctttggttcattcttctttgcgaatgttggtgaatttgtgcttatatatcttcccttactcctttctatggtctttagagtcatttgagtcgggtagagcagtttgtgggtgcaacatcaaaagcaaatcaactgccaatggtgttttaaaccatggaaatagagctatatctgctgtatgttgatgtttctttgattaagtacttttaaatttgttttgatttctaactatttgtttcatcatctcaaaagatagttgtggcaacagagagtgccaagtctgaatcaatatattttcaggatcagtctcaagccttgttaaatatcaaggattcaaataaggtattgttggctgaactggagtataccaaacgttgtttaaaatcttataaatatgtggttggactgtcatctggattttcttgcaagcaggaagatcgagagagaatggtggttcgaaggtttaagtttgaggagccacgtattgagcaaattcaagatcttaaggtggggctgtttgttgaggaataatcatgcataacttgaactatctataagtattgaattataataaatgtgcctgcaattttcagaatgataaagtatttcagagaggaattacataggagactcttaagtgcagattttaagaagcaagttgatggacttgaaattctgcagaaggtgttgttcttttaaccttctgaattacattcttttgaagtgttgagtgcactagaacttgtacaaactgctattgcatatttcagacacttccatccattgctgaggaagttatacaagttttggacagtcttctgaggtggtttgtgttgcagttcttcaaatcaaacacaatatgtctattgaaagttcaatttatttttgtttttgttgtgatttcagttttcttcttttcctttccttccttttcaaggagatgtctggtgttagtcttaactttattcaatttaatttataggagtatacttacttgatagagtcttatcttttcttaattgcataggtgccggaatttcttcctgaactgcttgacactttgaaggacgaggggtactcttggaccgaatctgaaggggcagtgtttcttctgtgcctagtagagaaggtttatattagcaactttaatatttgtgacacctgaggatgttgttattccagtgaatctttctgatggtatggttgatttcagcaaatttttggtttacatagatactagtttgactagtgtacttccttgggtgttacagatgaggaagtcacaatgcatttcttattttactgttgcagttagggcataacattgagaaagtacgagaaaaaatgcgggagctgacaaaacaatttgttgccatatattctgcatctaaatgtttcccttatatattagagggttttcgctcagagaataaccgaactcgaattgaatgtgccaatcttgttggatttattattgatcatcatggtggaggtattattactatttttggtattattattcagtattttccttgcatagttactccttgcattatgtggacagattagtgggcagctaaagtcgttgcaaattgttgcaagtttgattgcagaacgggatggggaaactaggaatgctgcattaaatacactagctactggttttaagattctaggtatgccatacactgtagaactccatctttctggtttccaatgtgcttgaaaaatacttgtgcctagtgatatatatatatatatatatatatatatatatatacatctttgaaaaggaaacttgttaaaacaaaagtacatctgtgttattttgttgaattgggtagtgtttttgcatcagtgtgtaaatttcaagagtttctatggatgaccacttgaggaacttatggtagagcagtttcagagggtgcaacatcaaaagcaaaggctgggaaatcaactgccaacggttttttcaaaacatggaaatagagctgtatcttctgtatgttgacttttgtttggttaagtacttttcgatttgttttgatttctaactatttgtttcatcatctcaaaaagacagttgtggcaacagagggtgccaagtctgaatcaatatctcttcaagatatacgctccagtctcaagccttgttaaatatcaagttttttccaaatctttataaaataataaaaagttaatcaatttattcatattctgacattttaaaactatatattacattaattatgatatatatatatatacacatatatatgaatgaaggcatccaataattttaaataaatataattttttgtatgtataattttttaaaatttaaattcagtaattttcagatgaaattattcaaccaagacgtttcccgcatgcagttttcaaccaagacgctgcacgtgaaagatcccttagatttgtcaaacatgagctgaagaacccatggattggatatacaacaacccccttcgttctttgcttttcttttgtattttttaggtagaaagtcagcatttcactgctgtcgtgcttaatatatatatttactaatttattaacaatataaaaggttgttcataaccataaaaagagaaaagaaaaagagaaaaaggttgttcataaattaacaagtcgtatttcactgctaatgttcttgatgtgtctttgaatggaattgaacatcgaaccgaaaagttaatcttcctttttcaacatataaaacattagttaagaatcaagtttttttttaatgtctctctcggcgtcttctcagttaaattctaaaaactcgtttaagaaatttaaaaataaagaacctttactgagatataaatttgtcacaaagaaattttttatagaataataaatatttaattgaagaaatatagaagagaacaacgacaaaaaaaattaaattaatttcattctataaaactattgtcatgatagcaaagttaatttagttaacaaataattgtgtatctcttgtttatgacaactgacttgggtccacgtgacttctaaaattggtattcagacaagcaagcaagctattggtcatcctaatactaatcgtgatattcttaattaattcaaggtttttgtttcaaagctatactaagaataacgtagcaaaattttgtattctaattctacaagataacattccactttctaaagaatgaagagaagcaggttggagaaaaggaacaaattacgcgtcgaagggctgctgctgtagtcttaattggccaaattggcgaaacgaaacaccgttggtttagaagacataatcacaaatttcatcaaaaaaaaaaaaagaagacatggtcacaaattgggaaagttatttagactcctatgttgaatggactcaggctgcttcattctaattcttctgttaggactgtagaaaggtcattcgagagtaccctggaaaaggaggcagcctccaagaagacaagaacagaagcaaaagatgtattattttccaagattggtgctattgacaacagatgtactaattcgccgcaaacatgataaagataacaaaaacaccttcactaacagtttaactaatttactagtattatgcatctgcttcttcaacaacacaccaaaaagcgccaccacacaggaagctcaactagcagatggtggacgctgctgtgaaagaaaaggtacttccaccactgttcccttgatgttgtcaccgacaattacagtgtctccttccgaagcagctcgcctcttgatgtaacctaatccaaagtgttcagattccttccttccagatgtgtagctggttaactttccaacctgcaaaacttgcaaaaaccatcaatttctttccaactcgttaaggagaatgttaggattacagaaagcaacccaacatcacaagcactaggctactgactcagggaaccactattagttatccattttttttacaagatggttctccagagaaacattgtaactggagttttcaccacgtacctgtcatctttagtttcaactgggaattacgctatgcaaatttccatcttcctttttaacaaatacataaggattgaagaaaaaaatagtgaacatttttcaaaagaaattatatagcacctttttcccatcaactgtaataatgctgccaggttctgcaggagcagaaagatgaaatccccataacctctgcttgattccatcatatgttatgagcctagatatagtctcctgacctttgtaacaacctgaaaaattcagtcagactaattattcagcaagtttcaacttttacgcagatgggtagcggcaaaagaacagttacacacccttatttagagaaaccgagttccaaagacaggcctccaggacattgaattcatttgtaagctccattccaggagtgggccttcctaagaaatcaagttatgatcaatattagataaaagaatcatagggagtgaaactatatacacacaaaaaaaaattactcgcatttcaaaaaacttcccagtttcattatccaatagaatataccattcaacccaaaggcaaatattaaatgcttacaaatcttctagtagttataaaaaccagtcattcattttttggttttacaaaaatatcctccataggaagaaatttgcttgacatatgatcaaacacaaaatgagaacctctcccaatagggactgaaactgtagttcaccacgttatggggactatcttccattacttccaaccctcattggtaatactagctattcttaactagaaggaaattgtgcactccacaattgacatctaaatgcatttgtattctttcttgcaccaaaagtccgcatgggcttgaagcattttttacatacaccggaagaattaggttgaaaataacatgatgagaattcaagtaatgtcataattcctaattccagtgtgcaagtgtgcaactgtgcaacctcaattttcattagtggaaaattggatcttggggaaaaagaacaaagatttatttatgccagtatcattagtctccaagactactcctaaataattcctaaattacgacagaaacaatatgcaggaaataagttagtatgctatattattcaactgtagaaaccaatgacagacatagaaatatgcacacaatctaaacaattcagtacctcgaataatccgtaatttattccatgcattagaacccattgggattgctccttgagtaagaatagctttccaaatggatgcagcagccgctggagacatcaataatgaaaaaccatcttcagaaatgatgtttccaacccctatagttacaggctgcttatcaacctacaaattacaatacaaatatatttgagagaatttgttcacgataataacaaaagactatacaggtctttaagctttcaacaaaaggaataaacaattggaaaaaacaattactaggttttggtattgcagttgaaagtttactactttggaagtaacacatatacacatgagaaatgctaacaatacactctctagcacactcttttgaatacactctctactcttggctaaaatttaatgaaaatcacaaaaattgtgcaggttcacttcttatttaatgaagttcattcatgatgttttagtttttgataggagtaggattaggaggtgggggcaggtgtacaaaaggagggacaattagcacaatatagttagtaataactaactgaattgttagacagttagtgggggggttagtatacagatacggaaacagggtagtgggggggaattatcgagattgtaattgggaggcatgagtacctcgaatactcatcacagcagctctgtaaacacattcttcagcaataataattcttttcgttcctaaattctgaaccagtgtctatcaactggtatcagagctccgatcttggagctgggcctgattaatggtgcagaaaaacaacggaagaatggaggcgagaatggatatgatggagcgggctatcgaggaaacgcgcgactccatggaaactcgcttacgatctatggaggacgcaattcagaagcttgcggcggtctgggagcaaccagcggcggcggcgaaagctagggaggaggaaacgaggattcgcaacaaggagaacgccggaattgggggagggaagtggcggaatcttgaattacctttctttacgggagaagacccacttgggtggctttccaaaatggaaaggtatttccgcctgcaatgtgtacgagaggatgataaactggaggcagtaatgatggcaatggaaggggatgcactgggttggtatcagtggtgggaatcttggaacccaaaccattcttgggaagggttcaagattgcaattgttcagaggttccaaggggctaatctgggaagcccatttcagttgctgctagccttgaaacaagagacaactgtgcaagaattcattagccagtttgagaagtgtgtaggcacagtgaaaggattggaagaatcgtttttaatagaaattttcctcaaaggattgaaggaggaaataagcactgaggtgagattgcatgagccgagatgtttgatggatgctatgaataaagcaaggcaagtggaagagaagaatagagtgctgggaaacataaacagaggctacagcaaggggttcaatgtgcagagacccagttttacgaatcaaaggaatgcaagagaagtgccaatttacagcagtaagactgttgaagcagtgccaagcagcaggggaggggagaatgaatggaagggaagaaggccattcaagaggttgtctccattagaggtaagtgagaagatgaagaaaggggaatgctttacatgtgaggagaaatatcatcccaatcatgtttgtaaaaataagcagttgagggtgatgttaatggaggaagaggaagacacagaggaggaaaaagaggaggaggaagaagataagcatgagttacatcaactgtcattacacagcattgaaggatttaccaccaagaaatcattgaagctgtggggtagcataaaaaacaaaatggtaattgtgttgattgattgtggggcaacccataacttcatttccagaaaattggtagaggaattgggtttggaagtgaccccgacaagcccatattcggtggaggtaggggatgggcataagataaggtgtaaaggagtttgtaaagctctgcccatagttctacaggaaatgcagatcatccaggattgctacctttttgaattgggaggagctgatgtggtgttgggagtggagtggctggctggattgggtgaattagaagctaactttgataagttgactttaactgtcaaggtgcaggacaaaagggtgactcttaaggctgatccagaattgataaaagctgcaatcagtctgaaattgataaaaagagcatggaaagaggaggatcaggggtatgtggttgagttgaaatccatgaaacaagaagaacggaaaggaaacattcctaaagtgatggaacagacattgagggaatttgaacaagtgtttcaagaacctcaggggttgccacctagcagagaaaaggatcatgctgtgaacattcaaccaggaaataaaatccctaatttgaggccctataagtaccctcattaccagaaggatgaaatagaaagattggtaggggaaatgttgtctgtgggtattataaggcccagtactagtccatttgctagtcctgtgattttagttaaaaagaaagatggaagctggcggttttgtgtagattacagagctttaaataagatcacagtgcctggataaattccctataccagtcattgaggaattactggatgagatagggggagctaagtggtttaccaagctggatttaagggcaggatatcaccaaatcaggatgaaggaggaggacattcacaagacagctttcaggactcatgagggacactatgaattcttggttatgccctttgggttaaccaatgcaccatctaccttccaagctcttatgaacgaggtactcaggccttttttaaggagatttgtgttagtattttttgatgatattctggtgtatagtcagtctatagaagatcataatatgcatgtacgagcagtattgcaaatgttactgcagcaggaattgaaggtgaataaaaagaagtgttgttttggccaagaatccctagagtatttaggtcacattatttcaggccagggggttgaagctgatcccagcaaattagaggccatgtctaactggcctattcccaaagatgtaaaagggttgagaggtttcttgggattgacaggatattataggaggtttgtgagaggctatgggaagctagcacagcctttgaatgcattgctgaaaaaagatgcttttaaatggaatgcggaatctaccatggcttttgttcaactgaaggaagcaatgaagcagttacctttattaatggtacctgatttttctaaaatgtttatcctggaaactgatgcctcaggaactgggctaggagcagtgttactacaagaagataagccgttagccttttggagtaaggcactgtcagaaagaagccagcagaaatcagtgtatgagagggaactcatggctgtcgttctagcagtgaaaaaatggagacactactttttggggaaaaaatttattataagaactgatcaaaggagtttgaaatttttaaatgaacaaagattattgagtgaggatcaatttaagtgggccactaaactgattggttacagctttgagattcagtttaggccaggaagagaaaatattgtggctgatgctttatctagacagtttgcttttcatgctatttcaagagtacaagaagatgaatggggagattgggaggaagaattaaaggctgatccagacctgcaggcaatttatcagggaattttgactaagacagcagagaaggcagggtatgctataaaaggcggtaaactatattttaatggcagattagttttgtcaaaaaattctgctagaattcctcttttgttgaaagatttacatgattctgttgtgggaggacactctggattttttagaacatttaaaagaattgctaatgtagtattttggaagggaatgaagaaaactataagagaatatgtggcaggatgtgaaatttgtcagaggaataaagctagtaccctatctccagctggtctgttacaactcttacctgtaccaaccagggtatggactgacatatccatggattttattggagggctgccaaaagctgaaggaaaggatactatcttggtagtaattgacagattaaccaagtatgctcacttctttgcattgagtcatccttatacagccaaagaagttgctgacttattcattagagaggttgtaaagcttcatgggtttccagaatctattgtatctgacagagataggctgtttatgagcctcttttggaaagaaatattcaaacaagtaggaacccagttaaaaatgagtactgcctatcatccacaaacagatgggcagtctgaagttgctaataggtgtttggaagcatatctaaggtgcttgactgggtccaaacccaagcagtgggttaaacaattggcttgggctgaattttggttcaacactaacttcaatatatctgccaggatgtctccatttaaagcattatatggacaggacccaccattgttaattaagagtggagacagtccttcaaagctggaagaagtgaacagattgagcagagacagagatgagctgttgcaagaattgaggagcaatttactgaaagcccaagatcaaatgagaaaatatgccaacaagcacaggaaggaggtagtactgcaggaaggtgattgggtttttctgaaattgcaaccctatcgaatgagatcattagctaagaagctaaatgaaaaattaagtcctaggtactatggaccatatcaagtactgcataggataggagaggtggcttatcagctggagttaccagttggaagcagaatacacccagtatttcatgtatccttgttaaagaaggctatcaaacccagttgttctccacaagctttaccagtggccttaaatgaagaatgggaattacaggtttatccggaaaaaataatgcagaaaaggactgcagcagatggcagagaagaagtcctaattaagtggcaggacttaccacatgaagaggatagctgggaaatggctgaagagatgaaaaagattttccctcatttagaccttgaggacaaggtcaatcttgaaggagggggtattgataggagtaggattaggaggtgggggcaggtgtacaaaaggagggacaattagcacaatatagttagtaataactaactgaattgttagacagttagtgggggggttagtatacagatacggaaacagggtagtgggggggaattatcgagattgtaattgggaggcatgagtacctcgaatactcatcacagcagctctgtaaacacattcttcagcaataataattcttttcgttcctaaattctgaaccagtgtctatcagttttccataaattttaaccaataagagagatgttgttagcactccttttcaacacattctaaattttgaagttatgtaaaagatgcaaccacaatccaggggaacttgttgccaaaaacaaaagttgcaattacaaaaatatatgctcgttaaacaaccaaaatatgcatttctgacagaaagaaagttatcagtgagaaacaaatacatgaagcttaaaactagcaaataagacatgattgatcatgtaagttgtttttggacaaaataaataaataaaggcataaacccatgcagtcatcatcaaatacacatgaccagttgtatcttgtagagagaaaccggtgatgaaaaagacaactggtaattagaacacatacttcaaaaaagccagtttcatccagcttacattaaaatgtagatgtgtgccatatggttttccgacaagatcaccaaggttcaagttctccatcacctgcccattcattatactgaaaattaccaactctgtcattctcaacacaaaataggtataattatgtaacttacttggccacttttgggtcccaccaaaacaaaaaaactggtttgcttagttatgtcttgaatctctaccttatcagcaaaaaatatgtaccttaaaatcattacatgtaaaagatttagttcatgtatttgataatattcataggaaagaaaactatttggtttctctctttatccttttagttttacttctgttggtaaatccttacatcacaactaacaagaaattacctacttgttcagcatttcagtaatggttgtacaggtctctggtgaaaccactaatgttatcgcatttttctatcaaaaaccaacaagagaaagtggtcagctacatgataattaattatattgtagaaaagacaaacaaatgaattttgtgagaaggataagaaaagaaaatcaccatgagccatgcatgtgcgatatctattgttcgagctgttggtgttacaaaaacagtgtcacatccctaaggatttcagttagagatccaattacttaatcctgtattataatatgaaatataaaaaagaattgacaagaacttgccaataacatataaatgtagaaacaatgctactttctttcaatacatacttgtccttcgtgtagagattcgaagtttgcagtactctggttgtgaaggaactgaatgcgatcttctccactgactttggttcaggtgaggcaaaacatttgcatgtaaaattaagaaaacattgaaatatgtcaaggaccaactcttaatagcctaagaaaagcaagtacctcttatccgaccgaagtgtgaaagatccacaacctatgccatcagatgtcataaagaattaatttaagcaaacaaataaatcctacattatctaacaatatattaatatacctttataaattggtaagcatgcaattataagacttcaaatttgtattagcttttacaaaaacttgatagcaagctatcacataatatttttgtagaaactctagaattacaattcaataatctacaaccttgagctaatccaagtccacaaaagacatgtaggttagttcacatttactgtactacttctatttttttaaaattacagactgaataaaagaagttccagagtaagtaatagaagttacaggttgaaaaattaaagtctgtaatttttatgagtttgtaacttttataactcaaaccaggaaattttataagttcgcaacttctattactcaatgtgtaacacttgacataaagtcttcaatttcaaaaaataataccaagcctgtatcttttactatttaattgtagcatatgatataaagtctactgcaatttcaaaaaacaaatagtacagtactcctttttttagagggagcatcaaagtgaaccaccaaagtcaaagagaattaagagccaacgaaataagcagtgaagatttaccatattttgtttggactataaggcgaagcatctctagaaccataaataaatcaattcaaagaagcaaacaattaaaacatgcattgattcttgtggtttatattgtttctaccaaatgaagttgttcaagcagagataacaagaaagcacattaagctacaggcgtaaaaaaaaaaaacaataaataaattacataccacaaccccgttgtccacagcagccagcgcttcatcatcattatgaaatgtctcaatgatcccttcaccagaaatctctgcgcctgcagttttgatagtatcctgcaatgagtaaaattaataatttgacagtaaaaaaattgcacttagccacctgatttctcttctcaagcaatatcataagggtattccaaaaaacaagagtcataatatatttttagtccttatatgttacactcattttaatttggttcttatatgacaaactttcaattcagtccctacacatatcctttaaatttagtaatcactgtctgttgttgatatgatattgtctgtcggagggataactcaatgtagtgtagaaccaaataaaaaatgtagggatcagaaatactctatttttttgtagtgacaatcattttcaactcaattcctaggtaaacttattcgtaaatccataccagtctcagtatgaagtggcaacaaacagcaagaacaacattgaaatatattatacaaatagagactaaattgaaagccttttacaattaggaagccttttaaaagcaaaattatctgttttttctttaaaaaaattgtaaaatcgagttctctactgccataagttatcaatcacaaataacagcgcatagtggctatttctaaaaatgctatagcagcgtggtcactattctggatttttttacagttgatataatgtatatccatataaattctcaaaacagataaaaaaattactcaaaattcatgacattcataattaacaataaaaattcataggtgtcttacacaaaacatacaagaaaataccaacaaaagtcatggtaattggtaaccactatccactaaggtttaagcctctaaggttagaaataattaaattgtctaaacgtattcaaaataaaagttttctagatatgaatcatcaatcatcatcttctaaatccaagtcaccgtctttatcgttttcactactgttacagctgtagatttcttcctcttcctcctcttgaacataatcaatttctaattcttctgctgaaggtgcagcacctctcctcagttttatttgatgcctagtgcatgttgaagtctcacccacaccagctaaattggcaacatctcccccaatcaagttgttgtcacaatcaaaatccaaatcatcttcagcatcctcgccatctcctcatgtctcccactaaccattcatcactaccatcaatatcatcaaggacaatgggatgacatcacgagtgtcaaagcgttgcttaagcgcttggttatatttaatataaaccaagtcttgaatcttttgatgctcaagcctacttctcttcttcaagtaaatctatattataattaaaacaagttagtttcacaatcattgtatgaaaactctatatatttaaaacttctaatattgacgtatgtgctcaaaagtactccaattacgctcaaatccccatgaactacaagttaagctcagtactttaatggcaagcttttgaagatttggagtatgcaatccctcctccaccagtcagctgtaatgcagtgcaacaccttatttattagggcaactaacttaaataaattgttatgaaattaaatttcaaaaaaagaaatgcagttttgcacttaccaggagctactgtagtcttttgccttattgccactttatacgtagacaactcgcttaaaatcttatctacaggtttgttattttcactaagcctctcaatgcacctataaagtccttccatcacttcaggatcaagatcaagtcttgaattttttgtagaagaactcgggttttagaaaatgacctgctgcatgcaatggatgattgagttgacatttccatcttctatcaatgattgcaaatatttctttgtacttttcttcattccctttgaaagaactttgaattgtctccttggctctatcaattgctttataaatgtaacccattgcaggctttttctcattattaactagcctaagcacatgcacaataggccgcatagccttaaggatgtaaacagcatcattcctaaatgaaggcataagaacaatgccagctgccctattcacctcatgattttcagcaatattagttttcatccattcatccgaagtgaacattcttctaagattatttttctgattatgcagcctttgcaaagtaagaaatgaagtaacaaaccttttcactccatgtctaaccaattccatcttgtttgtgaactttctcatcatgttcaaagccaatgtgtggttatagataaaactaacaagatagatgcctcttcgtatagcctttttaacttcatccatcttcccaatgtcctctagcatcaagtgtaacatcctttataattttatttatttatgtatacttaattattttatttcgtttattcctttaattcgtcaaatagaaatttagtagaaagaatttaaaacaaaaagtcattagataatacattcatcgcatatcattacacatagttcatacgggctttaatttacaatcccatcatcctagtgtttttatttatttacaaagtgctccacccctcactttcaaacgtagtctccattactatcttcttcgctgagcactattatggggtccgtgataggattcggatacacgggagcaaactgaaggaagggatcatatggattaaattttttactaaaaacagagattggaaaatgagctccgaagtagatgtgagctcggagaactggctgcatggtgactacataacaatttctgacttcagcaacgtaccaagctatatccaatgtatcaaggaacagtatgatggaagccatctaagataaaacattaaataaatctactgagaaatttttgatgaagtcagaaattgttatgtagacaccatgcagccagttctccgagctcacatctacttcagaactcattttccaatctctgtttttagtgaagaatttaatccatatgatcccttccttcagtttgctcccgtgtatccgaatcctaccacggaccccataatagtgctcagcgaagaagatagtaatggagactacgtttgaaagtgaggggtggagcactttgtaaataaataaaaacactaggatgatgggattgtaaattaaagcccgtatgaactatgtgtaatgatatgcgatgaatgtattatctaatgactttttgttttaaattctttctactaaatttctatttgacgaattaaaggaataaacgaaataaaataattaagtatacataaataaataaaattataaataaataaaattataaaggatgttacatcaagtctatacaataggaagcaaatggagtccaaaacaaatgctccctcttgatttctaaaattttccccaagactgaaatcaataaacttaaaatgagtaacaaactaacaattaacaattaaaattgtgaaattaattaataataattcttacaagctaatacaaaattagctccattgttcgtgatcacttgcacgacagtttttctccaatatcctcatcaaaactatccaagagctcaaatagtctcacctgagtcaccgcagtcttcatgcacctagaagcatcaacgctcctcacaaacattgatcccccttggaaaatccaccaaaaaaataatcaaggttctattcattctatccgtcaatgcatctaacataactgaacatccatacactgctcgttcttcttcatgactcttaagaaatccctttgtgtattccaactcctttttaaggagtggacctctaaacacatggcagcaccattggttacaaaggaatcccgtttgtaaccaagaatcgtactatatattgctctagctttcctgtcagaagcaccattacaaactttggcatttcgggccttcttcgaagcagataaagagacctctcctgctgttagaggccttttccctctttggagattccaaatttcccgcatatcttccatctcatgttgcaactcattcccggcaggtaaagagacctcaccagttgttagatgccttttacctcttcggagattcgaaatttactgcatttcatccaagtcaagtcacggtacagaaactcattgccagcaggtaaaaagacctcgcttgatgttagataccttttccctcttcggaaattccaaattgcccttattcttccatgtcacgttcatgcatctcattcccagcatgtaaaaagaactcacttgatgtttgaggtcctttccctcttcgaaggttccgaattgcccgcatttcttccatgtcacattcatgcaaccaattcacgttgcatgcaacatcttccccttgttgaggggaagacgctgatgcagacccttcctgttgcgagggacgttgccatgacttagaagaaagaggcacgagtcgccggacagaagagaaaaactagccggaacggagagaagagaggcaaagctaggtcgaggctgaaaaacctttttcataaaatagccgcaagaaaaacctaacgtgagggatttttcggaatgttacgggtgcagcgcgatagcggcgttacactccgcgattccggcgacgctgaatcgcgccgcgaacgacgctgtagcgacgctattgagaagagtggagagcaagaaataagaaagggaagtttacaagtgctggaaaattaccaggaagtcatggtcgatgggaggaggagaaaggtcgaaaggtgaggactgggcacaaattgaccaagacatgagcttcttcttcttctccttcacgagatggtggtgggaccaaaacgcaacgtttcggggcaacacagagagacaccatgttaatgcttggtttggaggatggttcaaccaagttgcagctgctgccaccggcaccaccgttgttgtcattttggattagataatggacaacaaaacagagtctctctgtctctctctcccacaaacactactctgttcgggatttttattcttggaacccgtgcacagttttttttagtaaaaaacagaagcgagagatacaaaacaataatataaaatgtttaaattttatataatatgtagattaggagtcaggaatgcagtaatacattttattaccttttttgtattttttttaattattatgagaaaatacatccgattaccaactaataatacattataatacttgtttaatgttttttattattatgaaaaaaatcaattacggactaatatgtgaatatataattattaacatttattattaacaagttggctaaaaagaaagattaagatgtcatgtaaatgcttgattttgaggagtgttcaaccaggctgctagtaccatttttgtcattttggattagatagttaataataggctgtctcaaacatgcacgttattctgctccgcacggtgtacaattcaattttaatataaaataataataaatacaaaacaataaaaaagtaagttcatgaggtagagaaatttgaccaaatgaattgcacaaaaaggacgcaaaaaaagttgtgtttgaacattttgatttttttaggaattaattgaacatttgataattaataaaatatattaaattaaatagaatcaagcgcaataaataaaaatcaaatagaatgatacattacgcatagcaaattttcattcaattagatgcataatcacatatagagcaaaccatcacaggaaacaacacattgactcaactactgggctaatagaagaaacacggtgtacagaataggcactacacaattctgcagcaggatgttgatgtgattgaggcataaccactgcaaaaattcttccagattttttatgctaacatgtagtcaactaaactatgcactctagttgggtcaaataaataaataaacactctagtataatttgatttttggtagtagtctatacatgattaaaccggatcagaaatgccaaatccacctccttcagtggccccgagtcttctttgctcagattcaatcacgcgtgcaatcgggttcgcatagttgtgaaactgcgacaattcacacccaaaaattcaactatttctctattataacaataagcaaaacacgcatcatcatgcaatatttacaaccaacattataacgctaagagcaaggattgaagcaagtccgtcaaaaaaattaaacaataaacttaatagtagagttcaagcgaaagttgtattggctaactttagaaacttttaaaatttaatttttctttcatggaggagatgggtgcaatttaaagatttttaaaccaagcctgttgattagatcacacaggtttcaagaataggataaatggccatttaccgcttcaactagctcttcacatttgcgcgctaacagtgccactttaactgctccagcttcttttactgctataattttactacttatggcatcgacctgtcatttgcagataagaaataacaatttattctttcacctaatataattgatatatcatgaaacttaaggaatgccacctcagataaaacagcctcgacatttctctgccttgtttctgtaacagatctcttagattcaacatctgattttgtactacttaagtatttagttgcttcttcccgcataatattgcactctttctccaattgcttccatgattcttccatctgctcaactaaggaaaaacaagtcgaaaaagttggaggtaaaacatgctagtaacaaatattcatgcttaaagagcagttatatgtggcatgaaagtttccaacaaaaatcattaaaaaaataatgtggcgtacaaatgtgctggttttcaatcaccaaatgctgttaaaaaggaaaacaaaattattggacaaaaatcatgcaggttacttgtgaacaggttttacagaatgtgtttcgtaaaaattatcattactcattcttaaacnnnnnnnnnnnnnnnnnnnnnnnnnnnnnnnnnnnnnnnnnnnnnnnnnnnnnnnnnnnnnnnnnnnnnnnnnnnnnnnnnnnnnnnnnnnnnnnnnnnnnnnnnnnnnnnnnnnnnnnnnnnnnnnnnnnnnnnnnnnnnnnnnnnnnnnnnnnnnnnnnnnnnnnnnnnnnnnnnnnnnnnnnnnnnnnnnnnnnnnnnnnnnnnnnnnnnnnnnnnnnnnnnnnnnnnnnnnnnnnnnnnnnnnnnnnnnnnnnnnnnnnnnnnnnnnnnnnnnnnnnnnnnnnnnnnnnnnnnnnnnnnnnnnnnnnnnnnnnnnnnnnnnnnnnnnnnnnnnnnnnnnnnnnnnnnnnnnnnnnnnnnnnnnnnnnnnnnnnnnnnnnnnnnnnnnnnnnnnnnnnnnnnnnnnnnnnnnnnnnnnnnnnnnnnnnnnnnnnnnnnnnnnnnnnnnnnnnnnnnnnnnnnnnnnnnnnnnnnnnnnnnnnnnnnnnnnnnnnnnnnnnnnnnnnnnnnnnnnnnnnnnnnnnnnnnnnnnnnnnnnnnnnnnnnnnnnnnnnnnnnnnnnnnnnnnnnnnnnnnnnnnnnnnnnnnnnnnnnnnnnnnnnnnnnnnnnnnnnnnnnnnnnnnnnnnnnnnnnnnnnnnnnnnnnnnnnnnnnnnnnnnnnnnnnnnnnnnnnnnnnnnnnnnnnnnnnnnnnnnnnnnnnnnnnnnnnnnnnnnnnnnnnnnnnnnnnnnnnnnnnnnnnnnnnnnnnnnnnnnnnnnnnnnnnnnnnnnnnnnnnnnnnnnnnnnnnnnnnnnnnnnnnnnnnnnnnnnnnnnnnnnnnnnnnnnnnnnnnnnnnnnnnnnnnnnnnnnnnnnnnnnnnnnnnnnnnnnnnnnnnnnnnnnnnnnnnnnnnnnnnnnnnnnnnnnnnnnnnnnnnnnnnnnnnnnnnnnnnnnnnnnnnnnnnnnnnnnnnnnnnnnnnnnnnnnnnnnnnnnnnnnnnnnnnnnnnnnnnnnnnnnnnnnnnnnnnnnnnnnnnnnnnnnnnnnnnnnnnnnnnnnnnnnnnnnnnnnnnnnnnnnnnnnnnnnnnnnnnnnnnnnnnnnnnnnnnnnnnnnnnnnnnnnnnnnnnnnnnnnnnnnnnnnnnnnnnnnnnnnnnnnnnnnnnnnnnnnnnnnnnnnnnnnnnnnnnnnnnnnnnnnnnnnnnnnnnnnnnnnnnnnnnnnnnnnnnnnnnnnnnnnnnnnnnnnnnnnnnnnnnnnnnnnnnnnnnnnnnnnnnnnnnnnnnnnnnnnnnnnnnnnnnnnnnnnnnnnnnnnnnnnnnnnnnnnnnnnnnnnnnnnnnnnnnnnnnnnnnnnnnnnnnnnnnnnnnnnnnnnnnnnnnnnnnnnnnnnnnnnnnnnnnnnnnnnnnnnnnnnnnnnnnnnnnnnnnnnnnnnnnnnnnnnnnnnnnnnnnnnnnnnnnnnnnnnnnnnnnnnnnnnnnnnnnnnnnnnnnnnnnnnnnnnnnnnnnnnnnnnnnnnnnnnnnnnnnnnnnnnnnnnnnnnnnnnnnnnnnnnnnnnnnnnnnnnnnnnnnnnnnnnnnnnnnnnnnnnnnnnnnnnnnnnnnnnnnnnnnnnnnnnnnnnnnnnnnnnnnnnnnnnnnnnnnnnnnnnnnnnnnnnnnnnnnnnnnnnnnnnnnnnnnnnnnnnnnnnnnnnnnnnnnnnnnnnnnnnnnnnnnnnnnnnnnnnnnnnnnnnnnnnnnnnnnnnnnnnnnnnnnnnnnnnnnnnnnnnnnnnnnnnnnnnnnnnnnnnnnnnnnnnnnnnnnnnnnnnnnnnnnnnnnnnnnnnnnnnnnnnnnnnnnnnnnnnnnnnnnnnnnnnnnnnnnnnnnnnnnnnnnnnnnnnnnnnnnnnnnnnnnnnnnnnnnnnnnnnnnnnnnnnnnnnnnnnnnnnnnnnnnnnnnnnnnnnnnnnnnnnnnnnnnnnnnnnnnnnnnnnnnnnnnnnnnnnnnnnnnnnnnnnnnnnnnnnnnnnnnnnnnnnnnnnnnnnnnnnnnnnnnnnnnnnnnnnnnnnnnnnnnnnnnnnnnnnnnnnnnnnnnnnnnnnnnnnnnnnnnnnnnnnnnnnnnnnnnnnnnnnnnnnnnnnnnnnnnnnnnnnnnnnnnnnnnnnnnnnnnnnnnnnnnnnnnnnnnnnnnnnnnnnnnnnnnnnnnnnnnnnnnnnnnnnnnnnnnnnnnnnnnnnnnnnnnnnnnnnnnnnnnnnnnnnnnnnnnnnnnnnnnnnnnnnnnnnnnnnnnnnnnnnnnnnnnnnnnnnnnnnnnnnnnnnnnnnnnnnnnnnnnnnnnnnnnnnnnnnnnnnnnnnnnnnnnnnnnnnnnnnnnnnnnnnnnnnnnnnnnnnnnnnnnnnnnnnnnnnnnnnnnnnnnnnnnnnnnnnnnnnnnnnnnnnnnnnnnnnnnnnnnnnnnnnnnnnnnnnnnnnnnnnnnnnnnnnnnnnnnnnnnnnnnnnnnnnnnnnnnnnnnnnnnnnnnnnnnnnnnnnnnnnnnnnnnnnnnnnnnnnnnnnnnnnnnnnnnnnnnnnnnnnnnnnnnnnnnnnnnnnnnnnnnnnnnnnnnnnnnnnnnnnnnnnnnnnnnnnnnnnnnnnnnnnnnnnnnnnnnnnnnnnnnnnnnnnnnnnnnnnnnnnnnnnnnnnnnnnnnnnnnnnnnnnnnnnnnnnnnnnnnnnnnnnnnnnnnnnnnnnnnnnnnnnnnnnnnnnnnnnnnnnnnnnnnnnnnnnnnnnnnnnnnnnnnnnnnnnnnnnnnnnnnnnnnnnnnnnnnnnnnnnnnnnnnnnnnnnnnnnnnnnnnnnnnnnnnnnnnnnnnnnnnnnnnnnnnnnnnnnnnnnnnnnnnnnnnnnnnnnnnnnnnnnnnnnnnnnnnnnnnnnnnnnnnnnnnnnnnnnnnnnnnnnnnnnnnnnnnnnnnnnnnnnnnnnnnnnnnnnnnnnnnnnnnnnnnnnnnnnnnnnnnnnnnnnnnnnnnnnnnnnnnnnnnnnnnnnnnnnnnnnnnnnnnnnnnnnnnnnnnnnnnnnnnnnnnnnnnnnnnnnnnnnnnnnnnnnnnnnnnnnnnnnnnnnnnnnnnnnnnnnnnnnnnnnnnnnnnnnnnnnnnnnnnnnnnnnnnnnnnnnnnnnnnnnnnnnnnnnnnnnnnnnnnnnnnnnnnnnnnnnnnnnnnnnnnnnnnnnnnnnnnnnnnnnnnnnnnnnnnnnnnnnnnnnnnnnnnnnnnnnnnnnnnnnnnnnnnnnnnnnnnnnnnnnnnnnnnnnnnnnnnnnnnnnnnnnnnnnnnnnnnnnnnnnnnnnnnnnnnnnnnnnnnnnnnnnnnnnnnnnnnnnnnnnnnnnnnnnnnnnnnnnnnnnnnnnnnnnnnnnnnnnnnnnnnnnnnnnnnnnnnnnnnnnnnnnnnnnnnnnnnnnnnnnnnnnnnnnnnnnnnnnnnnnnnnnnnnnnnnnnnnnnnnnnnnnnnnnnnnnnnnnnnnnnnnnnnnnnnnnnnnnnnnnnnnnnnnnnnnnnnnnnnnnnnnnnnnnnnnnnnnnnnnnnnnnnnnnnnnnnnnnnnnnnnnnnnnnnnnnnnnnnnnnnnnnnnnnnnnnnnnnnnnnnnnnnnnnnnnnnnnnnnnnnnnnnnnnnnnnnnnnnnnnnnnnnnnnnnnnnnnnnnnnnnnnnnnnnnnnnnnnnnnnnnnnnnnnnnnnnnnnnnnnnnnnnnnnnnnnnnnnnnnnnnnnnnnnnnnnnnnnnnnnnnnnnnnnnnnnnnnnnnnnnnnnnnnnnnnnnnnnnnnnnnnnnnnnnnnnnnnnnnnnnnnnnnnnnnnnnnnnnnnnnnnnnnnnnnnnnnnnnnnnnnnnnnnnnnnnnnnnnnnnnnnnnnnnnnnnnnnnnnnnnnnnnnnnnnnnnnnnnnnnnnnnnnnnnnnnnnnnnnnnnnnnnnnnnnnnnnnnnnnnnnnnnnnnnnnnnnnnnnnnnnnnnnnnnnnnnnnnnnnnnnnnnnnnnnnnnnnnnnnnnnnnnnnnnnnnnnnnnnnnnnnnnnnnnnnnnnnnnnnnnnnnnnnnnnnnnnnnnnnnnnnnnnnnnnnnnnnnnnnnnnnnnnnnnnnnnnnnnnnnnnnnnnnnnnnnnnnnnnnnnnnnnnnnnnnnnnnnnnnnnnnnnnnnnnnnnnnnnnnnnnnnnnnnnnnnnnnnnnnnnnnnnnnnnnnnnnnnnnnnnnnnnnnnnnnnnnnnnnnnnnnnnnnnnnnnnnnnnnnnnnnnnnnnnnnnnnnnnnnnnnnnnnnnnnnnnnnnnnnnnnnnnnnnnnnnnnnnnnnnnnnnnnnnnnnnnnnnnnnnnnnnnnnnnnnnnnnnnnnnnnnnnnnnnnnnnnnnnnnnnnnnnnnnnnnnnnnnnnnnnnnnnnnnnnnnnnnnnnnnnnnnnnnnnnnnnnnnnnnnnnnnnnnnnnnnnnnnnnnnnnnnnnnnnnnnnnnnnnnnnnnnnnnnnnnnnnnnnnnnnnnnnnnnnnnnnnnnnnnnnnnnnnnnnnnnnnnnnnnnnnnnnnnnnnnnnnnnnnnnnnnnnnnnnnnnnnnnnnnnnnnnnnnnnnnnnnnnnnnnnnnnnnnnnnnnnnnnnnnnnnnnnnnnnnnnnnnnnnnnnnnnnnnnnnnnnnnnnnnnnnnnnnnnnnnnnnnnnnnnnnnnnnnnnnnnnnnnnnnnnnnnnnnnnnnnnnnnnnnnnnnnnnnnnnnnnnnnnnnnnnnnnnnnnnnnnnnnnnnnnnnnnnnnnnnnnnnnnnnnnnnnnnnnnnnnnnnnnnnnnnnnnnnnnnnnnnnnnnnnnnnnnnnnnnnnnnnnnnnnnnnnnnnnnnnnnnnnnnnnnnnnnnnnnnnnnnnnnnnnnnnnnnnnnnnnnnnnnnnnnnnnnnnnnnnnnnnnnnnnnnnnnnnnnnnnnnnnnnnnnnnnnnnnnnnnnnnnnnnnnnnnnnnnnnnnnnnnnnnnnnnnnnnnnnnnnnnnnnnnnnnnnnnnnnnnnnnnnnnnnnnnnnnnnnnnnnnnnnnnnnnnnnnnnnnnnnnnnnnnnnnnnnnnnnnnnnnnnnnnnnnnnnnnnnnnnnnnnnnnnnnnnnnnnnnnnnnnnnnnnnnnnnnnnnnnnnnnnncgtacctctctcgctctcgctctcgctctcgctctcgctctctctctctctctctcatctctcataactagtaacaaatattcatgcttaaagagcagttatatgtagcatgaaagttttcaacaaaaatcattaaaaaataatgtggcgtacaaatgtgctggttttcaatcaccaaatgctattaaaaaggacaacaaaattattggacaaaaatcatgcagcttacttgtgaacaggttttacagaatgtgtttcgtaaaaattatcattactcattcttaaaccnnnnnnnnnnaggagcaaacgtcgtgatgatatctccagttaagatttcttcttgctccgccgcgtgctgccgccggaaccgcagcgtggtgtctgtacctatccccatcgaacctatggctaggagggtatctctctctatcctccccgaaatatctctctctaccctccccaacgtacctctctcgctctcgctctcgctctcgctctcgctctctctctctctctctcatctctcataactagtaacaaatattcatgcttaaagagcagttatatgtagcatgaaagttttcaacaaaaatcattaaaaaataatgtggcgtacaaatgtgctggttttcaatcaccaaatgctattaaaaaggacaacaaaattattggacaaaaatcatgcagcttacttgtgaacaggttttacagaatgtgtttcgtaaaaattatcattactcattcttaaaccatgtagccagaaatggagacacggcaatgcttgcacaagaacatacctttactctgtttttcaaccaatttggcctcaagtgacttctccaatatttcttcatcactaagtttagccttcaatgctttaagatccttttcaatagatttagcagaatttacctatagaaggcacaactgccatcaaacaaggttttgcacggtaataatctttgaagcaatgtgaagaagtgcttcttgcacatgagtctcaattgagaaatttcacaagaaaaatgttgtttccattgatgttgcaacaacatcctctgctcctctgatttctaatttggacactgctcaagttaattttaacactgcttaggctaattttgtgcaacagaattagaattctatttctaatcagagtcagtccacaaactactctcaaacttaaatgaaactgaaagtaaatctgagagagaactaaattgaggtgaaagagtattgtattcaacccaaagagaaactgagtacataacagctacagatatgtaactgtcaactaacttgagtgtcagtcaatttgccaaagataactattcatcctaatgtttgcttggtgaaatctcaggtatccaatgagatacttctcaaaggaaatctaggttctgatggactgtacaaatttccaagtttgctgtcatgttcttcatctactgtcaagacaagctctcccaggcctagttctatttttcctatttctgttttaaattctgtcgctgtaaaatccattaattcaagcgcttggcactctaggttaggccattctagtgtttatgttcagaaaattgtaatgcaactttgtaagatttcatttatcaataaaactgagcttgactttttgttattcatgctgtcttggtaaagctcacagattacactctccctgttctctcacaacttatataatcaacctctggaactaattttcagtgacatttggggaccagctccctttgtttcctctacagggtatagctattatgctacttttgttgatgcctatactaggtatacctggatttttcattttttctgcttaaaacaaagtctgaaacactaaatgttttcaaacagtttcaagctatggctgaaaggcaattaagtctacctattaaagctgtccaaacagactggggggagagttcagaccttttactgcctttttacggcaattaggtgtaactcatagggttatttgccctcacactcatcatcaaaatggtgtggtagagagaaaacatagacacgtagttgagcttggtctcactcttttagctcaatctcttcttcctcttacctactgggatcatgcattcttaaccagtgtttatcttatcaacagacttcccacctcttcccttaattttgatataccctttgtcaaattatacaaacagcaacctgattttcactttcttagagtgtttggctgtgcctgttttcctctcttaagaccttacaacaaaaacaagtttcagtttaggtcccaagaatgtgcttttctagggtattcacctggacacaaaggatgcaagtatctttcctcagatggcagaatttacatctctaaggatattgtttttaatgaatctaaatttccctatcctaaactattttcatcttctacttcttcacacccttctttagagtctcatgttcctatcaccactatcccgcttgtgtctatacctcccacacaattacataactcttcctctgttgcttctccagccagtaccttagaaatttcaacttcttctctacctcaaaattctgtctctcactcacagtcaagtcaacctgcccctctcctttcagttgacactcaaccaaagcttgacactcaaccagattctcaattatctactgctattcatgtagatgagtctgaatcatatactgctgtaccctgcagatttttctgttcccagttctgacatacagcaactaccactcattccctctattcctcaaaatactcacccaatgcaaaccaaatccaagtctggaattgtgcaacacagaattcatcctactcttcttcttgctcacatggaacctaagtctaccaaacaagccttggctgatcctacatggctagctgccatgaaagctgaatatgatgcattgattaagaatggtacttggtcacttgtttctttgcctcctagcagagttcctattggctgtaagtggattttcaggattacaaaaatccagatggttcagtaaacaagtacaaggccagattggtagctaagggatttcatcagcaatatggaacagattacactgaaactttctcacctgtcatcaagcccatcatagtgagacttctcctctccttggctgccacctatggttggcctcttcgacagttagatgtgaatgatgcttttcttaatggcattcttgagaaggtgtatatgcagcaaactccaggttttgaatcttccaccaaatcaatggtgtgcaagcttcagaaggccatctatggtctcaaacaggctcctagggcctggtttgataaactaaaggagattcgactgaagttagagtttcttactccactaagtaaaatgtattggttttttacttagtggaaattgtcaactgcaatctgttagtttgttagatgttcctaactataggttctgttggtctctctatatataaagagttgacaaggacctttgtaacatggcttgatatttttctaatcaatgaaatcagttttacaatttctatcagtccataatagatctcatatctctaactctaagacagcattccaattgtgagttccatccaaaaaataaataaataagcttcttgtcacagtatacatggtgaattgatagtaaattttcaatcattatgataaacaccagagcagacgtcaactaacaagagtatgttaatacctgttcttgtatatcctgcatcagcttgtagtgttttgacattttcttgtacacctaagataagataaaagataaaaagatctaaattcaagaacaaaacatcatgaatttatccatagttacagctgtttacattgtagcttgccttctgaaataatgagtaaaaaaatgtccagaaaatcagtgcataaattattcaagtattgtagatatgacagaatgaacccacagtatgcatatcaaattcaatcagtcaatccatattggcatttgatcttccagtcaatattcaagggacgatttggcttgcataagcccaatccagcttcagcaccaactaattgacaactcagttgatacatgtgccataagactcactagctcaaggctttacaaaattcgaatttatgttgcaaactgcaattgcatcctaaagtaaatctcgatggaatgtttggttggaagaaaacaaaatagagtgaacgtaaatacaaataactacatattttcttttgtttgattagagagagaaagtgagaagaaaagaagttcaaaaaaaaattcaaaacttcaattccttccattttccttttaatttcaattcaaaatctccaatggaaaatttgtgtatatgtgtgatgatataagatcactttaccatgaccaaaaaggctaaaatgcagatgaaagggggataaaagaagagtctttgacaatgtaccttggaaaaaacttcaacaagggcagtcttctcatgaaaagcttgcattgctaatctttcagcattccttgcctcctcacgagctaatttcttttcctctaaagccctcttcaaggaaaatcagagataaaatttacataagaactggcagagtaaaatgagccaatgttttttccaaaactagtatcaggtcaagttgtggaactaacagaaggaagatagtccaataatctccaatataatattcacacaagcagattgtttggatagaaatgcaaagtatgccacatttttgtagctaaaaacataaacaaaaccaattaactttgattatgcctacaacataagagcaaataaacaacataaatgaattagggttgctagctacaagggagaaccacataaaagagggggaaaaatacctgtactttatcaggtgattgaccgatttttgaacgtagatttgcattttcttggacattttgtaccaatgtaaattcggcatttgaaatctgggatacgaaaaggaaaatagaatgaataagaattaacataattcatacatcaaggagtcaaattttcagaaggaacgggaattgatgttagttagtagacaaagaaaggaatctcaaaatccaaactaaaaacagtgctaacaacattcagaccacaatgtaatatgcacaagaataaagacctactcatcaaaaccaaagccatgtccagtgtctacacaaatgaggaaacactaatatccaacaaaatataattaatctggttaaaacataaatttccaattgtcacagcagaaaacgaacaccatgtcaatccattattggccaaagacaatcactgaccttctcatccgtttccccggtcttctccttcaacttcctcaaagtacttcttagagaactctggttgctgttcagcaccgcaatcatttgcttgagctctttaacttgggcctccacctcctcaacaagaggcatctccttctccttcgcctcattgcattccgaaatctccgctttcaactaaaaaaaaacactcagcaaaacacacgctcagttaaaacctcaacgagtttgaaattgagattgagatgagattccaatacaaacctgcaaaatcctattctcctccaactccgttcgctgcgcctctagagcgttcacttcctccacaatttccgagacggagttcattctcgcgtccctgagataaaaaaataaaaatgtttaggttttctctcagcgaggcaataattaatccaagaggttaaaagagagtgacctatcgaggcaaaaattgagaagagagccaaggaagagatcggttcggtgaggatccggcatgagaagatcggcgagggtgaatttgcgcggacactcgagtgttgtgagaacttcgttgatctggttgtagagtttcacggcgcgaacggaatccacgtggaaatcagggttttcaagatgctctagagcgtggaactcgagttgctcgttgtcttccctgcggaaaatgaaaagaataagaatctgagcgaggaatgtagaatcgaagaaggtgcgaaaagagaagaaaatagaaagagagagagagactcaaggagaatgtcgagatgaatgaggacgcgagtgtagagatcggagatgaaatcagggttagggttggtgaagtcctgctccgtcacgttcgcgatctgcaactgcgctaagattgtgactatttccggccgccggagccttgggtactcgtaattcgactccgccattttcttcttctccaaagcccaaacgcaacctctactcgagagaattcgggcttcgactcatacgagacgagactataagtacaacggcgaaattgattaaattgaaaacaaaattagtggccattttcccgcccagtactttcccacagaggctgattcaacaaattctcccaaaattacagggaaaatactaaaattggattattgtaaaatataggggaaattgtattaacctctttttatgctttttttaagaggtaaaataccactctttttattctttaaatgagataaattaacatcttgtatgatccataaaattaaatgttttttcaataaaaatgaatttatttcattttattgataataagaaatgtaatatatgttagaatgtagtcaaagatattaatattaatattaatataggatcttgttggattggcaagaaagttgatatcatgatttgaatcattttaatgttttgaataggttaattattttaatatatgttagatttcatggtttaaaattgtcctattatttctaataaaaatcttttgttttgttaaagaaaaaaagtaaataaaaatccaacacatacaatttttgataacataagaataatgtgtaagtcgttaatacttcatgcatactgattttattattatataataaattttcacgcttttttatatgaaataggctaatgggacaagttgagcttatataaaggcaaagtttagacctaaaaataagctgatgacaagtagcatattcaaactttggacataaaaatataaagtaggtaatatccaacttaagtagaccctaacttggctcaacccttgcctccttaccaaactaaccatatagtttgaaaaataagaaagcctatatttacaagctaaaataatggtgtcaatttcagtgctggatggaacgtcgtttgttgaaaagcatccatgatggtctcgcaatctaactcaatctcaatgccaatgactccaacgtctgatagctaactaattgtctccatgaaaccaatatccttcaccttttgagctgggagaactccatatattgcacagataaatttgaatattgggccataactcagtagccaaacaaacactgataagtaataactttagggcatccaaagaaaacatgtcaatcgttttcaacacttgattcgcaattaggacaaatattcgggcaagagacacccttcgcgaaggtagacaaccccaaagaattctccataaaatatgtttggttttaggaggaatattcaaacgccacaattgtatcgaattactaggcagtttcaaatttatccaattactaggcagtttcaaatttctggcatccatagttacctccatgttgttgtggtatgcggatttgacctgtaacatctagtttgactcaagttccaaataagcttgtcattttttagtataaaattaagttaaacaacattaatgtaatatcactaaatttaattaaggtaattcgggtgatatttgcgtaattaaacggatttacgaaagggcagtttggtctttgtcagaggtatgggtgtatttagtaattgctgaacgcaccccctgtttcttattaaaaggtagcagatacgtttctgcttaagggtttctcctcttttcttcttccttggttcttctcttctctcaagccctcttctcaccacttccatgagattagtggctgaaatcacaaaacaagcaaggaggaaagccattttctttgttctttgttgcttttgagcattgggtgttggtgattgaagagaagagtgggtttcaaatctgcccattttcgtttggcgccgctaaactgcgattgagagtcatagagtgctggtctaccctccaatttggtctactgaaccctaaggtttgaaatctcctcctatctctccttgattcttgaggttagggttagggtttggagtgagattgttgaatgctgcgttttaagagggtgagacagttttaaagtatgatttggagtgggtagaagttgtttttaagttgaaatggtgttccatgcataaatcatgcatgcttgttcatggcagccaagaacacctatttgggcagttctggtgttttgcccatagcaggagctatcggtgtccaaatggtgtaaaattggtgccatttgaaagctaagagagttagcttcactctggaattttcgtgctatttttggagtctcctagaaattgtggtgcagagttataacaggctgttatgctctatttttagcatatttttctgctgcagagaaccattttgcagaaagcataactttttctaggatgatccaaatcgagtgttttcagtggctatagaaagatgggtatgtgaaattcatgcctgtaaaatatcagctcatttggacaagtaacctggtgtgggttgtcctcgaaagatggctggttgagttggtctgttgctgtcagcactattttagtgtgtgacagttctggtttttggtttgctgcagaggctgtggttcatggtttttgatgaaaccagttttgtttaaaagataagagatatatcttgatgcctctaaattctcgtgattttaggagcctcccacaaggatttgtgatttttccaagtgggtgtaaaacctgcagaattttatgcagcagtttatgcttttccgcatgttttgctagagatttatgcgttgtacggatagaatggtatttgatatgtgattgtatgtcttttaggacgtgagtccgataccgttggtggtggtagccacgagaccggggaagccagcgttttgcgaagagcaggtaagctcttggaccttgttgtatgtcatttgctgtgttccgccataccctcagtggagggatggttctgatgtgactaattgtatgtatgcggaacatgagtgtgaatatgaatggaaccctttgatgagggattactatatatgtatgcattgaatgtgatctgaaccctttgttgagggatgattatatatatgttgaatgtgaatgaaaccctttgatgagggaatgtggtataatgcatatgtatgcttaagtatgtggactgaatcctttgatgaggggattatatgtatttattgtacatgtttgacaggtgagctgaaccctttgatgagggggataatatgtatggcctgtaatggttggatatgcttgagatgttgattgaaccctttgaagagggcatgttatgtaggaatgtgtattgaaccctttgatgaagggataactgcatggaatgtatgatgaaccctttgtaaaggggatgatatgtgatgatgttcccatatacacagaggcagcctccccaggcaaatgtattgtgttagaggatgagatggccctgtgatacatagaggtagcctcgtgataagagatgttcctatgtacatagaggtagcctcaccaaaaaggagatgtacctgatatatagatgaagcctcgagatagagatgtacctatatattcagaggaagcctccgctagggatatatgcaagagatgtgcctagtatgtagaggtagcctccctgtgaggagatgttcctacatactatgatgtagcctctgcatatcagttatggatgtgatgattggcgtatgccatcaatataacctgattgtagtcaggtagtggtgatgacctgattgtagtcaggtagtacttgatgacctgattgtggtcaggtaatgcttgagacacttggttgtggccaggtggatgataatttgatattgtgtttgcttgatgatatgattatgatgatgatttgtttgtattgaaaagtgaaccaggggaaggaaataccttcaagggccctgagtttactgagattttatatctcaccccgtgtgtggggcttatgttttgcaggagaaacatcaagcggaacagatagatcccagggcaagaagcctatgcagggatagctggatgtgtaaccataggctaaatgacctgagttgtggctcagatgttttgtacttgcctttggttttatatttgtacccctgagagggaggttgatgtacagttttgtataagacacagagactttatgtatattcatcatgctatatgtacaatgtatatgatgacggcatttgttgatgtcacttttatgttatgtatgcttccaaactgcttaactctgatgattatctagtaatgatagtaattaaggcgtggtaatgacctcggttgtagctggggcgttacaattaatattagaataaatttatgtgtggagtgtttaaatctatgtgacattataggattcatcaaattaaaataagcaaccctatttaaacaaatacgtacgtactttggatgcacttaaaaacttatcttaaatgagagaattttggtatttctctaatgagaaaagtgactacccgttttctcttctcatcagaaagaaagtatacaaattaattctctaggttttgatgtctcggccaagtcgttgatgcacctaaatccccttattgttgagttcaattcgttgcttgttcatagtttctttctttgattagttatcttcaaatacaaagacggattcagggaagtcctcgttatattttttctcctctagttcacatgtaaacacatgacttactatgaatttgtaactctatgttctgatatttaatttgttgtaagataaacagacaataattaattatatatatatatatgtgcgcgtgcacgcgcgtgcactttttgagtgcaagagtagtcttaaatcttaattatagctttggactactatatatgaaatttctaatattgattaatgattagattaattgcatgatacataaagttaagaagtataagttaagggaactaaccatgtatctgcctagctttgagattatcaacctagcaatactagtataacttttcgtttttatagactcacaagacatgaaatttataattttatgatgtacatgtaaacaaaccggctaaatatatacgttctcatgaatgcctaattttatttcaataagtgtttaaatatctatcacttctgtaaattaatttttgtgttggagtggtttatttagcattacaatttctttaaaataagtgacactactaatgctttatgatcacgagcaaagggaagattaaatcaatggagttggacttaacaccgaagacaattaacagaagcattgtttgagggagatggtggaggtttgatgtgttgcaaacacatcttaattctagcttaattttaggttatattttaattaaatagttagaaaatagttcaaaaattaatcatctttagtatttttaattatgtcaagcattttaatatcatttaagcattggcaggccaaagagaaggacttaagagcaaataataaagaaagcaaattctggagtatcacgcgtgtcgcgccattattcgcgcgagtcgcgtggaagacccaagaagatcacgtatgaagcgtcaagtccacgcatgtcgcgtcagaactctgaggattaatgaattcttctctgccaactcacgcgggtagcgccaattctcacgtatgtcgcgttggaacttcaatgtttaaaccttttcatctctgccatctcacgcgacaaacgcggtagccacgcgggtcgcgccaagactttaaggaataaggatttatcttctgccaattcacgctacaagcgccatttcttctgtcagcccacgcgactcgcgtggtatcgcgcgcgggtcgcgtggttgtgattttctttcctgtattaaaagatatatgtttcgaaattaggaaaaagggttgattcagttactgtaattaaattactctatatatatgggaggtttctgaataaaaagatatacttggacagagagagaggagaaaatagagctttagtcattgcaagccctaggaatcaagatttcaggccaaagttctgcacaattatgaattcatcttatgatttggtgttcttgaagtctatggctggctaatcatctcattgtggaaaggccatgaacttatgagttttcctctgtaaattgactggtattaaatgcatatgttgtgtttactttaattcttttctgggcttatattttatcttgtttagaattgatcactttgaatgagtattgggagttataattcgcaatggacacgttggtattataacatctgacttgttaagaataacacttgttcttcacctagacatagggatgcatgagtgcggagtttataatatgttatttgattgcttaaactgattaatttcactaagacattaggctataaattcagtttaaagggttaattcactaagaaattaggggttaactagtataggaaagacttattctccgagtaatcataacacaaacccataggatttattctctgaattcttagtttgacagaatcgctagaaggttagggttcttgatcagattaaaaggtgagattactagttatctagtatttacaactataggagagatttatcttatgtaaacttcaagttaaaataatcagtcaattgaaggaggtaatgcttataagagattttgtctgaccacaattaattctctttggtaatctttcaagtttaaatttactgttttgtttaaatttcctttttaatcaacacaatcattcaacaacttctgcgtacttttctgttttctgttttaatcacaattgttcgaattgctgaaacatcctttcaatccctgtggagacgatcactcacttacctactttattacttgttaaacgatcggtgcacttgccgtatacacattcgcataaatcacacaacaaggttactacacttggtcaagttctgaagtgccactcctggttaagaataatgttggtgcaggtcgccttgtgcttcagcctcgtggctttgtccttcctcattatgcagattcatccaaaattggttatgtcattcaaggtcagacccgcgcgtagatatcatcatatcttttctatttttaaattttaatttcccctcccatttctatgacaagttatacatacgagtttaatttaatattcacacacttatgagttatgacataccaaccagtggttggtttgaataaaattaggcttagaatttttaattaagattttattttcgaacatatatagacgaaaaatatgtaattaacaaaaaaaatctcattaaaaacagtcaattaaattacaaaaatatcattattgttgtgaattagtttaatttttttccttttttaattagtgacatccataatataatggtattatgtattgaatcgtacgtgtaataaacttaaatggctcgtggtgctagttttcttagaactttggtgatcatcactgtctcctattaaatttctcaattttatggcacacatgcatgcagggactgatggcgtagatgggattgggatggtactccccaacactaaggctttgtttgagagttaggaggggatgggaaggaaagagattcaaggggaaggaaagggaggaaaataaggaaaattcttttctccttgtttgggagttaaaaatatatcaagagaggaaaatagagagttaataaaaaaattttacaattttttccttatttaaaaaattaatatattatatattttacactaactggggtaggataataattttattaacactgactagtataataataattttagttatttttccttctaaaaacccccaaataggggggacaacaattttaaggttttggaggatctaggaggagttttgaaaatcctcaaatcctttccctcaaaaattaaaactcccaaacaagggaatgtctctacataaacctttcatttccctctctttccctccaaaatccctctcccaaacaaagtctaaagaagaggtggttttgaagcttaagaagggagatgttataccagtgcctattggagctgtctcgtggtggttcaacgatggagactctgatctcatgcatcattgcttttcttggagaaacttcaaaggctcttgttcctgtccaattcacctatttctttctaactggggctctaggacttataggaggcttctccaatgagctcacaagcaaagtatatggtttggacaatgaggtggaaaagctcataaagccaaacttggggttttgatcatcaaacctagacaaaagtcaacccatgccttaagccacaaatgaacatcaccaaaaagctactctataatatagatgctgcacgcccagaaaatgttgtggaaaatgctggattagtcaaaaccttaacggagaaagattttccttttatcggggatgttgggttaagtgtgattagagtgaaacttcaaccggtagcaccctcatacccaaccaaccttacggttcagttgatttacattgccagaggagaggtggtaagattgaaattgtggactttagtggaaagagtgtattaaacactctagttgaggctggtcatttgcttgtcgtgccacaattctttgatgttgctgaaattgcgggtgaagaaggaattgagagttactccatcgtaataactataaagtatgacttaatttatacaaaatatattcatttaatccaagaagtagcacatgttggcatgcaatgacattaaaaatgattgattatattactttaaagtatgacacagtataattaagtgttaacaaaattaacaaaaaaaaaatgattgattatcttatttacaggccattgtttgaagaattggctggaaggggatcaatttggaacgccttttcgcctacactgcaacaagtgtctcttaacgtggattctgattttcaaaagtttttcatatccaagatcaaggaatctaccaatctcatccctcctactgcttagttcgatgcatgtgatgtacgtactaccgtatttgtttatgcataattttcagatgatgatattgatgtaagataattctgatcgaacttatctttctaaaaattatgtcgttgtattgcttttattttaaagaaaaatatttttgtgataatacttatttaagtgttctatattgagcaataaatgcatggaaggatatgaatgcgtagacccaataactaattacaatcacaatttctttgattgaaacaacaacttttaattatcaggatgaaatgttgaagcttgtggccactcatgaacttttttttctttcttttcttttcttcttctttttatttattaaattacatgtaatttttataggagataatattttattcagtatgtcatacctaggcttgcgtgtacactgttttgttgtgaggaaaaaagtaattaagagaatgaaagggaatatataggtgagaaaagaaaaataaagtaaaaaataagtttgattaaaaataaaatagagtgaaaattcatttttaaattaattgattttaaaaaaacattatcatttatttatttttattgttaatattttactattataactatacaagaggaaggaaaagcctaacttaatcgaatatggtggaaacttaaacggtgtttcttctcagtcctcttatatatattgcaatttcagatttatttgtgctattttttttaattgggttcacatattcttaaaaaaaattgccctatacactaccactcttgtaagttccaaacaaccaacgtttccttatttttactctcttccttcctccccctctctatttccatgcgacctaacacaacctaaatccccctatgcttccctcaagcttgttgctttcgacttcccattgttcaatattcaccatatctccaacagagaaatgcatgttacacgaaaacctaataaccttgctactacagaaattatttcccaattaattagacaatgatgctggttaattatattaattgatggtgacgaaacccttacctcgcaacaacggctatgtgtaggggtggcaaaaacaaaccgaacttcactgaactataattaactgaaccaaaataaacaaaaaaaaaaaaaattgaactgtttaaataaaaattgaactgaaccatcttttaaaaacttaactgctaaaaaaaggcaattcagtgcactcacaaactgatattcatcagtgttggaaaaataaatcccgctcctctccaacatacaatattctctcctataccctctcattatgttgagtacatgtgtgagttaaagtctcacatcggatagaaatcgaaaaaaagtttaacaccatataagtgaggagaaaatccataaacctgagccttaagattttgggttaagatgtggtgtccaatcccattatatggttactcgatgtaaatctccatacattcattaaaaaatgtgctttgctttcacgtttggcctctataagcaattttcaaatatgttgatcataaatattcaaaaacctataattttaaaaatgctaaaacttatctttaatattttgttcatagcaatttgaaaaatcacaatcatataaaaaatcattacttatttattcaaacacaaatcaatgtaaaaatgagaaggcaaactaaaacaatgtggtattttttaaattaaaagcaaaaaaaaagtattttctacaaaaaaaaaggccccttaaaaatagtttggtgcagttcttaatagcttaatttgaatcggttcaatccaatttaatacacctgcctttaaaatagtttgattcaatttcggttgactgttcaatttgattcaaataaattaagagaccaactataacatactttcgttgtgtaaaaaaccgaaaaataaaaaataaaaaacttaccagtatgacaaagagatgagaggagatttggtaaataagactatatatccaaatgtgattcctcttttcttaatgaatttacaaataaaaaatggtatgcccattatattatttaatacctatagagatggataaaaaaaaacagaaaagtatgagtcttattttttaacatctataaatttcaaacattgatatttttattttctctatatttctttctatcaaattattatcacttattatatatatacttttctctctcctcgctctttctctctcaagtgtgtactagcattagcaaaatgtcaaaaaaatctttttattttttattttttaaacataggtacgatagaaaaagaaaaagagataaaaaagaatgagagacctcgaagaggcgtttctgtattattactcacatagtcacatttcatttttgtccacgtgaaagcaaagcacactatagagaaaaacaaaaccacaacatagaaaacgatccctcgtcgacataactcacaacagtccaataacagttttaatttttgaaattttgtaccgtcaaaatatgataccattgttttgttattctttatttaaacaaattttcaaaataaaataatgtatttttatatttttttttataaaatgtatttttgaaacaagtatatcctaaagactcaaattaaggcttccaacctatttacacaataattttatttgaagttctcgtattttttttaataaatgtttttcagcatttttaataaatgataaacacaaaattataataatttttataccttatatagttatatatatacatcttatatatttattctattgacttaaagtatttttattatttaataaagagtattaaatataaaaatgctattctataaatataaaatatttgttctaaatcttgtttttttatataaatatttgaaaagaagtttatccactcaaaaatctaatacaagaattcttcttatatcaataacttttcaaaatattatttcaaatcataaacaaaaacacaaatttactttaaaaaaaatatcacatattataattataactccacttgacaaatttaaattcttacataattaaaagaacatccaaaacaatgtgccgagttaaaacataattattttttttgtaatattcattttatatggaaattgttacataaataatctataataatattttaatcaatatatgtttattcaatagatacattattaataatgagatagtaagaaaatatattcttatctcatcaaaataaaacttacataacatacaatttaaataaatttaaaaatattatgtggatttaatttacaaatatcacaattccgatgatgactgattccatccattctagcttcgacgcgtagcagtcgctctcaatcattttacaattgttttgatgagtaagcaacacaagatcgatcaagctagccccatgagctctccacttaatttggcttttaccaatctgttgaatgattttgacttttgagtaggttgattatttgcgtacgtgttgttttaaaaggttaactctaaattgtttctgtatgcgtaaggtggcaataaaagtcagcacgaggcatgtcccacattccgttggtggtgtttcattggtatacgttttctcttattggacagaaagtatatgaagtttcaaaaataattgtaatgagccaatatctatatatagccctcaataggtcttcatgtcttggccaaatcgttgatgctactaaatcctcttaattcgctgctttttcttagtttctttctttcgactagttatcataaaaaagatagacaggttgaggaaagtcttggttatatatgtctttcgcctctaaatcacaggtacatacaatacaagacttattatgaatatggtttttcggatctttgatttgttgtaagataaaggaatatatgagtgcgtgactttcccttataactttttgaatacgtacactagatatatgaatttctaattttaagatatgcatgcttgatgctcaaagttaaaaaacatgttaaatttaagttctacaatatcaaaaagtataattagccttttagtgttttgttggtttaatttgttgccttcatgactcctctaatttgattcctcaatacgtctagcatgtgatttttggttatataatttagcacaactacttttaacaacaatgcattcatttatctgaaatatttttcatgaacaaaaggaaaatcaaatcaatggagttggatttaatgccaaagacagcacaaccagtgtttgagggagatggtggaggttactacacttggtcgagttctcaaatgcccattctggctaagatgaatgtgggtgctggtcgccttgtgcttcagcctcgtgcctttgcccttcctcattatgcagattcatcaaaaataggttatgtcattcaaggtcagagcccgtctatatctttactatattttttcccctatatatggcctatactatacgtaactaagttataagaaattgatcaaactaagaagttatattaaaaatatatcactacaaatagggtaattaaacaatggatcaaagtcacacagtgaccaattaactgcatcatatacttttttaagactacattaatgccaaatagtattctctgtcgctctctttgtgaattagtgagacgcaatggtaattgattgcgtattcaatcgtgtaataaacttcaatgattcacggtgttaattaattttcatagaactttgatgaaaaatgactcaattgcaaattaatttctttaattttatggcacacgtgcagggagcgatggcatagttgggatggtacttcccaacactaaagaagaggtggttttgaagcttaagcaaggagatgttataccagtgcctattggagctgtctcgtggtggttcaacgatggagactctgatcttataattgctttttcttggggaaacttcaaaggctcttgttcctggccaattcacctatttctttctaactggggctataggacttataggaggtttctctaatgacctcacaagtaaattatataacttggacaaagatgaggttgaaaagctcacaaaaagtcaaactggggttatgatcatcaagctagacaaaagtcaaccaatgcctaagccacaaatgaacatgaccaagaagctagtctataatatagacgctgcacgtgcacaaaatgttgtggaaaatgctggattagtcaaaaccttaacggagaaagattttccttttattggggatgttggtttaagtgtgattagagtgaaacttgaacctggtgctattaagacaccatcataccctaccaacactgcagttcagttaatttacattgctagaggaagtggcaagattgaaattgtgggcttgaatggaaaacgtgtattagacactcaagttattaaggctggtgatttacttgttgtgccacaattttttgtggttacccaaattgcaggagatgaaggaatggaaagttactccattgtcacaactactaagtaagctgttgggattttatataaaataatttttatagcatgcaataacattaaaaatggttgattatatattatttgagagtatgtcccagtatgattaattagtactactaacaaaaatgtttgattatattatttgtaggcctttgtttgaagagttggctggaaaggcatcaatttggggtgtgttgtcatctactgttcaacaagtggctcttaacgtggattcagaatttcaagagttgttcgtatccaagatcaagaaatcctctaatctcatcccacccacgtcctacaagttagtctgacacatgagatgatgcatgcgtgtgaatgtatttgttttgtaaaattcagatgatgttatacatatgagaaaatactaaatttatctttctacgtgaaaatccttagtttgatgttgattcaagagacagggatggagaagaagtcgatgtgtatgtcattgtattgcttttgttttcaatttaaaggatatactttggtagcagtaaaattctttatatatgttctgttatgaacgaagagtattcatgaagtgattataattaaaatgtttacatgtatggtcttacattgcatagtggattatattgtagaattgattttgagttaaatatttttagataatttttatgttaaagataaaaatttatattgaatttttcaataataaattaaaagtattcatgcacttcatcttttgaagaatttattgagaaagtttatataaaagtaaaaggcataaattttatttcaaatcacttcatttcaaaatcagtctagacttctcacacaaattaaaatgaattcatccacttcatcttttgaagaatttattgagaaagtttatataaaagtaaaaggcataaattttattttaatttatagagaaatttaatttatttttttcttttcttatacgtttcatnnnnnnnnnngagcaacacaaactttcctgttaataataaacagaaaattaagaaatgataaaactcaaatgttgctcaaccacaacttgaagggtttattttttctaaatcatgtgtatcttctattgaagctaatcttatttgaattggataagaatcattatgaactataaaatttttcctttaaatatttaacacatttaagtattcatgattcgaatttaaattttttgattaaattgaaataatttaaggttaattgacccactacatattgctaattaatacttgaagttgaattgatagaatcaatatatcaacaaaggttatttttttagataagaaataaactcatatttctaatggacatgagnnnnnnnnnntaacttctctatatataagcttaattaactattttaggaaccttagctttttagaaaaatcaaatgaaaataatttttataaaaagtaaatagtacataattaatttaaacttatataaattacaattcattctattttatatttttttctcttataattatttatggaaaaatttattcatataaaacttaatttcttataaataatttcatctaaacaatatacataacttatatgtttcaatgtaacaaaatttaaggttcaaaactcatatttgataaggacatgcggaaagtgcttcttagaatagacataacatatatgtttctcatttccttttattataataaaaaatttaaatatttataattaacttgattaaaacatattactactaaaaaaatttgtattctactacggtgaaataatgacagttttccaagaaccatctgaaattcgattacaacttcaatgatgacaaatttacaaaaattatcttaaaaagttgcgttccacaaacattttttgtaaaatcgtcctggtttcatttctcttctagcaaaaatcgaaaatgctcgccactcactcattcagtcactcaaactcacaccagtgtatagagattaaagagagaaccctaaaattccgccacccgcgatggacatgcatcgatgacgacgaagacctcgacctcggcgacgttgatctcaacccgaccaacggactcatgctcaaccgcataagcaagttttgatttcatttcaacttcatccttcatcttcttcccctgtcaatctagccactctctttgaatttgacggttgtgccgcgtaatctcatcagtttctcacttgctcgctcagtgactcgctcactcttctttagatctgatcgaagaaataaatagaggaagcgctggaactatcacgcatgaaggacacgaaggagaggatggcaggtgtggagtgcctccaccaatttctagaagcttctagaaagagcccatcctcttctgaggtcacctcgctcatcgatatatgtatggatctcctcaaggacaacaacttttgcgtcttccagggtgcgctccaggccctctcctctgccatcgttctcgccggcgaacacttcaagctccacttcaacgccctcctccttgccgtgggagtagcaaagggtgttgaagtgtcgacaatgcacacagtttgtctctcaaacttagaattttgaaatataattaccttaagagtgtgtttggatggagaattttaattggggaaagtaatttattaggggatttaaaattcttcaacttaaaattccctgtttggatattttgatatgaggaatttaaatttttagaattttaaaagagaattttaaacaactaaaaatgtgaaatttgaatttctttataaaaggtgagaaattgaaattctcttattttttagaagctctaaatgcacaattttttgctccgtctcaatcatcgacgtactccgacctccgctgctttcaagacactatccaccttacgtatttttctgtgaatgaggtttaaaattttaaaataaagaaatttaatttctttatccaaacacaaaattttgaaaataaaaaaattttaattgatgcatcttaatttccctgaattttaaatttcctaaaattttaaaatacttcatccaaacatactcttaatgattttgtgaatatatctgagatatggtcttcaaagtttgacagtattccaactcctaattatccatgattacttgatgtctcaagaaatgacatcgggtctctaatatatttactcctccgattgaatagttggatgctttgccaaattaattgcttatttgttgtctatccgtagcttcataggtcttattgtttccaaattcatctctcccaacaaagtttcaagcttggcattaagacaatgccaccatatactactttttgaaacactaagaaatgtattatgcatccattgcatttgcagcacatgaaaacacaacaagttgtattcttttgatcattcttatctccacaccaaccaaagtccatacatccaatctttacacttctacactgcatctcatttgaaaatagcaacccgaaatcaatcgcccctttaatgtacctcagtatccgtttgtttgttgcatagtgagatgttcttggcttctccttaaatctacttatgaagccaactccatgccagagaatgatcacactgcattcatcacatcaacttcttttttatacatttttcatcacgagtcccacatcaaccaactaatggagttggttattgataactggtaaccactattaaaagtaagatcttgttaacctgtgacataaaaaagccttaaagacgttgtgactttgtgaacacaaagtcaaggaaacagaggcttgcattaattgcaactattccaattcaataaaatgcatgttgcttctcatacaaagacaatcctccaccatcaatagaagcaaaccagagttaacactgactaaataaaattaaacacacatacatgcacgatccaccttaagaattctaacttcaatgttacattggcattttattacacaccactgcaaatttctttttcactggagacaattttgttccagtaagataggattataccttcgagtatttaacacatctgcataaccaagacttaaaatcgagacctttgattaagttggaccaaccccacgccaattgatccacgtgctcggtggtacaccactgcgaatttcattcattcattggttgattcatcccattgatcctctcaattacagagataatcccttgcccgccaagcttcccctgcctattagccaccatactagaaaacaactgtttacacaacgaagcccctggcaagacaacaacatcagcatcatctcctccttccacaacatcaacccccatccccaaatccttaacctgatactccgcaaaaccccctggtcgaaaatccctctcaatcatcctctccccgaacaattcaagtgccttcgaacccgcagcaccgtcttttatggcttccacgaactccttcaggtccagccccgcacgcttcgcgaacaccagcccctcgctcagcccgatcaagttcgcgccaatcgtgatctggttcgcgatcttgcagctctgcccgcaccctgcggggcccatgtaagtggctctcccgaggatcgagaacagagggttcagccattcgactacggctttttctccggcggcgaggatggcgagcttaccgtcgcgcgcgccgatgtcgccgccggagacgggggcgtcgacggaccaggcccctagggagcgtgctgcggagaagatctggcgggcgaggtcggggtgggagctggtggtgtcgacggcgacggagttggggcggagggaggggaggacgggggagtcgaggaggagggagcgtacgtcggaggggtggcccaccatggtgaagaggacgtcggagaattgggccagttgggccggggattgggccagggtggcgccttgggattggagagagagggcgttggggtgggcagggttgcgggcgtagaaagagagggtgtagccagcagaaaggaggcgagaggccatggcgaagcccattacgccgataccgatccacccgattcgggtttcggagggtgagatcggagttgggtacggcgttcccatggtaatgttgatgcccgagacagagagtggactcagtggagtcacgagtgaacactgtgactcactcactcagtgaattattagtttcctttttttattccatgcctgtttctatttttatgtttttttctaggtgaaagaatccgctttttgagctagaggataataattactaactttatcctccaattttttttcttctaaatcctcccttcaataaagagaaaaaagatattaattaatttagagttgatcaattaaaaagtaaaatatgattaagattgaatttgatattttatatgaatgattcaaacttatttttaatatattaatcatttatgtttaattagttaatttattagtctctttcacatgcagttgtagtaatttttaaaataattaaatgttttattatttttgtctcttagttaatatattttagtaaaattttgggattgattttaaaaaatttaatatcggaaggattacttaacataatttttaatacttttaaaattgttttttttaattttaagaataattaatgagaagagagagagaaaaaaaacctgttaagcataatagaccagccttgttaatagtttcttcttcttcttattattattattattatttacttcctacacaaataatgctcatgttgaaatcagaagcgcactagttccgcatacttacatatataggtccactaacttatttgggctaataggtctgttgtattgtttgtaaggggttaacttcctacacccaacaaagttctaatacacccaacatttttgtgaaaaaggcaatattacccttgcttaaaataataaaaaccaaagcttttcaaatttctaatacacccgtcatttgcttttcgtttctgcttccaatctcctcgtgctctcctgctttgtggcgactttggtgctctgcggttgtcgttctggtatcttgggctgtggacggaggttttgtggtggtcggtggtcggcgacgaaggtgacattgttttccagcgatacgaggtaagtggcgctttgcattgtcgtttcgtctttggtttaggatgcttatggattggtaatctgtatcctgtgcattggacggattatggatccgtatgaaggattggaatccgtatcaagcttctggattgacaatccgtaaggatcatatggattgcaaatccgtaaggctcatacggattgccacctacgacgagttttcctcgcaacttaaaaggacaaccgcattttctactgctagtggtcatgcgaactaaatctttgttgaatgctctatagttttcactcctttcacaacctatcaaaataaatgaggtccttcccctcttgccagttgctgtgtcatacctcattatcacagctacaaaatcaatctcagatgcaagactacgagcccattgcaatacctcgtcacgagaattaaacacctacaacttttcagaatacatgctcaatctcatgaaattaattatttactgacattcaatatgctactttatcacataaatacatttgaagtcttaaatgcattagaacaatcaatcatagagttgttattctaaaatgcaaacggttcacctctgttgtcttcacccatattattttcttccgccataatatcatcatgcatccaatcatcgttgtccatcttaataaacaaacaaattcaaaacaaataatcactaacaaaaagtatctttatattcatttcacaactttgtcattaattcaaaacaaaattccgtcataattcaaaatttaactgttattttaattgaaaaaggaaaaatacattaattattaatacctttaacaaaaacaacacaaatatttaaaaaaaaaaacaaaaatcaaaacaaacagaaaaaaaatccatacggattggcaatccgtataacccatacggattgctaatctgtataactcgtacagattgccaatccgaatgtgcgtccccagaaacagtacaacttacctctgacgactccgacgacgacgatcccggccaacgaaacctccacgactgctaacaacgacctcaacccaacaacccacaacaatcgaagctagaaccaagaagccagaaccaacaaacacatcagacggaagaagaagaagagaaggaagaagattcggcagctggtgtatgtgaaaataatgaatgacaagggaaagtaaagcaaaatgtacaagggtaatattgcctttttcacaaaagtgttgggtgtattagaacttggctgggtgtaggaagttaacccctttttgtaaaccttatataaaattggtctttgttgaaagggaaaaaaaaataaaaaaataaacataaggcttctatattatgacttgggtaaaaatatgtttttgaactttcggtcaaattgattttagcatgtgtagttttaaatccatcaattttgtttctaacttaaaaaaaataagtgaatttaatctttatttgattcttcggtggtcagcacgtgagaactaaatcctattttttaaaatataagaaacatattggtcgattacaactaaaaaactaaaattaagtttaatcaaaagtagaaagagaaaatttattttatgcttaagctatttaaatagattatgataaacataaaataagaggcctataacaggtgcataagtttaaagaatgagagttaagtccatcttggaccttgcaaaacctaacctaccattgttttccttacacccttattaaaatctttcttttatttttatttttaattgtgaaaagaaatattgataataagtaaaatatttagaataagaaaccttatttgtttgagaacaaaccgacctaaaaggaaggcctcctagggaaacttaatnnnnnnnnnnnnnnnnnnnnnnnnnnnnnnnnnnnnnnnnnnnnnnnnnnnnnnnnnnnnnnnnnnnnnnnnnnnnnnnnnnnnnnnnnnnnnnnnnnnnnnnnnnnnnnnnnnnnnnnnnnnnnnnnnnnnnnnnnnnnnnnnnnnnnnnnnnnnnnnnnnnnnnnnnnnnnnnnnnnnnnnnnnnnnnnnnnnnnnnnnnnnnnnnnnnnnnnnnnnnnnnnnnnnnnnnnnnnnnnnnnnnnnnnnnnnnnnnnnnnnnnnnnnnnnnnnnnnnnnnnnnnnnnnnnnnnnnnnnnnnnnnnnnnnnnnnnnnnnnnnnnnnnnnnnnnnnnnnnnnnnnnnnnnnnnnnnnnnnnnnnnnnnnnnnnnnnnnnnnnnnnnnnnnnnnnnnnnnnnnnnnnnnnnnnnnnnnnnnnnnnnnnnnnnnnnnnnnnnnnnnnnnnnnnnnnnnnnnnnnnnnnnnnnnnnnnnnnnnnnnnnnnnnnnnnnnnnnnnnnnnnnnnnnnnnnnnnnnnnnnnnnnnnnnnnnnnnnnnnnnnnnnnnnnnnnnnnnnnnnnnnnnnnnnnnnnnnnnnnnnnnnnnnnnnnnnnnnnnnnnnnnnnnnnnnnnnnnnnnnnnnnnnnnnnnnnnnnnnnnnnnnnnnnnnnnnnnnnnnnnnnnnnnnnnnnnnnnnnnnnnnnnnnnnnnnnnnnnnnnnnnnnnnaaagtgttaaatcaagttatagggggggtcaatatgcaatctcacttgataattaaaagaatgttaaaaagagagtgatgcaatctcacctgataattaaaagaatgttaaaagcgagtgtgaaattgcatatcattgacgactttcttcataattagtaacaaaaatcatgtttaatcctattcccatcccccttgaatgataaactagaatctatgttatatatatagacgataaggtttatggaaaattcacattatatatctattaacaatttttatatatagtttatgattttttttatgggagaatatattccnnnnnnnnnnnntcaacaaaggttatttttttagataagaaataaactcatatttctaatggacatgagttgaaacatattctttctggtgaattattgggacttaaatcaactaaattttgataaggaaaaaaattgatagaatcagatgaaaggtaatgaattgaaaaacaaaagtatgagcataaatatggaacaagaagaatcagatacaaaaagcatagatgcattttttttaagccgaacaagaaccatcaccgactattgacttccataattttatgagataaatggaactcgtaattttatggcatggaatgcaatttataagcaatattattctatttaccacataataactttagagtttattggtaaaaaatgaaattcaagaatttaacggtcatacacatttaatataaaataattttatattattattcaattcaatcataaattatcataaaaaatcatcattctcatcatacattattaagtttattgtgattaaataatgatgtaaaatattttactctaataatgcataacttattttttcataaatttactctaaattcatctataattcacgagatataaaacaaataataacttatacaatagtttatattttatgtttatctctcttctagtctatcatttattatatttcgaactcaaatttctctctttttctccatcttaattgtacgttttgttattctacaatttgttatccaagtatgagttttcataatccactagttatagatatatttcacgaatcttttaccgaatattgactttaatcaatacttatcattttaagctggtcctatgctctatcctgagatggtgcattactcacattatgtttcttgcccaatccataacacgtatataacaataaacgccgttgtttacgaaaatattttattacacgaaacaattgaatctaaatctatcttcatgtgccctagcgatatataaggtctatatatgacaaaccatatctacttcatttaggaagaatacaacaacaggatgatgctaaatctgatttgggtttatttgggtgtaagttttttttagtaaagaaaaaaaatgaaataaattaaaatgaatttttcattagctgatttgtaaatgttatcgatgaatttttaaaaattaactaatgaaaaacttattttttcttataaaaaaattatttttattgtttttagaagtgcttttagagaaacttatccaaataagtctttaacagtaatatactaatagttttctaattttctcaaaagatattaaaaaaaattggttttttcaaaattgaactaaaactataaacacgtatcaaatactattattttaaaaaaacacgtatcaaatatcaataatctcaaaatgtcagttgagctgagaatctttggcccgagggacaatttcttttcgaaaaagaagtataaattatacattggaggttgaccttgaatctgttagcaccaaatatctctacttttaaataaagttatacactagttagaattaatttggctcctttgcgcatatatatgtgcggggaggaaaaggaaaagaattaggatggtttgtttatttatttattggtaaaataaagaaaattatttttttagtaagagtaatttttaaaaattattttatgcgtatatttttcagtttatgaattaaaataccaaaacatctttaaattttttgttttctaatttcnnnnnnnnnnnnnnnnnnnnnnnnnnnnnnnnnnnnnnnnnnnnnnnnnnnnnnnnnnnnnnnnnnnnnnnnnnnnnnnaaaagtttgattttaattaaaagagaaaaatactcgtgttgctttgcattcaataaagaaagaatattacttttttttactgtattattactttattattatctatttataaattaagtatctattggaaatattaattatacttttaaattacttaattatcaattttttaaggaatagttataaattttatatgactttgttaataaaaatacatttttacttatttgtcacatttatagaaaatatcattacgtgaatttaatatgaatattaaaaatcaannnnnnnnnnnnnnnnnnnnnnnnnnnnnnnnnnnnnnnnnnnnnnnnnnnnnnnnnnnnnnnnnnnnnnnnnnnnnnnnnnnnnnnnnnnnnnnnnnnnnnnnnnnnnnnnnnnnnnnnnnnnnnnnnnnnnnnnnnnnnnnnnnnnnnnnnnnnnnnnnnnnnnnnnnnnnnnnnnnnnnnnnnnnnnnnnnnnnnnnnnnnnnnnnnnnnnnnnnnnnnnnnnnnnnnnnnnnnnnnnnnnnnnnnnnnnnnnnnnnnnnnnnnnnnnnnnnnnnnnnnnnnnnnnnnnnnnnnnnnnnnnnnnnnnnnnnnnnnnnnnnnnnnnnnnnnnnnnnnnnnnnnnnnnnnnnnnnnnnnnnnnnnnnnnnnnnnnnnnnnnnnnnnnnnnnnnnnnnnnnnnnnnnnnnnnnnnnnnnnnnnnnnnnnnnnnnnnnnnnnnnnnnnnnnnnnnnnnnnnnnnnnnnnnnnnnnnnnnnnnnnnnnnnnnnnnnnnnnnnnnnnnnnnnnnnnnnnnnnnnnnnnnnnnnnnnnnnnnnnnnnnnnnnnnnnnnnnnnnnnnnnnnnnnnnnnnnnnnnnnnnnnnnnnnnnnnnnnnnnnnnnnnnnnnnnnnnnnnnnnnnnnnnnnnnnnnnnnnnnnnnnnnnnnnnnnnnnnnnnnnnnnnnnnnnnnnnnnnnnnnnnnnnnnnnnnnnnnnnnnnnnnnnnnnnnnnnnnnnnnnnnnnnnnnnnnnnnnnnnnnnnnnnnnnnnnnnnnnnnnnnnnnnnnnnnnnnnnnnnnnnnnnnnnnnnnnnnnnnnnnnnnnnnnnnnnnnnnnnnnnnnnnnnnnnnnnnnnnnnnnnnnnnnnnnnnnnnnnnnnnnnnnnnnnnnnnnnnnnnnnnnnnnnnnnnnnnnnnnnnnnnnnnnnnnnnnnnnnnnnnnnnnnnnnnnnnnnnnnnnnnnnnnnnnnnnnnnnnnnnnnnnnnnnnnnnnnnntctattaacaatttttatatatagtttatgattttttttatgggagaatatattccctaactagagaggacatacttcagacttcagagtaacttattttagtcttttattatcaatagaaacggcatgttaattacatatctgccttttaaaatttgaatttagttttttttattacatttgaatattatagttttaaccttaattttttcaaatatttgtaaattagttatgcatatacgtcatttatctttttaatattaatattcttttaaattctttttcaattttctctaatttataaatatccttacaaagcataaaatacctgctgattaaaacaagacacaaatatcttatttttcattaagaccatagtttattattattttttccattgaatgcaaaaatttaattgttttaaagtaaactatatgaaatcaatataaattaatgacctgcagccccgcacactctttggtttgaaattattaattagtgaattaataaaaaatactacctttgtcccaaaataaatgtctaggaaaaaaactttatttcaaaataaatattggatttgacttttcaatctaatattaattattcttttttattaatatatttaataaatgttattttgatatttaaatataatattaataaatgttatatttaataattttatttttgtccatgtaaaataacctactacaatacttattttgggatggagagaataatttttatcactttataatttttaattaacgaatatttcaaacttttttatctatgcatctgctattaaagttatatatataaattgtggaggaataagatgacacatacacacacgttatgatattgttaatcagtgatgaattaattaagatatttttgttaactttgcatccgatcaaagttgtctattgaggaagaataggatgctatctatgtgggcggtgattttattatgcgttgataaagaaagacgtttatatatgcttgctatagctaactttctgaatcagcaagcaataaattaattatatcataaagttgtcacaaggcgattcagacatgattagcctctttttgtttttcttaaatcttggttccaacgtgacttgaagtttggggcactaactaaaatattctatataaaaatgcaatgttaattatttgttccagatgtttggcaggctttggtaacagctccacttacctctcgctctgggcaagaatctctctccatgcacttattcttcatgatcatgtgcaattttctattgttgtctcttatatactaaagtttcctgtgataattagttcaaatttgcattcatgttgactcacatgtcgatatttaagtttgacagaataagacattttcatatttcgttatgttgatgtaagttctttctttttacactatgttatcaagtggtggattgacattgatatatcattaagaaaatgtgaatttctgtaaattaaaggaaaattctctcaataagttgagaaaggtaatctaaaattcattacattgattccgtgataattgagaaaggaagaccggcattggatgccaaatgccaataatacagtgtgagcacnnnnnnnnnnnnnnnnnnnnnnnnnnnnnnnnnnnnnnnnnnnnnnnnnnnnngggaccaaaattccagaaagttcgtactctgtcataatacgttttgaaaaccagttaatcgtaaaaaagaaattttcaagcggaaggaagtttatcattcaaattttcaaacaattaaaccaatagtttgactactacgtaacatatagaacattataaataaataaaatttcatcattgttatacatattttcttgtttaatttgatttgaaaaattgttaaattttaagtgatattttattttgttataacgctccaaaaatatatatagtaataannnnnnnnnnnnnnnnnnnnnnnnnnnnnnnnnnnnnnnnnnnnnnnnnnnnnnnnnnnnnnnnnnnnnnnnaaaatttataataatgcctaattaattatcaacttacaaatgtatgtttttccttaaattttagataatcttaagcaatataaccatgaatcagcattagccaaaaaaaagaagaagtcgatatttaaatttctgtttgactcaattcaagttattcaacataaaatttattttcacacggaactacttgagttttaaaagttatctttaaacaataattaaaccattttttaaagcttgatgaattgatttataaatgattgacttcatatggcagttttaagattactattactcactaacggataacttatccaaggaacacatatatctagtattttctttcttaaacaactctaaactttagattaacaatatattttttgtgtattgaaaggaaactcctctgcaagagggtgtgttattcaacgcccaatactggagtgggccttttccttttcgtgatagatactgttagtactactttgcatcatgcacggacagctgtgtgatgtattgacaattttatttcttctcgtgttgtaattagatgacctacacataatattatataattaaaatttggcttttctaaaatcaatcatttttttaagtaatatcagtaattaatattgctatatatgtatatataataatcatggatatattaaaatatcaatattaatagacatcttgtatgtatcaacgacaattttttttctcagtgcatgtaaattattaaagttatcattttttttcaataaccgaaattacttagattatatgtttgtttcgagatataaaaactatttttgaaagtaaaatcaagaatatcacattttaatgtttagtgtatatatatataaataaacattataaaatattgttgattctagcaatataaattattaatatttttattttttaatcctcttaataaaagatgcttacatttccataataatgaaagttttttttttaattataataactacttatctcaattttgtgtgtgtttagatgatatcaataaaattaattttaaagtaatataatttatgtttggatgttttattataaaatcaagttatgagtaaaatttattataaaatttagatttaatatataaactatttaaaattatttcaactcataattaattttgaatttttctttaacataaaattaaatatataaaaatatatctaaaataaatccttaacccaaaatcaattcctccacatgaaccaaacatgcatgaaaaaaattaattctctaacgttcattttttcacaaatctttttctattttcaattttcttattaaataaaaaattaattgtttctgaaattaataaatttcaatccaacatactcgtatgaataatatttctagatacaatttcctaaaaacataattcctcaaaatccaatattactatacgttgaaacaaagccacagaattcatggttgatcacttgtcacattctttgtatttgtttttcttttttttccttttatacataagattccgacacagtaaggagctgccacgtacgtgtccagattccaaacttgaaacgatgcccacgcaatagcttttcaggtgagttaaaagtggcatctttcttctttgcatggcaagccaaggacaaccacaccccactacttagtacttatgttttcgttagttattattattaataaagcagaaaaagaaaagtcatatataagagctaagttaattcgtttgatttttcaagtttactgttatcacaaacacacacgcataagtctatagagagagagagagagaggtgacgtgtcattattggagcatagtatatatagtagctggaggtataatctgttgcaactattctatagaataataaattatttttggtggtggggcagttgtcggctaaggcagttggacaaggattcgtgagctttgtctcagactgttttagaatgaaaagcgcttagcttaagttttttttgctggtttttgattattgggtggggggttacatcttcctcttcttgctttcagcttcttttgcttcacatcacaggatattgttcgttggcacttcaatatatctagtctaaggttagtttagtgattcttatcttgatttttttgttgtgttggaatctaggaatttgttgtgtgttgtggattagtcacataaacggcagattctgctgttgtattggatgcccttttattgaattgacccagatagtatttctggaagaatatcggtgtagttacttgtttttatgcagatagtggaatgcaaatggggtattcattcgttcttcatagtagggaatttattcatagtacgcaaatggagtatgtgcttttttctttttttgctgagttacgatatgatgtcaattataggctcatttgacaaggaatacggaaaaattcttgggttgtcacagctctagaaagaatgagcacatcttttcaggtgtaaattttataggatttacaatgattcagcatatgcagtgtttacaattatattattatatgttgttgatatacaggtagtgtggttttagttgtagcaaattgtgagagtaaacaaacaaattatgtgttgttagcctccctctttatttcattaagaaattattcctccctaaacattatgccaaattctgcagttagtatattaatttatactttttgttcccattgaaacaagtactacatcaaaagcaggagagtttttttttttcccttgttatttgtattttgtgggaaaattctgaaaagcatttttcaatgcagaaatctgctaaagaatttactgtgacttttcttctattgcattttgagattcattatgatggttgtacctgtttcagagttcactgaggagcacaatagtgtcataaaggtggtgaaggcagagatgaatttccttattatatcaatgagtggcacatttaaccttttaaaggaaatggaacctttcttcgagttatcagcataaatcagtgaatactgaaaacctgcaagtcatggaggacagtgaaaggtaatattcatagaaactccttctctgttccattcatcctcttgtgttctgtgttttatgtagtttttgcatctgttgtgcttgaatgtactatgatatcactgtctcttgtaaagtgtaggtttgaagaaaagtccttttcaaatggggatgtttacattggtaaaatcaagggcaggcttccccatggcaaaggaaagtacacatggtcagatggaacagtatatgaaggtgattgggtaaatgggaaaatgacggggaaaggactgattacatggccaacaggagcaaagtatgagggtgaattctctgggggttaccttcatggtcatggcacctttacacattctactgggtgcatttatactggtagttggaggatggatgctcatcatgggattggacgaaaagagtattccaattcagatatatatgaaggtttatggaaagaaggaattcgtgaaggctgcggaaggtattcttgggagaatggaaatacttatattggaaattggaaaagtgggaaaatagatggcagaggggttatgaagtgggctaatggtgatatttttgacggctgttggttaaatggacttaaacaaggatctggagtttatagatttgctgatggggggctttatattgggacatggagtaagggcctaaaggatggaaaaggaaaattctatcctgctggtggtaaacaaccatctctaaagaagttgtgctctcttaacagtgatgatggtttgttattgaatacagagaaacatacagctccaaaacaaaaatttacgcgtagtttttctgaaaagatttctgtcagtggtagatcaaaaagttcacgtcaaatatctcacaggacttcatcattagatgcaaattgtatcattcaagatcctgctggagattgcatatgtcgtgactcttcacccacattatcacagacttttaatgaaagtcaatctgaggcatctggtgtaaactctttggtttacgaaagggaatatatgcaaggagttctaattatggagagaattagaaactattcagaaataccacataaaaacaaacgtcaaaataagtttagtgtcaagcaagctaagaagagttcatggattgatatttttggaggcagccgaagctattatttgaagcttaatttgcagcttggcatcaggtaaattatatgatctaacatgaaccttgtagcttattttggaataattgatattgtatctatttgtcaccagtaatatcataattctttctactgcattatacttattgttatttttaaatcaagaccatgtatagaaagtgatccaaccaataaattagatgacgtctaagtaatggctgagaactactcaacaagtttccgtgaagctagcatacattagagtgtattgatgcatacttgctgattgattcacatattaaagataaggaatgattttattataaatgatctgtttcatgttgttcgcagcaatactgacagatatatttgggtatgggtagagaatgtaaagacatttaagtaaaagaaaatataaatgactatcccaagggttttagagtcatcattgaaaagcttattcttaaggcagatgcgaggttatttagtttgcagaaatgaatgcttaaaccgcctttaacaatagtatattttacactcatattaacgtcagtgctgtaatatgattattggatgctagtcattcaggatgatctgagaggggaaaaacagagagatgaggaggaaagaattatatattctgttgaaatcatgtagagcttttgtccgatgttgatcggtaactatcaaaaggcattcctcttcacctcattcttaagatccataaacccaattatatttcttgtatttttaccgcagtttttgtttaaatagttaatagaaaacaatgacaaacaaattacattctcatcgtgcatcagtatgatgaaggtttttttttttttggttggggggttgtaaatcaaagttaatgtgtcttattccatttggtattttgtatttttgtttcatatgaaggtttgatttaaagaaatttggccaaattctcaggtacactgttggaaaaattacaccagtgcctgcacgtgaagttcggtcatctgattttggagatcgagctaggataaggatgtacttccccaaggagggttcccagttgactcctccacattcttctatagacttctactggaaggattattgccctatggtattccggtatttatttactacatacacacctgaagagttatatgtttagtaatgtttattgaaacgctttccatctggctacagtaggatcaacttatttcaaagttgtaaggcatgaaagcattatcacctcttaattttattgttagcttatgaaaccattggtgcatcataatgtatttcctatgaagaacttccaaactggagtatcaatgttgaagtttggtccaacccttttccttaggcataaaagaaggaaggaaatatgtccaattttaaatgtgaacatagtcattatcaaaataatatacatgaattctcgataatacgaatttgtgattatagtggcataatagaagtgcttaagggttatggttaaaagcacatgatctttcaagatgtattcattggcagactcaacataaacaaccccatattttcagattaacattttgcccatttaatgaattgaaggtttcatgtgcttgattaatgtatgcctcccaatttattaattacatgtagctttctagcatcttttttttttctttctatctttctttgcgtaattacataagcatatatttccaggaatttgagagagatgttcaaattagatgctgcagagtacatgatgtccatttgtggtgattctggtctaagggacatatcttcacctggaaaaagtggcagcatcttctttctttctcaagatgatagattcgtgataaagacactgaaaaaatatgaactaaaggtttgcaatgacattttttttttctttcttcatggatcagaaaacatttttatattaatcatattgtgttgaattcatcaactggtatgtgaattcgacttttgtgtagttggatacataagcatattagatggctggcacatagacagcactttagagtgatatacagtttcatatatacctactatccacttaccaaaccccatagatacaagtaatactttatagtgccactaatctggtgacaaagtttaattaaatccaatgccaaaatggctaattgagaccatttgggtgggtattttctggagagaagtattttttaatgttatatggagaaaagatgattgcttataagtgtatctttgacaatccatcaacaccagtaggacttgctagtgccagtaatttgattactattttcaaggacaatattcatgaaatccaatctagtgaaggccacattatgatagacgtttctggataaacacgtttttatgctgaaaagacaattctagaccagaatacgtgatggcttatctttctggctcttgtagttccatagacaccaataatactaccagtgcctataatctgatgacaacttttaaaggcaaagttcatgaaatccaatgccaaaatggctaatcaagaatgcgctttagatgggcctttttggtgaaaaaatgttcttatgttagttaagaagtcacttttacagagaaatcagtggttgcttatgtttccatctctcacagtaaataatcaatttgatttacccaattaaatgacaattccatagttcgtggttatgtacatatattttttctcttcttgtaggttatgctcaatatgcttcctaaatactaccatcatgtaggaagttatgagaatactcttattacaaaattctttggtctccatcgaataacactaagaggtgggaaaaaggtataacaaatatctgtctctagcttcttttcaattagtactacagatatgaataaccttgttttccaccccacctagtgagaaaagggttggatgttattgtttttgtataaatatttctttctttcttcattgggtgttgttttcattaggttcgctttgtggtcatggggaatatgttctgcacagaacttcatattcaccgtcgttatgatctgaaggggtctactcaaggaagatatacaaacgaagataaaatcaatagcaatacaacattgaaagatcttgatctaaaatatgaatttcatatggataaaaaattacgagaatccctattcaagtgagttcctactttttaagagctacttctgttaaaagtgattggtatgcaatttatttttctgtacaagtggggagtatttgttgacaaagttccagaatataacaatcctgttcttctagatcatataatgcctatttcagaggaaattcttaactgttattgctctaagaaatgcttatggcaccaaacagcaataattttactttattagtttattaatgatactagtcacaatattgatcatggttgtgatagagtgtttcgttgatcccctgaaaccataaggttatgggactaatttgcttgaaattctggttggttgctatctctacttgccataattgaaatagatgacctttcaaagtaatgcaaagatatattggattatccgtagtctgaatcaagcttcttgtttgatccagctattacagcttttactgattcaatatctggttaatttccaagttaagaacttcagaagtcatgaaagttgtgccttttttcatattttctaattgaaaagatataatcctgaactttacattagaatcggcaaaccaaaatgtgaccattgtagagatgttgcattagatataattagtgtagggtgattagatttgttatgaaactgttagcaaaggttccacttctttcagtgaattttctttttcttttcaatagagaagttataattcatgcattaaataatgactaaatggaattcacctaactatcaattactgggacacctctgggttatgattgatttacttccataccagcacacttagcctggaacgttacagaactgatttgtgactgtttgctcgagtgtatataaagtatttatcatgacaattttattggactactcatcgactgaaggattaataagcttagcttctatgaatcaaaaatacgcttagcttctagttatgactcaaacttcttttttctggtgcagacaaatttctctagactgcatgttcttggagtctcagcacataattgattacagtcttctgttgggattacattttagagctccggagaatctaaaggccttagtggaacctcccagactaccgcagcctcaacatggcttaccctctgaagatagtaaataccttctctggtgttattttagaacatgatatgggattcttctttcaaaaattagtgattatagatgacacctagcaatagcattcattagaatggtttataaaatgggaggtagaatgatttattaagtaactaatccttccatgcatccatccaataactgaaaaaaaaacagaccagctgaactatctagcaccttcctattagccagaagttcatacagtgcacttttgttcctatgatatatctccatcttttgtttattttattttgtaaattcaggtatattcaagtttttatttcaactgttcaagttcactacaaactgattctgttctctctattttcttgcatttgtgcctcagtttccttcttttgattgagcactttttgacttgctttgctttactagatgcacaaaaacaaggggagcagttgattattcctaaaggcttgttattagttgctcatgaacctaggtttgtcaacactgcaccgggaccacacattagaggaaatacattgagagcatactccataggtgacaagcaagttgatcttttacttcctggtactgcaaggtatcgtctataacattattctgattgtttccttttcaatattcattaatctagcacctttgcaagtatctcctttggtcctagacagttgcatgtagcaattattgtgcattctgtttctttcactgtacttaatgtcactttctttaaataaaagtcctaagcagaaatcgtttgctttattgtgttccattgtaataacacatgtcataatatgaaatggagtgttactcaggctgagagtgcaattaggagtaaacatgccagctcaagcaacacggaaacttcaggaggataaggtggaggaatcagaggtagagctttttgaggtttatgatgtggtcctatacatgggcataattgatatattgcaagaatacacagtgaaaaagaaacttgagcatgcctgcaaatcactgcaatatgaccctatgactatttcagtggtggaaccaaagacatatgctcaacgtttcatcaatttcatggagaaaaaagttttcccagagccagagacttcttgaatatgtatattttatctttcctttttggtttaatacttctttgtaatcaattgttcttaaggaagagtattttgttttaccaacaccgtttagatatatttttttcataattctttcagattttttctttttctttacagaagaggcctgctattcggtcaagagattaatcatcaaacagttgaaaatgattaattgatgcaaatatgtgtattcacttccaatttccaaagaattaaattacatttaaattattttctttttttaatctttttttccacctgaaaggtcctgccctttgaaactcagaagtgctgctattaatatattctgcaacctgccatcttcgtgaaataaagtgtaacactgacctttgtttaataattcagcaattaagaataaaaccaactttacatgttacttcctccaaagtaagtcacatttagaaaaataatttattccaaaataactgttatattaatttttcaaatattatttttttttactaatattcctaaatgttactttaacttannnnnnnnnnnnnnnnnnnnnnnnnnnnnnnnnnnnnnnnnnnnnnnnnnnnnnnnnnnnnnnnnnnnnnnnnnnnnnnnnnnnnnnnnnnnnnnnnnnnnnnnnnnnnnnnnnnnnnnnnnnnnnnnnnnnnnnnnnnnnnnnnnnnnnnnnnnnnnnnnnnnnnnnnnnnnnnnnnnnnnnnnnnnnnnnnnnnnnnnnnnnnnnnnnnnnnnnnnnnnnnnnnnnnnnnnnnnnnnnnnnnnnnnnnnnnnnnnnnnnnnnnnnnnnnnnnnnnnnnnnnnnnnnnnnnnnnnnnnnnnnnnnnnnnnnnnnnnntccaaagaattaaattacatttaaattattttctttttttaatctttttttccacctgaaaggatgataaagtgtaatgctgctattaatatattctgcaacctgccatcttcgtgaaataaagtgtaatgctgacctttgtttaataattcagcaattaagaataaaactaactttaaatgttacttcctccatctcaaagtaagtcacatttagaaaaataatttattccaaaataactgctatattaatttttcaaatattaattttttttactaatattcctaaatgttactttaacttattaagaaaattgattaattcagttatcaacattagatttatctataactatagtatttagttaccataagaactatgaatgaattaattgataaattcccattgatcaataaccaaagaaagcactattaaatattaattaacaagattctttttttattaggaattaataagattctttaaaaatacaatcacacaaaagaaggaaaaaaaagtaggaattatccttaaattattcttaaagatttttttcccaatctaataataattataacatctttcctatcttaatacaaaagcttgaccacaattaaactttacataacgaatacgtcattatatcctcttatctcgtataaaaaggaaaacaattcataaaggatgataaataaatccatagattcctaattcgtcaaataaaaataacttaaaattaaaataaaacgtttaaaattaaattgccttaagaatgaaatcaccttaaacatatagtgtatttgattacatatttcagatatgttttttactttttacagattccaaatgtaagacctaagacaccaaagtagtgtactaatataaaattaaccatacgatcatcttgtaactaacaacaaagcattgattaaccaaaatggtaatcacgtaaagctcatgaacccttaacccattaagatatatataaagaggagttggattctcgagacaataatttatcattatcaattattatactattaacctagttggtccgatatctacttgaacattgcatagttttgcagaaggtgtcacatccgttgtacactcatcaaatcaagaattatactattcgaagcaaaatgagattactaagggaaacgtaagatccactgaataacataatctgagaggccctggtgttgtgggggctgggggctgacagcttcaaagcaaaatcgaaatcttgaaaagtgaaagaaaaagttctaacaataatatctgcaagagacatgcactaataaaaaagacaataagcatgaatatagtcgatatttgtttactcgcaaattagtcaagaaatcagaaccaaagaagtaataaaaaacaagaaaaaaatgggctaaacccctaaatacagtgcgtgttcaatgctcaacaggttaagttgcctgaagtactaagcctttgtatcagatccactcaaacaaatacacctcttggaagcaacagaagcagcattttctgctacacttcccattctctcaaggtcttcttctaagtatctaaactcttccatgacactctccatgacccagtcaaagtgatcatctgcttgttgcagcatattaacctctgcttcttccactttcttttgctcaagttccacagctaccccatgcgttgtatgactcaactcaaatagcttcatggggtcttcggttgtgaaaggataaaaaatttgtcttggaaagcttgatctaagagaaaggtgaacagcgatatgagggtttccatttttcttttgagtgtgaattgaagaagcaactttcattggtgaggcatataaaggacaaaaaattggctttttgcaacgttaagaattgttttggcaggaatttgccgtagggtcacgtggttcctaaacctgcatgttgaaccaaatctgagtgaaaattcttgtgggacagtgaaaccagtaagataggatttaattatgagatcttttattctctttgggtgtattttttttttatccatatgaatcaaaaatggtataaaaaatttacaacacatagaggactaaattgtcctcattgtattaattataatgttctttaatgaactagacttcattatgctttgaaaaaggcttagagagccgttggaacttcttttcttctcatctataagttaaggttaagctttctctaaatgcagactttgtgtgaaggatgatttttcttatctaagggccggcaatttgattcaagtaatttttaaataactaatataaattaattttttactttaattcaaccatctgaaatgtttgttaaatgaactacagaaaagtaagatacagttactattttaattaacaattattgtggtactcagtactcacaaaagtttgaactaaaactgcgtctaggataaactttggaattaatgttgctttggtgatcaatgcgcagtttcctaagttgggatatgcatgtgcataaaaattcagacacagaaattggaaaagtatagctagaaagagtaacgtgtgattcaatccctgtctaagtagaaaaacttgtttcaattgatatagactttgccttatttaataaaaataaaactgatgaaactttttttttacaggataaaactgatgaaactcttaatataaacatcgtgcttaagctaatactttacattatatctaaaataaaaacgctcaataatgtatcgggtcaaagcatgaatgaaattataataagtgtacaaaaagtagtgatataatttatttggttatatagggaaaataaaattgttctcgttatccttatatatccaataggatctaattaaattcaaaatgccaaattatcaaattatgatctatgtatatatatccaaaacagatcatttcctgcggtgctgcttaggcagaaaaaaaactgaacaaaattaaaaaagagctagaggatgaaaaaataagatgaatgatgaagttttttaaaaaaaaaaattagaaaaatgttaatcattagatttattagtttttttaatataaattattcgaatccacttttttttcctttctattttcaagtcaatcttataattttaaaagatcattaatgagaaatagagtgacactgaacggttaaggggagaggtatccagagagggtccaaatccatatacaaatacagccataatctgagatggaagtaacacgatcacgaaggaagaagcataacctaatgggttattggacttttaacctcttcaaagaatataatgagtaccaatcgaaggcatggtagttaacggctaataattctattcagattatataaataaaataaaatattcannnnnnnnnnagtgatttttatattaaaataacgtatttcttaataagtttgacagttttatattaagtgataaatagaaattttaagtttttagttatacatagatttgactacaagtacaaaggtgacataatataatgaaggaaaaaaatgtgtttttatccttaaattttcagcaaattttggattgatctctatatttttaaatcgatgaatttagcttttcaatttgtaaaaatatgccagtttagtcaccttttacgtttatacttaatatttagtagcaatttttttttattgagacatggttagcaagttgataaaaaaatatgatttattttttattatgctcaaatagacccaaaatagtataaataagaataaaattagattttccaaatttttttataatcataattttgaaaattagttcaatagggacactttagaaaaataatggagtaaaaaattagtcaaatagataaaaaatggtgtaaataaataaatgaggagttgacannnnnnnnnnnnaaaaaaaaaagagctacaggatgcaaaaataagatgaatgatgaagttttttaaaaaaaattagaaaaatgttaatcattagatttattagttttttttaatataaattattcgaatccacttttttttcctttctattttgaagtcaatcttataattttaaaagatcattaatgagaaatagagtgacactgaacggttaaggagagaggtatctagagagggttcaaatccatatacaaatacagccataacctgaggtggaagtaacacgatcacgaaggaagaagcataacctaatgggttaattattggacttttaacctcttcaaagaattgaatgagtgccaatcaaaggcatggtagttaacggctaataattctattcagattatataaataaaataaaatattcaattttggacaaattacttagttaaatgaaaaataaaataatcattaaaattacttagttaacggttaatgaaagattaattctcttgtgactgtatcttctaagatcatcataactatcgaatttaaatacgacatcaaaacaagtaattcaaaacaagtaattgaatatattaaaattaaagttaaatagtttagataatatttgaatttaatggataaaaataattcttaataaaaatattactgtgcaatttagtatatagtattggcttttagcatatactaataactagtattgatatcatatcactcgatatttaaataattattttataaattttattttaattaacattttatgtaattcttaatttactttaacatattataactgaataatttaaaataaatagtcgcaaaagtgatttttatattaaaataacgtatttcttaataagtttgacagttttatattaagtgataaatagaaattttaagtttttagttatacatagatttgactacaagtacaaaggtgacataatataatgaaggaaaaaaatgtgtttttatccttaaattttcagcaaattttggattgatctctatatttttaaatcgatgaatttagcttttcaatttgtaaaaatatgccagtttagtcaccttttacgtttatacttaatatttagtagcaatttttttttattgagacatggttagcaagttgataaaaaaatatgatttattttttattatgctcaaatagacccaaaatagtataaataagaataaaattagattttccaaatttttttataatcataattttgaaaattagttcaatagggacactttagaaaaataatggagtaaaaaattagtcaaatagataaaaaatggtgtaaataaataaatgaggagttgacnnnnnnnnnngaccaaaaatagtataaataagaataaaattaggttttccaaattttgtttataagcataattttgaaaaataatggagtaaaaaattagtcaaatagaccaacaatggtgtaaataaataaatgaggagttgacattttcatttttaataaattttaaccaatcacaaagagagtaagtaagagaaagtgttgctagcactcctctaaataaataattaagaatcaagacaaaatagcaaaattgaatttttaaattgtgctcaaaatatagttttgaaaattaatccaataaagacaatttataaaacaatggagtaaaaaatcagtcaaatagaccgaaattggtaaataaataaataagaatcaagacaaaaaaaaagacaggttaagttgcactttaaaataaataagtattaaattatttttaatcaataaagataagagtaaattatactcgcatccccaatgttttgctcaaatttcatcttatatccttcatttttttcacattacttttactctcttatgttaatgtcgttaactaatgtcaattaaaatatgtgagtaggcgaaattatttttatattttaattgtaaaattcaaattatcccctcccaaataatttcataatttaggtttcacgttcttcaccgttcctctttcaattcaccgagttctctattgttcctcttccagttcgtgagttctccactattcttctgtttctcttcctgttccacgatttctgcttacactaaggttatgcttgtaagtgactattggaccttgtatataaattacattttaagaatatttatttaattttgattatttattgttgcctatttctgaatgggattttaatggggaccagtttggaaccattatgatatttaaaattatctgtttattattattgattaaaataatgttgatatttgggaccacatgaaacacaatgaatgaactgaaaatcatttgtttattattgtagattaaaataatattgatgtttgggaccacaagaacacaaatgcaggaacaaaacactaaatttgaagcaaatgatcatattcaatcaaagataaaaaaattgaactaaaaaattgaaaaaggaaggtgttaacattgcgtaccaagaaggtgagtttacgtctaacaaaaagttgggttcgcgttcaattaggaaaaaaaaacaaaaaaaaaacaagagtattaaaatattttcaaattgagaggaagaagatacgggtatttttaaatataaaatttcattaaaagttatatgaccaacacgtgtctactttcattaaacggtgtttaggacggaaggatgtggatgcaatgtgagttaaacaattaagggattttttgtatagtacaaaaaggaaggagtatcaaataagatttaaacaaaacataggggtttagatgtaatttactctaatgataaagatttaaaagtaagtcatcttaatcagtgttattaaaaccggttcagatcgggaaccgttggtagcaccggatcggattgagtgtggaaccgatcatgtaagtgacccagttaagcccggcaagaaccagccaatttttgccaaacccggcgacccagacgagttcaggaacccggaccagtttttgtaaaactcagaaaaaatgcattttcttcgtcttcttcaccgacaccttatgctggagaagctctgctccgcctactccgccactgcatccaaaaacatctttctgaaatgttaaaaaaaaatcaccattttgaaaaaagggtttctggaattaaggttttaaccaagagaaggaagagaagccaatatggaatgaagcagcaaaattaaggagatgttaaaaaattctatgcccagcaaaagaaagagaagccagctgcaggaaggaagcgtcggaaatatggaataaagaatggaagttgctcagcacaactagataagcatatatattattagggtttttttaatttgggcctgattgttgctttttgtacccatgttattaatttctggagcttccattttatattttttaataaaaaaatgttggcaccagcttcctacaccattctcaatttcttctacaccattatagttttgaaaacccaaaaatacccctggcagctttcctcttatattcctcttatatttatggcatgtacagttacgttgcagctttcttcttttctccctttattcacttcattttggtgccatttttgttgctacaaacgctgttcattggttgttctcggtggcattctgttgatttcgtcggagttttggcgtggtggtggccgtcggagtcgcgaagtggcgtcggggttgcagaggttggtggttattattttcgtgtgtcatacggattacctaatccgtatggtattaaatctactgtttgagaaatttttttaaaaaaattggttaaaacatatatttttaaggaaaatttaccttagctgataattatttgagagaattaatacggaaagttagtttttggattcaataacaattgagtttaatttataaaattatttgagtgagtaatgcatatttgaaatttgtggattgtttatgtatgtagatgattattaagacgttaatgaataattgtaaaaatgttattttatggattagttatgtaaatggtgatttatttgtatgtgattttagtaatgataaaataaaatgtgtagttgtaaggatggacaccgatgagtggatatatgaaagtatgttgtcggaagaaaattatatggatgaagacatcgaagcggaccctgatgcgtttgaagacaatgattgtgtagttgattgttctgcagcattcaacacgactgaggtatttatgtgcttttgaatgtagttaaagttgttaaatgattaaattgagaagattaaagatgaattactcatttgtgtaggtgtttgaatctcgtgatgcggtattgaaatgggctcgtggggttgcatttgagaatggttttgtggctgttataatgaggagtgacacaaaaaccggaaaagtaggaaggacgtcatttgtgttaattggttgtgaaaggagtggaaaatatagacaatggaaaaaaggtttgacacgtttgaccactgggactagaaaatgcgagtgtccttttaagctgcggggtaaaccaattttgggaggtcaagggtggatggtgaaactaatatgtggtaatcacaaccatgctttggctaagtcattctgtggacacccatacgctggtcgattaactgaagaggagaagatgattgttgcagatatgacaaggtcaatggtgaaaccaaagaatattctgttaactttgaaggagcacaatgcaaataatgtcacaagtttgaagcaagtatacaatgcaagatatgcataccgcacgcgtataagaggcgaaaacactgaaatgcaacagctaatgaaacttcttgaacgtgacatgtatattcattggcatagattgaaggatgtaaatgttgttcgtgacttgttttgggcacatccagatgcggtaaagctgagtaatgcatatcatatggtgttcctcatagatagtacctataaaacaaataggtacaggcttcctttgcttgacattgttggtgtgacgcctactgggatgacattctcagctgcatttgcctatttagaggcggaacgtataagtaatgttgtgtgggcccttcaacggtttagaggaatttttcttaaaagtgaatttttccctaaggtgattgttacagatagagatttagcagtcatgagtgcagttgaaaccgtattcccagaggcaacaaatttattgtgtaggtttcacattgataagaatgtgaaggctaaatgtaaaacttatattcagcagcagaatgcgtgggattatgtgatggatgcatggggaagtgttgttgactgtgctaatgagaagaaatttgatgattgtcttatgaaatttgaggttgcatgtgctccgtggccaacatttattgattacgtgaaggacacttggttgaaccctcacaaagaaaaatttgtcacagcatggacaaataaagtcatgcattttggaaatacaacaacaaacaggtaaatttcacttaagacattaggtaatttatcatttatatcatcatttgcatacgtttaaaaaatatgaaatgaactatcttcatatcataccttgcagggttgagtctgcccattggactttaaagcggctactacaaaatagtgttggtgatttgtgcacggtttgggatgcgatgaacaatatgatcaccttgcaacatactgaaatcaaggcatctttggaaagaactacacatgtggttggacatgttttnnnnnnnnnnnnnnnnnnnnnnnnnnnnnnnnnnnnnnnnnnnnnnnnnnnnnnnnnnnnnnnnnnnnnnnnnnnnnnnnnnnnnnnnnnnnnnnnnnnnnnnnnnnnnnnnnnnnnnnnnnnnnnnnnnnnnnnnnnnnnnnnnnnnnnnnnnnnnnnnnnnnnnnnnnnnnnnnnnnnnnnnnnnnnnnnnnnnnnnnnnnnnnnnnnnnnnnnnnnnnnnnnnnnnnnnnnnnnnnnnnnnnnnnnnnnnnnnnnnnnnnnnnnnnnnnnnnnnnnnnnnnnnnnnnnnnnnnnnnnnnnnnnnnnnnnnnnnnnnnnnnnnnnnnnnnnnnnnnnnnnnnnnnnnnnnnnnnnnnnnnnnnnnnnnnnnnnnnnnnnnnnnnnnnnnnnnnnnnnnnnnnnnnnnnnnnnnnnnnnnnnnnnnnnnnnnnnnnnnnnnnnnnnnnnnnnnnnnnnnnnnnnnnnnnnnnnnnnnnnnnnnnnnnnnnnnnnnnnnnnnnnnnnnnnnnnnnnnnnnnnnnnnnnnnnnnnnnnnnnnnnnnnnnnnnnnnnnnnnnnnnnnnnnnnnnnnnnnnnnnnnnnnnnnnnnnnnnnnnnnnnnnnnnnnnnnnnnnnnnnnnnnnnnnnnnnnnnnnnnnnnnnnnnnnnnnnnnnnnnnnnnnnnnnnnnnnnnnnnnnnnnnnnnnnnnnnnnnnnnnnnnnnnnnnnnnnnnnnnnnnnnnnnnnnnnnnnnnnnnnnnnnnnnnnnnnnnnnnnnnnnnnnnnnnnnnnnnnnnnnnnnnnnnnnnnnnnnnnnnnnnnnnnnnnnnnnnnnnnnnnnnnnnnnnnnnnnnnnnnnnnnnnnnnnnnnnnnnnnnnnnnnnnnnnnnnnnnnnnnnnnnnnnnnnnnnnnnnnnnnnnnnnnnnnnnnnnnnnnnnnnnnnnnnnnnnnnnnnnnnnnnnnnnnnnnnnnnnnnnnnnnnnnnnnnnnnnnnnnnnnnnnnnnnnnnnnnnnnnnnnnnnnnnnnnnnnnnnnnnnnnnnnnnnnnnnnnnnnnnnnnnnnnnnnnnnnnnnnnnnnnnnnnnnnnnnnnnnnnnnnnnnnnnnnnnnnnnnnnnnnnnnnnnnnnnnnnnnnnnnnnnnnnnnnnnnnnnnnnnnnnnnnnnnnnnnnnnnnnnnnnnnnnnnnnnnnnnnnnnnnnnnnnnnnnnnnnnnnnnnnnnnnnnnnnnnnnnnnnnnnnnnnnnnnnnnnnnnnnnnnnnnnnnnnnnnnnnnnnnnnnnnnnnnnnnnnnnnnnnnnnnnnnnnnnnnnnnnnnnnnnnnnnnnnnnnnnnnnnnnnnnnnnnnnnnnnnnnnnnnnnnnnnnnnnnnnnnnnnnnnnnnnnnnnnnnnnnnnnnnnnnnnnnnnnnnnnnnnnnnnnnnnnnnnnnnnnnnnnnnnnnnnnnnnnnnnnnnnnnnnnnnnnnnnnnnnnnnnnnnnnnnnnnnnnnnnnnnnnnnnnnnnnnnnnnnnnnnnnnnnnnnnnnnnnnnnnnnnnnnnnnnnnnnnnnnnnnnnnnnnnnnnnnnnnnnnnnnnnnnnnnnnnnnnnnnnnnnnnnnnnnnnnnnnnnnnnnnnnnnnnnnnnnnnnnnnnnnnnnnnnnnnnnnnnnnnnnnnnnnnnnnnnnnnnnnnnnnnnnnnnnnnnnnnnnnnnnnnnnnnnnnnnnnnnnnnnnnnnnnnnnnnnnnnnnnnnnnnnnnnnnnnnnnnnnnnnnnnnnnnnnnnnnnnnnnnnnnnnnnnnnnnnnnnnnnnnnnnnnnnnnnnnnnnnnnnnnnnnnnnnnnnnnnnnnnnnnnnnnnnnnnnnnnnnnnnnnnnnnnnnnnnnnnnnnnnnnnnnnnnnnnnnnnnnnnnnnnnnnnnnnnnnnnnnnnnnnnnnnnnnnnnnnnnnnnnnnnnnnnnnnnnnnnnnnnnnnnnnnnnnnnnnnnnnnnnnnnnnnnnnnnnnnnnnnnnnnnnnnnnnnnnnnnnnnnnnnnnnnnnnnnnnnnnnnnnnnnnnnnnnnnnnnnnnnnnnnnnnnnnnnnnnnnnnnnnnnnnnnnnnnnnnnnnnnnnnnnnnnnnnnnnnnnnnnnnnnnnnnnnnnnnnnnnnnnnnnnnnnnnnnnnnnnnnnnnnnnnnnnnnnnnnnnnnnnnnnnnnnnnnnnnnnnnnnnnnnnnnnnnnnnnnnnnnnnnnnnnnnnnnnnnnnnnnnnnnnnnnnnnnnnnnnnnnnnnnnnnnnnnnnnnnnnnnnnnnnnnnnnnnnnnnnnnnnnnnnnnnnnnnnnnnnnnnnnnnnnnnnnnnnnnnnnnnnnnnnnnnnnnnnnnnnnnnnnnnnnnnnnnnnnnnnnnnnnnnnnnnnnnnnnnnnnnnnnnnnnnnnnnnnnnnnnnnnnnnnnnnnnnnnnnnnnnnnnnnnnnnnnnnnnnnnnnnnnnnnnnnnnnnnnnnnnnnnnnnnnnnnnnnnnnnnnnnnnnnnnnnnnnnnnnnnnnnnnnnnnnnnnnnnnnnnnnnnnnnnnnnnnnnnnnnnnnnnnnnnnnnnnnnnnnnnnnnnnnnnnnnnnnnnnnnnnnnnnnnnnnnnnnnnnnnnnnnnnnnnnnnnnnnnnnnnnnnnnnnnnnnnnnnnnnnnnnnnnnnnnnnnnnnnnnnnnnnnnnnnnnnnnnnnnnnnnnnnnnnnnnnnnnnnnnnnnnnnnnnnnnnnnnnnnnnnnnnnnnnnnnnnnnnnnnnnnnnnnnnnnnnnnnnnnnnnnnnnnnnnnnnnnnnnnnnnnnnnnnnnnnnnnnnnnnnnnnnnnnnnnnnnnnnnnnnnnnnnnnnnnnnnnnnnnnnnnnnnnnnnnnnnnnnnnnnnnnnnnnnnnnnnnnnnnnnnnnnnnnnnnnnnnnnnnnnnnnnnnnnnnnnnnnnnnnnnnnnnnnnnnnnnnnnnnnnnnnnnnnnnnnnnnnnnnnnnnnnnnnnnnnnnnnnnnnnnnnnnnnnnnnnnnnnnnnnnnnnnnnnnnnnnnnnnnnnnnnnnnnnnnnnnnnnnnnnnnnnnnnnnnnnnnnnnnnnnnnnnnnnnnnnnnnnnnnnnnnnnnnnnnnnnnnnnnnnnnnnnnnnnnnnnnnnnnnnnnnnnnnnnnnnnnnnnnnnnnnnnnnnnnnnnnnnnnnnnnnnnnnnnnnnnnnnnnnnnnnnnnnnnnnnnnnnnnnnnnnnnnnnnnnnnnnnnnnnnnnnnnnnnnnnnnnnnnnnnnnnnnnnnnnnnnnnnnnnnnnnnnnnnnnnnnnnnnnnnnnnnnnnnnnnnnnnnnnnnnnnnnnnnnnnnnnnnnnnnnnnnnnnnnnnnnnnnnnnnnnnnnnnnnnnnnnnnnnnnnnnccaatccgtatgagtcatacggatcacccaatccgtacgatagtccccaacggattaccggatccgattccgccattaacgacctgcaacaccctccaaacagcaccatttgcacgaattgcgaaagaaatcactcaccagagtcacgagagcggcggacgtgcggcggtgtgaacaggagtgaacggcaaaatgcggtgcggtgcttgccggagatgaaggcgcacaacaatcactcaccaatgtcgttcaacgggaagaagaaggaagccaatgcggtgcttgccggagaggaaggcgctcagcaaaaatgaagaagaaacgttgcgggtgagagggaggaagaaaggtttaaaaaaattatataaatgattttaaaattaaaaggatataatgggaattgcactgtgtaaaaatggtgtatgagtaatggagaatggtgtaggaagcgcatgccaaaaatgttaatgacatatgaatatataatataattttgttttttgcaccccttttttgttttatgcagtttccattttactgttttgattttgattgtttctatttacgctctttttttattattaatacacttgtattatcaactttaatacttcaattattaatttgaatatgaaattatgaatgaatttttcttaatcaaataatgttaattatatgtatatgtatatagttttgaattttttaatatagaccgaattaaatcgaatcaattactaatccatagattggacccctgatccactaacccactatttcgactgagtcaatgattcggctgcttttcataactatgatcttaattcttaagccagaggcactaagacgggggtggaaataataaaataataaagaaaaccattaaaaaaaaaaaaaactgaaaaatcatagatacagtcatacagatccaaaatgtgcagagagagaccgaaaacgattgtttgctgtgttgtgtgcatagagggagggagagagtagaggctgctatggggaacagagctatgttaaagctgctactcttcttcttctcgaccaatttggttccttccgttctggctatctggctgacgttacccaccgctggcaccaagtgcgtctccgaagaaatccaacacaacgtcgttgttttggccgattacgtcgttatccccagtgatcacgcccacaacccctccatcgccgtcaaggtactctttttcccgtccattacgacacccttttgcgatttctgtcatgggtttcttcaattactcattagattctctttcccgtcttctgatttgtttggttccttgatttgcgtgttgacggatttgttttgtcgtggatttgctattactattcggtttcggaaaattattgtgtgttgttggtaatttgaaaggctttgtagaggtgcttcttgctcaactgattacctggaagaccatgttgtggaaaattgttaattttaggtcttatctttgggtatttattatcccattgtcttattttggccatgaattttgtggtattataataatgttatgaattttcataactttgttttgtttttacatatatttatcagtgaatgtaatttttattgcttaaaactactcctaattttttggtatatatgtctgtggagcctgaatggtctaggtgttcacgctagagaacacacacgccaggccccgggggagtcctaatgctcggtatgaacttaaaaaaccatagcgagcctctactatgttgacctgttgtaacccggatagatcacagctatttgatgagtgtgttctctaacggttcccaccatttttgggagtggcgtgcatcgtacctccctcacatgtaacgaggggatggtgccaatggtgccttagtcatgcatggggagaatctagaatctcgctatactggacccagggccggcctaaagcaaactttaaaataacattttttaatttaaacgtgagagctaaatttgaggcctttttgttaacatatgacatttttttcattatatggggccttttttgctttataaaactaatagaaaatattttttatataggcctaaagcttgagctttagttgctttacccttgtgtcggccctaactgaacctgagggttcaaaacccacaagactgtgatgtgatatggtgagtcagttataattggatggtcagtctacagacacaggccagtctacaagtgtgggccatatatattaactgatagtcttgatagaagttttcttactcagctggtctaattcttggccagacagtccaatttcattgtcattgagctcattgaataatttgctgctggagaagtggtggtaatggaaagtcgaaaacatcttagaatatggcttgcacacataatggtggaaatttcttacagcatggttcgcagagtagtattcttgctatgctgagtggtttgccaagatcaaagatggcagagttggagactttaatactgatgggaacaaattatagctgtcatgagaagttatgtatcattagatatacaagtaataataactgtcatgttggaagtatgtagtgtgatgtagaagggtgttatgtgtgcagtagttctgtaagtttggacagagaataatctctataggagtcataaaactggggaactgcagcccttttcctgattgtgtgaattctgtgattcagtaataaaaaaaccactaatttatcaactgatgctctatcaaatacctcagctacctggggaatggatcccttgcatgataactgcatttacaaaatttcaagtcttaacagaaataaggtttaataatgttgaaaaaatgtacttggaaacattttacatttctactaagtaataatagtttattttctgttgtttagacttgcttgtgtttatgtgttttcaggatgtaatactggttggctcttgaatgacaaccttctgatacagcttgttataaaggtctattacttgtctctttgtttctaatagtaatttgtttcctttaggtgacatcaccatatggaaacaatcttcatcacaaggagaacacaacacatggtagtatcgcatttacggctcaagaggctgggaactaccttgcgtgcttctgggtggatagccatagtcaaggagttggtgaggttaatgtaaaccttgattggaaaattggaattgcagccaaggattgggattcagttgctagaaaagagaagattgaggtaaacttccaagagatacgtataattttgaatctccctataggcctatactataggtagatagaacttaagtgttctacctatcaagggctgacatttactcaaggtataataagaaatgagttcagcactgttttaaaatagtttttaagagcttcttaggtttgtagtttgcttgaagtagttttgtactgtgagctggaagcagttagtaattgcctgtgaattgaaaaattttggatcctctcatgttccttatttgatgttcccctcaagttatgagtggaaaagacactatagaatgtttaatggaccctacacaaataatggtgtattactatagtttcttttgtatctttctctctcataacataacatgagaggatccaaatctgaattgaattctatacctaaaccttttactcttgaatgcttctctctgctgattttgctctacatgtgattgatacctaagggagtcgagcttgagctgagaaagctagaaggagcagtagaggccatccatgagaatttgctctatcttaagggcaggtaattccaatcacatcaacatcttcccctgtaaattgtttattgcaaataatcttttaaaaacttttcatatgcttaatttttgttttttgagttatttgttcagggaagctgagatgaggactgtgagtgaaaaaacaaatggcagagtggcatggtttagcattatgtccttggctatgtgcattgcagtttctggtttgcaattgtggtatttgaagcggtacttccagaagaagaagcttatatagattagttaatttaattttattagtgatacagcaaacatataataacttaaaaagagtttttatgaacattatttacaagtgtagacagaaatttttgataccacaagtagagtttccagcatttcttttccacggatgattactacaatgaattgtcttgtatgattgggatatgaaaatccgcagataagagggaaagaattttagtgaatgattgggtaaaagtgggtcttcatacctgcttgttcttgttatagctaccatctttgtgttgggaactacagggtaggataaaaattaagttcattaaggaggattgttttttttatgttcaatcatggttgtgtttcaattgctaatgctgttgaggatgtaaaggtctgttaggttaattgctttgtgtttaggggaagcccttcacaaacacgcatcaaaacacgcatgtagtgtgcatttagttaaagtgtgtgttttatttttttgttttaattctcggtttatcaaggtaagggattttaattaattcagcattcggtcgaaaaataagcaaagttagtacctcttagaatgtgagtaaattagatgtaacggatgcacaaacatactattactcgttgaaaagttgttgaccacgttaaaaaaacaaacgtgagagattttggtttttttatgttaatctaaaactttgttgatcagatatttttaatacaaatacattagattttaactatattcaatcttcaaaagccataaatcgtctaattaaaggagaaaaacaaagtattgaaaacagaagacctgtttgttacttcgtaaaaataaagacctatttatttagtgaaaaatttaaaatagattaggaaatcagcattaaaataaattagcgaggagcgcaaataaataaaaggttacgctattagtttataaccgatctaaaaaaaagtttataactgatgtgtttgattttctttttaataaatatagttgttttcatttcttaaaaaagatggttagtattttatattaaaataattatttaaaataaaaatttgcatgatagttatttccgattacttgatgtccaactaccaaaatattcttttaaatcttatattcgacatataggcatagcataatacaacaatcaaaacaaagacgtgtgtgaatttagttaacattcttatttaataaaaaattatcatataagactttatttacttaaaacttattaaaatatgttaaagaagttattttaataaatttgttaaaataaaatgttttttttttaaaaannnnnnnnnnnnnnnnnnnnnnnnnnnnnatttattttcataaatgtgaatagattctacaaaatccttccaaacacatccatatccattgtcaagaagttcaatttgtatgagatgctgtccaatacaatttttttcattgtttgacacggattatgcgggcctgtttttttagttttatgctaatttctcacaccatgtgtatattttattttaatataaaagttatgatacaagttaatataaagatactttttaattacatttagtaattcaaaattaatttgatctaattttaaaataaatgaacactttatatgaaacaccaaaaaaaataaagcaggatttttaatttattcataattcatttaattgttcttattaaagataatgcgtagacaacttaaataatcaccataagctccttgcttattgcaatagtcatttttcacatcctttatgaaatgtaacagagatataaaaaattaagataaaaagaaaagaataaagagaacatgagaaatatgatgaataatataatagggaggaaagagaataaaggtgaatgaagcttaagaaattaaagttgtttatatttaactcgttacctgttggctgctactatatttttttttttggttcgaaaaaaaaatatatgcactcttcatgaaaacatttcacatcaacggttaactgttcttatcttccgtaattgaaaatggtgtaatgcaataatatataatcctttaaacacagaaattaaaaaaatcattaggatctttaaagcaaccgcaatattttggaatcatgatatggacgctaaatttattctgcaaatttactaaaacgggagtcaattttcaaatgaagttcaaaatcaatacaacaaaatcgtataccagagaaagatttaacaaatatttagctccaaagaaaaagtgtctgaaattaagtaagcatcaagaaataataatgagctttattctattcgaactatgttatggttcatatatctgaaccggcaaatctcgtcaaaaaaatcatcagcgctactatggcagctcttcatctcaagaatctttataaccattctcctaagacttttcccgtacttcagcaatgattcaagagtactcattttctgttcagcattaagaggtgacctcactgtgatcacaacctcctccaaaaacggaatcacgaatcctgaatccacctgtgaaatatcctcattagatgaattgaaatattaaataacaccttcaatcagaagggtagaattattatgaacttacatgtttgagactgttcttctggcatagagctgcaaacatagctccatgaatatcaaacttttgtagcttttgatgactgttgaagaagtcaacaaaatcaacctctggaaagggttgaagtgcatcataatccccagtgaattcaaccttcatatagagatgtttcaccttacttgccaatctcagcattttgcaaatggcatcccagcaccactggattcctctcatacacagatactccagagctaaaagatttccaaaatcaaccatatacactctccctgaaagcaaataaattgaaaggaaagtaagttaaacttaaaagaaagggacaaacatatatgctttgggtattattctctaataaaaactggagttttcatctcagcattaaagatcagtataggttatcaaaataaaactctaattctaaatcaaataaaatgctaaaaaatatatatatgaatatgtatctaagttttgtccaaaagacaaactctggagattacttgaaaacaaggacacaaaaagagatggacaatgtgattgacctacaatcccaaatattctatctcgaatacaccactcaaggaagagcccttgtgtttgaactgtcaatagaaggcaaggatcaaactctattgtctataccacttagtgtgtttgcttgtgcgtttgtccataatttcaagaataagcaacatgagtccatttttagtggcaccaaaccaaacacgcacttaacttgatccggctctcatacaatgtcatgaacaaacaatcccagaaacttaagtagaggcacaaatgattatctgacagacaacagtcaacaacaaatatataaacacaaaaaccactttaacgagttaactacctgcactgttggatatggaaagattcctcaaatgcttggtttcagggaccctaatccagctacagccttgtacctcaagggtctcaatttggggggaagtcaaagtgagagaacagttccccatcccataaaaatccagcttacactcctccaaacatggcaactcaatagagaccgacctaaccccttcacatgcaagcagcaacaacctggtgagaaccgggcatgagcgaagcaccacactcaacacagggtcctccaaccttgcaccgataatttcaaggttcttgaggttagggaacacatcccatttgggggaacgcaccagcaacacaccccacagtttcagagactccaaattcttagcagcaccaatatagtccaatttggaagggctttcatggaagccctgattgtcagcaaggttgtccattcggagctcaagttgaagaagagtttgccccgccagtgagagccatgatgcaaggccatctggggaaaaggggctatacacaattagctcctctaacttcaccactcttgacaccattcttttgatgatgttgtcagcaccctcagaagaagaagaaggggtgtcaaatgagctgcgaggaaaatagagggttctgatgtagggagtggagtccttccatctcctggaaacacaattgcaagatgacacgtctcgagcattggtgattcgggacaagatgcattggagaatgacatcagggatagaatccatagctgggagcaagaatgaagaatcaaatagataattgttgaagtgtacacagatttaacaccatctttcaaaatcaacaccaagcagtgatgaaaacaagcataacagcaaaagtcttatctcactaggtgagattgaccacatgaatcacaccatgttattcagcttggttacaacaacaacatcaacatagattattcttttatgcagttatgaaagaaaaaaaacacgaatttggtaagcacggaattggaagagtccgtaaatctgaaacaacaatctccctcaaaataaacatccagaaaacccaagacatggattaaacagtaattttaaccaagtttagctgtcggtaacagataagctaaacttgtataaagaatagtaatacccagatggaattgatacatatgtgcaataaaaaaactagatagaaatgaaaatggaaaggatgtgtgaggagagaatgaagggagtgagaattgacgaagcttacctaataatgaaaatggaaagatctggatgggatagccgaaatctctttctctctcttaattggagatagattaaagagagagaagaaggagcgggagttcgagaaagacatctttttatttcggtatttcgaattttgaaaaccataccctcacaatatttaaatattttctctgaataaaaattaaaaaaatacattatacaacaaaagctgctgcgcgtgcgtttcaatgtttcattcacattgagttgaaatccagaaataggatggtcataagtaagaatcaccgtgaattcaaaccgatctaaatagatttaaataatttggattgagtttatttatgtattttggttaaagtcgaattaaatccatctaaatcgttcatatacggattggatcacgaatttaaatttatatatttgttgactcgttaacctgatccgtgaactcataataaaatataaattttattatttatttatatatatatttaaaaactaaaaaaataatttgacaatcaaagtagatgtgatactatattattttctttaatacttttaataaaataataataattgaataagttggactattggggttaaagttttctttagtactttttataaaatattaataattgaataacttgggttgttagtagttaaagtaaacccgtcaaccaccttgatctcgtcactgcatattgaagccaactttctttccttctcttttgttattttattttagggttacaaagttttcctttcttacttgtcggcagacgcatggttttgatagagcaacaccacctcaccacaccaccgcacaacctcgttgccccaagtctgcaaatatgttgtccacaaataaaggtatatactttgtttcgcaatagattttcaagtatttttttcaaattaaatattaaatcaatatgatttgtactttatcattattttgtttcattattaagtactaatttatcatcatctaactcaaaagattgagaagctacagtgctttgcctaacacactcgcaagttgcacctttttccttcaccaacattactcttactaaaaaattaagtgccactgtcatttagattcttaaatatgaagtttttaacaattaaacatactagtattggaactgcaagtgttgggactactagtgttggaacttcttgatgtattactttcaggtatattgttatttgtttcacctttttatcatattttttttaccatgtttataatattaatgaatcatattttgttcatttgtttcactaaatctggttgcaccaaatctgattatagcaaagcttattgcaagaaattattttgtaagaaataattgtgatccaaactattatagtaaatcttgttgaagaatcttttgttttaatttatattattagtctattttagaatattatgttgatggtattaaatgaatcaattttactactttcatacatttgatttaattgtattggatatttgaaagaatcataatataaaatagtagttctaagaaaaaaaattaaatttaaatgggtaatgtgttggtccaaaccaaaccaaaccaaaccgttcatgaatgaattgagtttaaaaataaattgtggaaatcgaactaaaccaaccaaatttgcttggattaaatactaaatttaaccaaaaccgattcgaaccgtctaataaatacccgtagccaaaattatgttgtaacatagcttaacctaatttcatataaattttcatatacggtgaatagtgaattactggtatttaatgaataagttgagactttacactttttttccttcttgattttatttagtaagctttagattaatcttgaaagtcccggccataaaagattaatcttaaaagttacgaagtcaattagtaattaatacttaatgatttaagtagcaatgagttttgtttgtcttaaataaggtattgtatttgagtctttcaaatgaaaaataggtgtaggcctccttccttaagttatgctttacttatattttttttttcttaaagtttattttagctaaattactttttcggtctctttattgttaaaaattttaatatggtcttttaattgccaaaatatatgtaatgtaacttttttttcttaatgatgacgttagcctgattcagtagatcatagacacatcattcctaacttttaaatgttgctcaactgtgatgaccttgagtattatctcctcaatctccacattagcaatctccctattcaacccattcaagaatatcgcaccatataatagccgctctatcttcattcgcattggctccaatatggctatcttcctctctttatagtaatccccctccatgctatggttgcccacggtaagattttgcaatttttggtacaagtctcaacagtaatggttgggcacagaggcagatccagaaaaaaaaataaaagggggcaatagtggcggggttcgaaggcggcgcctccaaattttttttttgtgaagaaaattaaagaaacaaattattataacaaaggtgtaaaaaatgtaaaatttaaaaaagaaaaaattaacaaaattagcatgtgatgggtgctcaaaagtaacaagagtgtagccactgcattcataaaagttacaaacatacatatccacactcactcctttcttatttttcatcttttttattattctttttctatgcttttcaattttttctcttgtacaaatatttaaactatttttttattttactttattttattattatataaaaaaaattattcttgaaatttaaggggggcactgccccccaacttctaacctgcatccgcccatgattgggcacaaatctcctcctcatcaaggcattcattttatcccaatcttaattgtaagttttatatatctccttttgtatacaacaatttggtcctccaagaaactacataatcataaaaaaaactaaactattctaagtttgattttcttgacttgggaataattatgaaactcaaagatgaattcgatctttcttttccatttaaattttaagatatgtcataataatagacttaccttaaaacacgttagtatcttcatttttatgtccctcaagtttttcatcttccttattttcctttcttctattatgttcaaacttcctatgaagacttcccactaaattttctttattatcattatcatagtagtctttgttctcatctctaacaccaacttttcacctccaagaagtatgatgtgagtattcctcaagagttcaatccaaccaatcctcttgtcgaattactcttatcgcccctcaacatgcgcctagtttgagttcatactcaagattgtctcccaccatgttacttgaaaaaagaagttagcaagagagtatgacatcactacactcccttacgtgtttcactcaagcaaatagaattgctcaaaccacccatgtttacattcaagaatttagctttccctctaatgttcttaccactcttgtctttcctctctctttaattctcaaactaagttcatggagaaataatcaaaccaatacatatattaagaattcctgtagtgtccaaaatattaatttttgaaggttaagtacaaggatctaccacgaaatgtgcaaagtatccctaagaaagaaaagatgatccaatattgatacaatgaagtagataaatatacagaatttgaaaattctgaagaagaaaaatgcactcttatataagaattggtgatattgtagccggattgatgttcttgggatcgtcctataattggaattgtaagaaaaccttgatttaatgccaacgagaacaagagtcaaaccaaatgttatggaatactgtgactcgatgctctataatggacataaaatttggtatgacgcgcataatattggattaatgatccacatcctatgattaatccgaaattttggaaaatgaagatactacaatcaattatgaatggtctaaatgataagtttttttttagcatcacggagaaacttgataaactagaatagttcacaaataataaaacataatctctctcactttaatcaacaattaatcaatcatctattcatgaagaaagaattacaatatgtagaaaactagaaatcctagttttagatttgaattaaagactataagttaaatatgaaataaaattctaacaaagataaatcttatacaattaaatatgaacttctaacaaagcctgggatgctctttgttttactcttaaacaccattgctgataacgttttttttttactgtccttaatgggctcttgagatttgtagagaagaaggggcatatggaatgttcttgaacagtccttgagaaagatctcttgcattttcaaagtcaagtttacatcaggctttgttttgtcgttacttgttacatgcccattataattgaacctatagaatctgcatcagaaacatcagggtgagatcaagatgagatcaacaagtacaggaaagaatagtgagacatgaaacttttaaagtggaaatttggaaagaagtacacctaataattactcttaaacttctgcaatcgctatgatccagtttggaaggaagacagagatggtttctttccaacaaaatccatgaaaagaaagtgtcaaagtcatcaaagtatgagaagaaagaaactcccttttgaggaatttagaaagatcaaaatcactaaaaggaaagctcctgccaagttcagtacaagctttgtgataaggctttttttatttttccgtggacattgaatggaccacatatagagccatggcccaaggaaacaaatagatccccggcgtgtacagtttttgaatgctatgctttgctttgagattctatgttctaactggaaaagttcctttccaagataggcatcaccaagggaagacattagacaaggtttgtgctaatgaatcagggccagtcaatttttaaatattgtaatttgttagtttttttttttttttttttcatgtctattctgtgattctgcagcattcactatatatcgttgtgtatcccaagtggcaccattttcccataattttatcgaaacaattgaaaaaggaaaaacatatgtgagattgagaatcgatttttatctgaccaaccaagtgaattaaaacatatccctttatttacattaaaaaaacaaaacaaaacttttgcctcccttttctcaagggtaggacaaatcagtgaataaatagcgtcattgtaaatttgattctaatgaaacaagagaaaaacagaataaataaaaaaatgaaaggtttgtaagatcagtgaaaagtgcgtaaaggtgcagaacatatgtatgaattttaggatatcagtgtgacataagcgggcaaggtattttttgactgattaagcaaggaagcttgttcaggctgtcagtttacacaaactctcttcctcacgtattcttccattgtcctcttcaatcttactcataaataacacaacccatcaccacatcaaatgtcacataactaagagacagagtgagagcattagcagatggctaatccacacattgcactgctgaaactcacctccatcttcattgtaattgcctcaggtaattcattcttttaagctttatttgttgccaaccttagtgaagcaaaatgagcatttagagctgaacaaaacttagaaataattccttaaatgtttttagtgttattttccaatcggaattgaagttttatcaagtaacatatgatgacctttaatatataaaccattattatatgaacttttattatgtgaattatcgaaataaaactccaattctaataagagaataacaaaaagacacgttttgtcttttaaagtcctacatcttttgtttggtttgcataagtgaggctagccctatgtgtagagtttcttccattccaaacttccaattttcctatttggattaatatattaaaaatcaaatttcaactgaatatttttcttggttcatcactaacatagttggtaactagtaatcctctgccattgccatgcatactaaattctcatcatggaattttgaaccaaattttaagttcttaaaataaggagctccttcacttttgaaaaaacactttgcctgagttagatggaaatttacttttatgcttactaatttgacgtgttggttggcagcacctgagctgtgtggaagcagtaaaaatttcactatagtaaattactgcaaggagacaatatggcccggcataactcgcagtgacaaccacagtggcgacggcttcgcattgaaatcaggacaatcaactgtatatactgctcctgatggatggagtgggaggatatgggctagaacaggctgcaactttgacaatggcaatggaaagtgccaaacaggtggctgtggcagcagcataaattgtactggccctggaagccctccagcaacaagtgctgacttcacccttggtgaacctgatttctatgatgttagccttgtggatggcttcaacttgcctatagtagtgaaagctattaatggcaccgggaactgcagcactgttggctgtgatggagatttgaggcagaactgcccttcagagcttgcttctaagtacaatgacaaagttattgcttgccggagcgcgtgtgacgtcttcaatactgatgagtattgctgcagagggacttatggaaaccctgcaacatgtttggcttcaaactactccaaaattttcaaacaagtgtgccctgcagcatatagttttgcacttgatgacccaacaagtctaataacttgttcaaaagcagactttgttgtgatattctgtggatcaaggtgggtttggtctcttaatgggaagacatctataattgagtgcatcatagaattatacatgatatttctcatatcattcaccactgtttcttctgattattcttgttgaatgcaggaatcaaacagcatgttcctatcaagacaagcaggttgtatgtaatcgaccaaataaagcttataaagccataccgcagagctggtgggtcctaatgctcccattgacatacgtgttcaatttaaggatcacaccttagccaattatgcaattgaagaacttctctttgttacatttttttgttgttgaaattctctttgttacaatcattaattcattttaacaacaatggttttctttgagctaaacacaaacagagaagatgcttcttaatgtattttcttctacctaaacacttgagatgaggatttcctcaagcattaacgcatgatgtaaagaattttctgccttggaagttcaatttttttatctgtattgtttttttcaatcctagctaggccagacaatatcatctgagtgggacaactgaaccaatacaactacaaaatattttgtgactcgtgagtgattcatgtttacgttggttgatgagggcgtaacacaatcccctgtcaagaactggaaccaatacaaatggttacaattgatgataatttaatgttaatgttgcacattgcaagttttaggattaagcacatttcttgtaacaatatagaaaaagaagcaactaataacacgatctgtaacagaataatcaagtggacaattgaatgcggttggctacgccaatcagaaaatcttaaacctaacaaagaatctaaaaaaagttcaatttgcatactcatatggatgtatgtgaagctatttgtatacacaaaagaagcatactctagagttaagcttacggaagatacctttctctataaaccagccttcaaaagaaatggaatggaacatcacccatcttttctcatgggacgtgggacctgcaattgcaaagaaaagagagaaaaaggcacggggtggggaagcaacttaatgaaccaagatctgttagcacattttattgtcttccactggggtaacactttcaatatagagcatagttccatttataaccctgatttccttagaaagaatgaacaatgttcaatgttgtttccagcaatagggaagccacaaactgcaaaatgatcccaaaggttgttctctaaccgtacaaaattgctaaaactacctatctctggcattccatgcaagaagaatttaattcgaataagttaatcaatcattgattattatttgttactataataaaaactatcaacttttgtattaattactttaagagtggtattcaaagtgatttctaattgtaacaatataaaaaaaatcactcacaatatcaaaactacaccaatacaacaaagccaaaatataattttaaaagtttatgggagagtttatttaaacttgagaaaaataactttaaaataataattttttatataagtgtttttttaagaagtaaataagaagtataaaattgtttttttaagcagaagacaaacatactaaaaaattaaaaaatgttacttattttattaaataaacatttattttaataaataagtttaaagaaactgatcgtgtttctttacattttacataagctacgccagacaactgtatgtctgtatgtcactgtcttatgtatcgctattctaatttccttagtcctcagattcctttaagaaaacatcccgagattcttcactttcaaactactagctagggtagcatgctaaagctttcttttattcatttctctccataactgcaatacccatgacccatgtgatgtgaaggtcctcgagaagaaagggcaaaatgtagttaaatgaggacgatgattgcagaagataacagcaatcatccctgtgaataaacttctatatatatatatgtgtgtgtgattgctaatatttacactagttggtgtacccttgaagctcaatactaaatcttctttaccaaaaaaattattaattctttagtttttcaaaatttaatgtaaacatatttacatattttatcatttaatttaaaaaaaaatcttttttctcttattttttcacatttttctcttttctttcatctataagcctctctcatatcaaagttattcttctttttttattaaaattattattaattattcatcatcaccactacttaaactattgttataattatcatgattattgtaaccatcactaataataataacaataactacaattaatagtcatcacattgatagaagttgagtcataatgatagaatcaaaatgataaaaatataattgagatattttaagaattgataatttttatataatatttttttaagatttgatgattatatgatatatttattttaaataataaaatacgataatataatctaatgcttctgatgtaactactaaaaaaaagcacgcgactcatcctcttttgtttccgttcagcctcctacgcacaattgaaagaaaaaaaaaaaaaagaggctttgcggcagctattaacgaatggaatcggtaatttttaggacttgtgcctctattgaataaaaatcccttactagcagaaaatatgtaattgctgcgcaacaaggggtgtgaacaaaaaacccatattttgttgtcattatcccaatcaatcgccgaaataataaaaaagagggcactctcaaattggataaaaagaaatatcaaatgctgtgatttcacaattttgaaaatgattatatgaatgaaccactgctatacttgctgcaatgatcccaaaacatgtgcctcttaaatctaaaacccgctttgtgtgttgcgcatgaattacacaaatattgggatcaccatgtacggataaacccaaccctttcctattaatctttgtgcagcaattacacaaattcccagatcctcaaatactcataaaaggatggatgttcatcaatttgaataaaaaattatctaatattgcaatttcacaaattgagttatgattgaaaaaaaggatattgaagtgttatacgatgaatttattaaaatccatcattgttgttattattaactattttaataatataaatgccaagccaatttagttataccccagtaatggcaactggcaattgttaatagctgcttccctaattttctgcaagcacaggcacaggaggtaattgccgcaaagtcttattttgtgtgtgtgcgcaggaccaggaggctcaatgtgaaaccaaggaggaggactcacatggtttttttaagtagttacatggtaggcaggattggaaaaaaaattcaaatatataaaatcaattcatattctattctatttaattcactttaaatctatttaaatggtctaattttatatctatttttttattttaaatctaatccaattaattggatatagattggatatgaattggatatttgtatggatttttaaatccaatataatttttttgaacaatgacaattaggtttttttggtcaactttggtaggagctattttttggtcgacgtcgtttagagttattttagccgacgccaactgatgatgtttttgagctatcattggttaagactatttttcgattaatgtcagtaaggttttttcggccaatgttagttaggactattttttagcggatgtcatccaaagtttttttagccgacatcaatcgaagctattttttggtctacatcagctagagtttttctactgatgtctgtcaagattattttgtggtcaacgttagatagctttttggtagacatcagctagagtttttttttcgacgtcgattaggatttttttggctgacattagctaaaaacatcatcgatcgacacggcaaaaaaaaacctagctgacgtagaccaaaatattctctcaattgacgtcgattgaaaaatcatggttaatgtaaaaaaaaatccttagccaacggcaactaaaagaaatagtcatggctgatgttggccaacaaactctagctgatgccaatagaaaatagtttcaactagcatcagtacaaaaacctagtcaacgtcgatcaaaaaatagttctgactgatgttgacaaaaaaatatcaacaactaacatcataaaaaaaccttaccaatgtccgccatagaaatcctaagcaacgtcgtccaaaaactagtcacagtcgatgcttattgaaaaacccttagtcgatgtcggccaaaaaatattactggtcgacattgactaaaaatcataatcaacctcaaccaaaaaataatctaactaagatcaatccaaaacatccttgaccgatgtcgatcgaaaatgcactaatcgatgtcaaaccaaaaatagtcctaactaaagttggtataaaaatgtctgggtcgatgtcagccaaaattgtcctagttaggtaggccgaaaatatcctaatcaagatcaaccgaaaatagttttgactaaggttagttgaaaatagttcttaaatggacatgtactaagtttttattttttagcgtttaattactaaaatttgtaaaaaaaaatctttataacatttaagtgaatataaattaaacatgaccaaatccatatccaattaaatagattggatgttgaattcaaattattttttttttaaaaaatatagatataaattttagattcaatccatttaagtagatataaattgaatatgaattaaaatctttaaaatctaatccatactcatccttagtcgtaaccattaaattatattagaatcaacgtctaataattaatgtaacacttttaatagtacattaatatattttgttccatatatatatatattaaaaatgtaagttataacaattaacttcttcaaattatagtcaatgagatttaattcaattagttgaaaatgacgtttgaattattataaattttctaatattatttttgattcctatgaatatttttttctttcaaattgcattaatctaccaaacatgctaatattgttatcccaccaactttgattaatagtatacctaatcctcacattcccaaatatttctctctagctttccaaaggctcaaactctaattaatgatcttttgcacaagtctctttagctttcatataccttttatcttcctgtgatatatagtaagaacacaatgagatagtttttttaagcctcttgttaaggataaaacttaatgtattgggaagaattttacttaggcagatgggacaggagcgatgcagttttgaagtagctagcaatattgaattaatgctactagaggggtattaatttgcatactggattggatcgtttaaagaaaaaaaatcattttattcaatcaatttttaatttcttttaatttaccaattaattatttttatttataatttaaatgtgatctaactcgattcaaatatgaaacggttttgaataaatcaatattcaattgtataatgatcataaaaaannnnnnnnnnnnnnnnnnnnnnnnnnnnnnnnnnnnnnnnnnnnnnnnnnnnnnnnnnnnnnnnnnnnnnnnntcattaaatttaatggatgtagttgagtaagagtttgaaagagaaggaatggagtttgatctccatataatacacttttagagaggggatgatgagctaatatatttataaaaatataaaaaattacaccacttaataaatatatttatgcaccttgattaaaatagttaataaaacattatctttaattaaatacatttttcataaaaaagtataatttatgcgataattttataaatataaaagaaacaaaaaataaacatgagtaatataaaaaaattaaaaataaaaacatatgtacatgtataagttttgtttggctggattaaattggattgattttcaaaaatcaaattcaaactgatccaataaaaaaatattttttattttgttttccaaatttttggattgattttttcaattttaattggactgaatatcagattattaatttttttacccctatatacttaaaattggattaattttttattaatgaaatacatcaaaaaattttatttaacacttcattgatatacatcaaaattaatgaaatatatatttaaatattatatatatatntttacccctatatacttaaaattggattaattttttattatcagatagattatatttacaaaatataattaaatcaaaattatttaacacttcattgatatacatcaaaattaatgaaatatatatttaaatattatatatatttaaaaataataattatttacttatattctttatttcttttagttatctaaattacaaaattcgacacaggtaatctttacaattgtgctagattacttgcagatgtgggttcatacttgaaaatcttgttatgcttttaatgaataaaaagattagacgcaaaggcatatgattggtaagaatgggatttttttttaataacaagaatgagaatgtacatgttttacactccataaaagtgtgtagtgattatgatagaaaatgattatttgatatttataaagtaaggaaaaaacaaacttctaataattaaattatggaacagttaatgatcgatattcaaagtaatcttttaaaaatgtgcatgttctttccatgtttattttatataccaaccgctgttttgcttattatgtctagagacattcagttttcaaattaactgaccataatatcgatcattcaagcaagccattaaattgttgtaaatatatagttttcttataggaatatgcacaataaacgtcaaaggttgaactgataaacagtgagttgacaaattaaataattagaaactgagtgggagacatggccagcccattttgcatccacctttagaagcaagtcaaaaagcatagtgaaatcacaatgcaagcaaatagcaacttaacaaccatggtcaaagaaagcctcactatctccaaccacgtgcaagataattagcatcaaagagttgcactctaagggcacaaaagtctttattgcaaataagaagcggatatcattgtcatatacgtacaagccctaaacatatatatatatatatatatatatatatatatatatatatatatatatatgcaaacttctacagacaaaacagagggattgaaagtctttgaaaacaacagaagctagcccccaaggggccaaatattccaataactccatgcacgcttatgcacctttctacaaaagccactcttatttcttcctttagtcaaaacctacccataatctcttcttcaaatctcagccagatcgaatttccaaatttccttatgctttctctttgctctatattgcctctagggtttctcagaggccttattccatagccattttggcattctgtccacctccattaatattaaatgggttgttttagaatcaccccaaaatggtggcagttggaggtggccagtaggccaaacgggctctgtgaatctgtctccgagaaaccccttgtgggctcaattccctttcataagtttcttctcaataattatcttcttccacaccatgcacatgttaattgagttatacatttacgtttatctttaattttggtctgagtctaattggtttttattttgcaggttcctacttatcagaaacacgtcccttttctttgatgatgaaaatactacgtatactaaaggaggcaagaatacttgatgaaaataactatgctttgaaggtacttagttattttattttatttttcctagtaaagaggatcttgagggtggaagtcaatattaactctgacgcgcaacttattgatcatatacctattattttattttgctagcgttaacttaagtcaacctccaaacttgaacttgaaacgtgaataggtaaatacttttactatttaactttcctttttgttagtgtcctaaacttttgtcttggctatgatggtaatgttgcacctttttacaagtctaattaaacctaaagtgttgtggataactgcatgcgtttccacttgttcaaaatccattggctagcagaaatattttatgacccattgtagcggttgcagcattggattcctagaagcattatataattaatttagactttgcaatggtgtctgaggccaccattatgagttgtagacttgtagtgttttcaaatggaaacacaattcctaccctaacttatccacaaaatgcactcgcacgaccatgtatctaacagcaacacccaccaccaccaaccaaggatttttcatgagatggaaaataaaaattatttgtccccgcaatgtttgtgaataaatattagctaataattaattactttgtaaggaatatacatctttcaatgacaaaatattattaatttatttctttaccatataaaaattaatttacatttaattatttaatatgttaaaattaatttattaatatatttttatattttaaaataattttaaattactttaacaaatacatcttaaattaaatttgttttaatttatttatgatataaaccacaggattatttacgggatacaatcttattcaaaattattatgaatgataatgctcgctatactaaaattagtttaaattcaattagttaacggaagatatcatattctattaatatttgtctaatactattagcaagagaaatagtatggaaaattttcttagactaacggtagttggaaacgaatctaagagtgtattaaagggaaggccaatttttttttacataattatttaaatatttttaataaataattattataaataacaaatttttaaaaaattattattattaattttatggataaaattggagaataaactactgcttttttttttagcaaatatcaactccaaaacctattttttatattttattaatattttaattttaattttaattttttctcatatttacacaaaggatctaaagaggggtgagggggctgggagccaaggcttgtccttgcccttccttggatccatccctcacaccaaccacatgtcatgaacaaaattaatattaaatcaaataagttaagagacattcacatatctttgatgtagtaaaaaaaattataaatatataataaatataatgaaattaatttattaaacattttttagcaacataattttaaattactcattgaataacatcataaattaaattagttttaatattttataaaaaaaaatcacaaatatcattcaggaatataattcttaatttatttccttctgttgtaatagtgagagttatattcctgaattaaattaacccatcattgcttttaatagtactagtgagggttattttctataagagaaggaggttaacctcaaatatagaccttaattaattccttttactcgtatatggtactgctacctattaattgaatatcttttcagtgtaatctttagtgcgggatcttgatttattccattctgttgttatcctctaagtaggggtcattgcttttaatagtaataatagtgatagtgaagggtattcttttattaagggaagggggaagtgttggtacctattaattgaatattcccttcccgaagattgtggaacttctgatttcaatgttcaaaggctcatttaaattttcgccaacaatataaagaaaaataaaaatcaacgttaattatttatatatgaatggccattgagaaatttaggctttatttggcatattcaattgaaaaattaactaaaaattgaaaaggtgaaagttgaaaattgaaagtaataattgggtgaattatacgtaccgtaagtgtttagtatatatgtatattgtaagtcatttatactgctattctaatattgtcatggatatataatcccattaattatgtttgcttagtaaaataatatttggtgtatagatcgaacctattgcccaatgacttcgccgttcacccttgaggtccgcaacaaataattttataagaataatttggagtttggacaactttgatgttagtttgagtcatggaagtgaaattagaccttgttttatatttttttttaaagaaaactaatcagcctaaaatattaaaaaccactcattcaaatctatgttttgtttggtttgatttatcaacaaaattgatccttagtaataaaaataagtttccatttgaataaactttttttataagtatttataaaaaggaaaaaaaaattaagtaaattttttctataagttaaaatcagcgtaaggatataggctatttataaaaactctccatcttcaaaagctatttttttaatcttcctttcagaactcaactcttctttttagttgtttctgaagttggttatgtaaacgtcatttgaaaataactacggccaaataacttattggcgagtaaagtacagtaaaaatagacactcttctggacatttttttaaagacagattatattttgataatatttttttaaaaaaatatctaatcaataactctcatcatattacgttacattatcaattaaaacaattaattatctttctttctatctcaaagctgtctataaaacattttcttttttaaataagctaagattatagatattgttgttttccccaccattggccttattatataagaacacaaatccgtgtagagctgtttgcttgactggctttctgttggaaaaaagaaaattttggtcttttgtgaacagtaatgcaccccacagacaatcttttggaattttagtcatgtctaggaaatgctgaatgtgtattttacaattgccaatccgcataaaccattgaattgctcttatgtaacagaaggcaaatgcatgctacatttattttgaagatactttgccttggataatcttttgtaaacaatgggagggaggaatctattagtgtcctttggagctgacacatatcagtcaccatatatcatcttatgatgcaacaattaacgaatcagtgttcaggatttcaaagcggaaataaacagttttaatttctcaatagtgtagctacctctataatgtaatgcaactaacataatgattaaaattttacgaaccctacctagatctttgttcctatgcatgactttaaatttcatataatttaattttgttctggcgggactaacttcagctttcatgcattttgttaggcctgaaagaaattaatggcagcaagttccttatgttaaagtttgaaatgattacttgattatgcaattgccaatttgttctgaaagatattataaattggtcccgcactcggcaggttcacaagttttatattaggtagctagcaatttgcaaatgacctcaaattaaagtccagattcagcttatctttaattagagtcatggatttccttatatatatatatatgtatatatttgatttcatcatttattcttaagaaatgttgaggaatgtctgtttattaattgtcttgcaaagtaggaaaaaaaaatgctcccataatttttctccgttccaaacatcacattaatttattgttacaattcaattacctatgattttgtctcatattggttgttggctggctgtgtttagatttaagaccactttgatttatgttacgcgcgatttcattacggatggactacaactttttgtttgtgtttaattgagtatttctggattcacaaaaaaaaaatagtatttattgatttttttttaatactttttatcatacgagtctaattaattcttgtctaatatttaaatccaatcacacatctcatttaatccttatgtctagctaattaaaaagaatttaatttctatacattattagcaaaaaatattttacattatcaactaattaaaaattatgataaatataatttttttaaataattattataaaagtcaacttaacaaaaatgtcaattattaattgaataatattataaaaaatattttacacaattaatacaaagactgtgttcttttcaaaaatgatatatgattcaaaaacgtttatacttttaaatttcttttttaccatattataagtgcgaattgattattactaattttaaattaagttcctgttgaatctgaacgggaggaccaggatattcacattggccatcgcaagggagtattgaagacattaagaaattattcaagcattgcaagagcatctctatggaattgaaaggcaaggcttcctatagagttcagccacttcaaatgggagcatctctagagaattgaatgagcttgcacaaaaaaagagtatattaagcaaaataaggggagtactgtataattaaaaagagaaatcgtaaatagcaattaccttctttatttgccacataattatttggtcactttgaataatctttagaaataagccaataaatcttgtgggttttctgaataataataactagatcgattttggggctttttttcttcttttccctctaattcgttgtcattctcgttcacatcggtgtatgtattagtcctatatatactatacgatacggtatattaagttgagtttagtttagttagtaatttacaagttgagctaatataataatcatgtacagccaattaaggtcttgggtgattttcgcataacgttaaggtgattaatattggaatgtaggtttaggtattttttttttctttgttgaaagatattttgtttgttgatttttaattgttttttaannnnnnnnnnnnnnnnnnnnnnnnnnnnnnnnnnnnnnnnnnnnnnnnnnnnnnnnnnnnnnnnnnnnnnnnnnnnnnnnnnnnnnnnnnnnnnnnnnnnnnnnnnnnnnnnnnnnnnnnnnnnnnnnnnnnnnaaaaaaaaggagaaataatcacttgttcctgaaaatgtaagaatgtgataatttagtcctaaactatgtatgcatgtttggataatttgctgaatgattttagctccaaaattcactgtggagaattcaaacaaacaaagagttgttttttccataaactttttaaaaaatgatttctgaataatgtattgcgtatccaaatatatgctatatagtattgaaaattgaattcactaacaagttaggacaatgaatcgtaagtaatatataatttccacaaaagactgaataaaatatacttttagtcatgtgccatgttctttcttttatatttaaaaaagaaatgttatttctataataattcatataacaagttgtaccttaacattttttgtgtttatgtctctcatacacattaattaatacatgtcataatgatgcaggaagataaccacaaattaatgttgtgcaaattattgtataaattttcttaggtatatcacatctcaaatttaaatggctaaaatatatttttggttctcgtattttttataattaataatagttcatctattttaaaattgaaaaatttagtctttttattttaaaaaaattagtaattttgatcccaccatccaaatatagtcgttaacccttaagaattaacgttaacctataccgactcgtgttacgattgaggaaattacccgtcaaccctttcacaccatccttatcagttctcactgcacattagtcattacccttctcaaaccttgataacacgactgctatatccaaacatatctccaacgaagtcattaccatcattgttatcatctccaatgaaggtgattggtctgtaccctagttatcttcctccataaaagcaccatgagcacccctgtccctcaacctcttatttatttatcaaccctttattccaccccttcctctcccttcaccaagcaccatggcactaccagagacaatacacaaaaggctatttgcatttgtgtaagcatcatcgccttctttggctcatgcttccatatcggtattttggatcccaatgatatttaacaaaccttctctaggattcacaacatttcaatttattgttgaggtctagaatcttaatcaacacaagatgatttgatttattaataagcttttatgctaactcgattgatatgtatgttttgcttgaattagatggagtgtttaataggtggaacttttctacctgcttcaactcaacaccaactttgtgttagtgaaaattagatgagagctcagaaaatgcttcactttttttaatctttgaacaattttcttttcctttgatatttgtagatcatagttggtaattgcaaaaagatgtaattaattaaacaacttaaagtgaattagaagaaaaaaaaataataaaagcaagcaattagcacactagatagaagatgctagatctgttggagagattcaatcgataaaggtggagataggttgttgagaaagtgattggttttgtctacttctaattgagttaatgtttgcccatgaaacagtcaatgttataaaactaatagtcaatgtctaatttaaacagtgagatcaaaattactaatttttttaaataccaactaaatgtctcaattttaaattagaagaactaaaattattaattgtaaaaaatagggggaccaaaaatacattttagccaatttaaaattataaaacaatagttaaacttctctaactcccaagcaaaggcccatagatgaaaataaagttacaaaccatagatcaaatttgtaattctggctcattgtgcctcaccttcagcctagatttcttgtttcttacactaatcttttgaaccttgtttttaaaatgaataaaaaataaaagaaaatatccaaagatactaaacaagtgcatcactaaccaagggctattgcatcctatattctcattattgtattctgcacctcctattacattctgaaaagtccatttaatggacttttcagaatattaataaaaaataaaaaatacaataatggaagtgcaagaatcaaatatcactccaaagcattttccttgtggtcaacccatattgttaaaggttcaaccatttgcataaaaaagaatatttcttaatgcacatcattatatactttggtgcaccccaagtgcatgtccaaagcaaataataagacttgttaaataattacccataaaaaaatgacgactcaaggccaattgtaatggggatggttggagagtgctggggcactactgcctcaaaaatgatgactcaaggccatggattgggccagagtcataatgcttttgatttagggacaaaaatattacagcccggccctatagtcataatgcttttaattcagttatcattaaagttagatatacgaactttaattcacaacttgattgtataaatttgaaaaattgtgggtttgagtctaaaaaacagtgtttcatttaattgagagtttatgtgagttgatttatataacttttaagttaaatgagttgaattggtgggcttgttgggttaaattattagcccacaaaagtttaaaatatatatttcatttgaatttaattataagtaatattaattgtaattaaaactaattaataaaattatttaatatcatttaactttactaatcatattaaaaaaaataattatttcctaaagtattctttattaaaacttgatataaagaagaattgtttttttttttattgaaaatagaatctcaattaattaaataatattttttannnnnnnnnngcttgttgggttaaattattagcccacaaaagtttaaaatatatatttcatttgaatttaattgtaagtaatattaattgtaattacactaattaataaaattatttaatatcatttaactctactaatcatatttaaaaaataattatttcctaaaacattctttattaaaacttgatataaagaagaattattttttattgaaaatagaatctcaattaattaaataatattttttagatgatatcattaagtagtatgaaagtagtcaaaatttatttatatttaagtataatctttttatgttgcttataattaagactatagtagtattttttgaaatatttttactatcattttaatatataaaaacaaagaaaatataagtaaaaggtttatcttttttatttatttataaagaaacgtatctcgtacatcattctcctatatcatttaacatgaaacggtcagaattcttttttcaagctattttttttatcaattaagtttaattnnnnnnnnnnnnnnnnnnnnnnnnnnnnnnnnnnnnnnnnnnnnnnnnnnnnnnnnnnnnnnnnnnnnnnnnnnnnnnnnnnnnnnnnnnnnnnnnnnnnnnnnnnnnnnnnnnnnnnnnnnnnnnnnnnnnnnnnnnnnnnnnnnnnnnnnnnnnnnnnnnnnnnnnnnnnnnnnnnnnnnnnnnnnnnnnnnnnnnnnnnnnnnnnnnnnnnnnnnnnnnnnnnnnnnnnnnnnnnnnnnnnnnnnnnnnnnnnnnnnnnnnnnnnnnnnnnnnnnnnnnnnnnnnnnnnnnnnnnnnnnnnnnnnnnnnnnnnnnnnnnnnnnnnnnnnnnnnnnnnnnnnnnnnnnnnnnnnnnnnnnnnnnnnnnnnnnnnnnnnnnnnnnnnnnnnnnnnnnnnnnnnnnnnnnnnnnnnnnnnnnnnnnnnnnnnnnnnnnnnnnnnnnnnnnnnnnnnnnntgaatgctagtgacactctctttgtgattgtttgaaaatttttaaaattatcaattttggtagatatcatctaaatcaagagagacaaacattgaatgataagtgagacccaccaaaattgatattttttttaacaaattttagccaatcataaggaaagtgttaaaaagagagtattagaaaaagtgtgactaacatttatctattaattaataacaaatttttatatatgataagttttaatttttataataattatatatgatattatgattatttttacataagacatatatgacacttaaacatcaataatggttgacataagtagtaatgacttatgtttcttaatcaagtggtctaggattcaaatctttattgattcttaaatatgaattttttttgtaaaaaatactcatcttattaataaattttgttagaagatattattcatcttatgtatactcacattttcaaatgaagattagttactacttttaatggagataagtgagaaaaaaattatataacacttatactctctatctaatgtatctaagaaaaatgatataattatataatcgttaaaatattaccaaataattcaataattatatttatttaagtatatgaaaatgaaagtggcctaagcaagatttagtttgtattttactaaaagttataagttctgaagcaaagacctacactttagagtagagagatagatatcacatactgccgacatttattcttaatagataagtgacatttatagaatagcacacatacacacctatatctatccgcttatttaaaggagctaacttccccctaaagggtgcactttttgcattacaatacaatatgtatgagtagagagaagttaacaagttaacttcaggcgccagcgttgacggcaattttcatcccagactcgcaatgaccaacataattgcagatgaagtagttcagtcccttgccaagtttgatctgatccgcccctgactgatacactttggctcctcttggagtcgtgcagctatcaaatccagccttgttcacgaccaccacattgtgagccccagggctatacttaaaagctgcaccccatacacaaaaatgtatcgatttcatgctttcaaaagttagctagataaaagaattatcaaaaaggaaacttcttccatgtgttatatactgtatggaagacattgtaacaagctcttaacatatttaagagacttgtattaatttcacctaataatataaattaagcaacacactcttcacttgtttatatgtgacttttaattattataaaaaatttattacactcatgtaatcaatttagtcacacgtgacaaactattaaatgctatgtcacatcagtatttatcacgtcagttaaaattaatattgttcatatgtaatctgacaaaaaagatcagtttagtctaataaaaatactttaataaccaaaataattttttttaacttaacaagttaaattaaaacaaaatatattttagctatttattaattagaatcagatttgaggtataaatttctttaaaacaaatgaggtattaatttgtcggtggttaaaaatgaaaaattaaattgagaaattaaagtagttattaaaagaacttaaggctttgtttgagagttaggaggagagaaaaaggaaagagattcaaggggaaaggaggagaaggaaaggaggagaaggaaagggaagaaaataagggaagtttctttctccttgtttgagagttaaaaatatattaagagaggaaaatagaaagttaataagaaatttttacaatttttttcttatttaaaaaattaatacattatatattttacactgattaggatatgatagtaattttattaacactgactggtatagtaataattttagttacttttccttctaaaaattcctcgaataaggggaacaataattttaaagctttggaagatttcagaggagttttaaaaatcctcaaatcctttctctcaaaaattaaaactcacaaacaaagaaatctctctacataaacttttttcttcccttctttcctctccaaaatctctctctcaaaagaaagactaagaggaatttatctaatagtaaatcttatacagatagaataattggaactgaccaagtgtgtcattagcacgaaaacgttttcctttgggccaggaaacagtgttaaaggtccaaccagcagaatctccaactgtgtaggtggcagcacgagccatctcagagtgaagcagcaagaagcaaagtagtagaactactgcactgcctcttcccagagccatttccttcagttgagtttaactaagttaaagaaggagatttgctttggaggtgagtgcattcggtgactaagaaccaagcttttataatggaggagtcagggaaggcccacacatttaatgggtggttggttattaattactaaataccatggctggactcgttgtccgagaaattgtgaccaagccacatgcgtctgccaattaagggtcattactttttatctatagacttacttcttttactaaaatatcagtatgaaatatttattggtataaataataattagtttttatttagaataataagtgtataaaaaatatatatttttctattaaatataatttattttatattcatgtgcatgatttaaattagattttaattaaaaataaattattatcatttatgttaattaatattagtctttataaactatgaatactctaaaaaagataattttatttaaactaaaatgacattataagtaataaatttatttataaataatgtaatttttaattccttattaatgtatatgatttttagaattatcatgatgaatgtaaagtatttactaattttattaacaaataatttttatggaagaatttaactagttattttataaatttttctttttaaacacattattttttatttatagaacttaaacatgtgagaccttatttaaaaaattaattccaattttactcgaatcaataatcgaatcaataatatgtaatgaaaatgagagaagaagaaaattgaaatttaattggaaagcactttctgcccaatcaaacaaagaaaacaaatataattattcatattttcttttctttcattttcatactttccctaatgaaccatgcatcttatgtggaggattaaaaattaaatatgccaatttattaactgttttggagcaaaatctgaataaatattttataggcatcaaacacaaaatcatgatatatttataataaaagaacatatttaaccctgaaacatctaataaaccttttttttttcattttaatgtttcacaacgacaaaataaacaaatcttaagttcagtatgtcaagaattatattgttgttttctcattaaaattggagtttgattttggtaatcaccatcaacctttaatactatcttttattgtatgcctattaaaaaaaactatcttaaatatattgtatgatttatcgaggtaaagttctatttctaacagattttccatcataaaagaaccaggatcatatcacaaagggcagaaactgatgaagtctcctacacgatgcgtagtagtactggatgtacgtgttttccgccttaattcaagttgttaaggattcttcataacttgtcacttgtgctgtaatttgacattaaatattataatttgtaacataattgataacataattgatagataattttatctcttaaatatatgatcatgagtttgattcctgttacatgtacatacaacaaatatatgctgggataactcattcttttaaatgaatatcagcatcttaaaagaattgatttttagcttttgactgaaaaatatcttattcatctaatttcttatattaaatgtcacatataaatatatatatatatatatatatagagagagagagagagagagagagagagagaggttaaagttaaactccaccatacaaagttccaaattgtaagaaagtggattgacttcgttttgttttaaacttatatcttttggcatgccatgaaattttgagtgctgcgatgcctaacgcatttcctactaagacagaataccaaacattttgtgccaacctcccaccatgttcatcttcccacccttttcctttaaaatgttctaccattaatcaatgataattgaccacgaccaaattcttgctacttgttgcaatttacagtccataatttcggcggaatttcatgtcacatttactactctgggaccaaaagacctcaagaaaaaataaagaagaaattaaagtctcaagtttcttaggaaaacgataagcataatatggcccatggaacggggagacgaattttacaatggttcagttcaatcctgcaaaaattcaacaacttacaaccatttaaaaaaaatattatttatatctttgagtgaattttacccaaacgatagatctaatggaaggtgagagaagtacacacgcacggcagtttaggtgctgattgtatgaggcttaaagtttataattgtttgtgattgttcaaaacacgatctgtgcttgttttgcaatctcgatttttgtttttttcattcgaattagtcttagatttcagggtaatgtatagaaaggatgtcagtatatatttttcaaaaattaaaaggagttagtataggggtagaaaaaagtaattaaggaatgtttgtgtaatttcatgaaatctcaatgataattagtataatttactaaaatctgtgttacagcctttttctttaaaaaaaatgaagatagttcttcctattgtgctgaattgaatttattattcgggatgtttatgttgggtgtttcataagatattttgttttgcattctattggctgtgttaatacacacattgctggttgcactaattgttttgcttgaattttttacttggttaagagctagcggctggaaaatcagcagctgtaagagtcacaaatgtattttaatattttgaatctcacgatcttggatcaggctaattgtaaccgtgagatctgaattgatatgtaattggtaaataaacaagtttaagcttttcaaatttctcaaacaataaattaagaatagtatccatactgtttcatcaatgaaatctgaaacaccccaaacccatttttcatttaaagtatctacttattcaccattagctagagtctagagagcactgtccatgccatgattcttgatagaattaggatttttcctttggacaatgcttggccaaattcattcaagaatctccccttctccttttagttttaagaaatgcagcattagagagtatataatccataaagcattagagttatgtactagctcgttaggcttctttagcctaaaaggccgcatttatggggatatagtcattgaaacccattcctccctttcgtttgctattagtttaacactcataataagaaatgggctgcatgttcaaactcaatccacatctcacaagaataggcaattgctatatacactctccttgtttgcttattcaattttttggaaaacaaattgaaaaaagaaatgaataaacaaagaagggaagtggatatagcaactgcctaaaaatattgtaaccctcaactatttggtacatttggataaaataaataaataaaatgctacatggaattgatatgaaataagatcaaattcaattcaagtgatataccttcgtgatgaaaaaagatggattataaatttcatatagaatattcatttttttaataaattattaatgaaacgttattgccaaaatattaatatgtgagaaaaaaattgccaggtgtacaaatgttttaaataaaatacttcgtatatatttatgaaaacttcttgatataattacattctatctcactattttatcttttataatatttaaaatatttttaacattattattctgtattttttttacaaaaatatttataattaagttagctaaaggataaannnnnnnnnnnnnnnnnnnnnnnnnnnnnnnnnnnnnnnnnnnnnnnnnnnnnnnnnnnnnnnnnnnnnnnnnnnnnnnnnnnnnnnnnnnnnnnnnnnnnnnnnnnnnnnnnnnnnnnnnnnnnnnnnnnnnnnnnnnnnnnnnnnnnnnnnnnnnnnnnnnnnnnnnnnnnnnnnnnnnnnnnnnnnnnnnnnnnnnnnnnnnnnnnnnnnnnnnnnnnnnnnnnnnnnnnnnnnnnnnnnnnnnnnnnnnnnnnnnnnnnnnnnnnnnnnnnnnnnnnnnnnnnnnnnnnnnnnnnnnnnnnnnnnnnnnnnnnnnnnnnnnnnnnnnnnnnnnnnnnnnnnnnnnnnnnnnnnnnnnnnnnnnnnnnnnnnnnnnnnnnnnnnnnnnnnnnnnnnnnnnnnnnnnnnnnnnnnnnnnnnnnnnnnnnnnnnnnnnnnnnnnnttcttttttacgaagacaaaaggagaaatttaaagaatataggaactgtctttcaaaaatgatagagtcaccatcataccactaacaagatcaatagcgagtgttcatttatgaaataaagtataggtattaacctatacataatttataaatcatcattttaaagtgcatcacgtgatgtggatacgtaagtaattttaaatataatggaaaatgattacaatataattacatattttttagaattttattatgtttatataaacgtatgctcatttttaannnnnnnnnntattcgatgcaagtttatattaattttatatattgtattatttgtcttgtttataatacttagcattttatctacgcttctatagttgctaatgatactgtagatacacgtttaatattttctgtgggcacctaattggttgcaaacaaatatattactgacaatttttatttgttcaagaattctttaattttaaatttttaactgacttatgtgtagggtgaaggggatttttttttcgtttccaaaacctttatggaatatcacaaattatgatttatgataaacaacccatgttcttgagaattactgtgccatgtacggaaagacatgtattatgaatctgaaacaaatagacagatattagtacttcggacatatttgttcattttaaatatggacacgatattaaaaatcatattaatatgtcttttatttaattcaaaataatatatactaattaagaatatatcatgtatatgtgtttttcttacaaattattattattattattagcatttggattaatatacaaagtgagtcataccaagaaatttgtttaattagttgaacatgtatttaaattattgtccattcaattgttgcaccttaacacatttcgggaagaacataggtttgagtggcatttcaccttaaccacgactcattcgattcttcaacatcagttcgaccgttcggaccttcacttagtttcatccaaacttcaggtcataaatagatcatccaggttcgaatccatatacagtgacaattatcctatgaagactcactttcgctatggctccgatgatttctcttgaccaaaccactgcctatgagtcatcaactcattcttcgacgtcgataaaaaaaccctaaaaactattgcatctctggaaaattatgtctataaaactaagatacttcatgttggtgcaaattagtggcgatgactctacaacaataacgaaatatttaagaaaaaatcattgatgatgataatccttaagatttaatttattcctaccaatctctataaataaagattaattggatgcaataaggtttactcgcaattccctccaggattcaatatagttccttgatatgatttgcaaattcaaatcaagcatcacatcaatggtaatttacaaaataatagtttattttattctctttatgcataaaggaagaaagaaattgatttgaatgatatggatttgttctttatttatgagaaaattagtgatttttcatttatttcggactttatttattttccatttattccacaaggggccacgatggttttttatggaatcgcgggtctctttagtagtttttatttagggttgattattttttgggatattctcattgtttatctttgtgcacatttatggacaattttatgtttttgatgaagggatgtaaccttttgcagagattcatctcatgagtcgtatgttttaacttttagtgaaaaatcacatctaataacttttgataaaaagaaacatattttaatgaaataagacaattttttatgaaaggatacaacctttcatactcgtatcttttcatgagttgtcatatctttttatgaaaaaatatacatattcataaaagaatataactttacttgcatatacccttttgtaaatagacacatattttcattaaatgatacaaccttttattcatttcgaatatctctcacactttaaaacaatcatgtatatataaatatataggctcatgtgttgcccttaagaagaatacgcattttacagaatttaatctgtccaaaacatcttcccaattgtttgagtcagtcaccattgtggcgtaatcaactatggatgaagttgttatcgtgatacctctcctcccaaaaactgacccctcgtatcttctgtgttcttgaacatgtatcaagcacaagattacaagaaaacaattaagcatcatggaaagggagtaacaattggactaataaagttttctttatctcgtacaaaattctgcacaatatacccatctccaaattaaacgagcttgatgaaaaaagaaaacaatccaaagccgattcattctctcataataattttctatccattattgatgataagtaatatatagcttacaaaatacaacttgattcaaaggaagactagtagtatgaattaaaaataattaattttttttattaatcttgatgatttgtcctatatttattatatctaggaccggagcctggaggtagaattattttgtcatggtccctccaaagccttttctttttccttgttatataacttttttccttgttatataactgtttttaacctcatgtgataaaaatgctatttgaaggtataattttttaatcgtttaatttctaatacaatataactttatatataaaattagtaaatgccatataaactttatcaacaaaagcttaaatgtcgtttgcttagggaaattgttaattatactntcatgcatatgagctgaatcaattaaacccaatactaaataataaaaaaaacaactcaatttacttagatactacttcagtcttcagtaatgtgaagataagatcttaattattaaataaaaggctagagaaaaataattaaatacatacgaattgaaaagaagaacaagtcatcattattttggttgaccgttaaaagtcatttatctgttagtacaactttttatttgctttggagataaaaaaatttagcacgagattatggattgaaaactattttagtttttcataggttaaatattaattttagtcttttatattttagtatttttttttatattttggcttattaaattttaaaaatttttattttatcttttatattttttaattgttttatttttcttttctttaattttttgtaaacaatattagtttttcattaactttaaaattttaaaataatggtgattaaattttttcactatgtgttattaatacaatagtagtcctcagatccccacaacatagaatccccttaaccaattgtccagaaccagcctcaaatgagcttggtctactacatttttgaataactattaatttttttagtatttcataagatataatcataatttgttattattaaatatttaattttaagatttattagcatttaataatcaataaattaaatactaatatattaatacttatgtagtaataataattaaatatcaatacatataaatttttatatataatattaaaattaataataatttaagattaaagctaaaataagtttttgtaaagaaggaatttaactcggttggttaaatatggtatatgagttaaaatttcccatatttgtcttcaattcttgtggtaaaaaaagaaagaattttcggtctctataaattaggatgctttttaattttagtcatttaataaaagtagtccattaaagatttattttgttggttttagtctcttctatgaaataataaccttaattataacataatagtgacattgagaattcattgtatcatggagttacatataattttttttgtaaactttattttaaaatctttcatcaattagtcagacaccattaacatgatgatctaaagtcacaatttatcaaaaaagttaannnnnnnnnnattattattattgttacatatttattagtctattaatgtaattaacattttttgaagaaaatatttaatatttaatttagtaaatattaaattctaaaaaatcttaaattaaatattaaatactaacaaattattaattatatcctatgaaatactaaaaatgaaatattattaaatactaataattactaatttataatattaatattaaatactaatgcatataaattgataaatatatgcacatacttgaacacacatatgcatatctattaatttaacactaaaaggatataactgattgagaattatgcataagttggtataaaaaaattattcttacagatanttgttttattcatttaacaagttatacgtttaatatacatatattaacattacatttattaaattcaatcaatatattatatttaatgtatataaaaattaataatattattgaaatttatttattaatttaatacatataacatttaataatattattacaatttattatattatatttaatatatatgtaatatttaataataatgttaaatgtttttagagctgtaatcctctaccacctttctttctctcctttatattacaatattttcttttaatctagtattaaagttcatgtgtattgtcaaaggtaacggtttcatcgttttggacctatatgatgatgcagataagcatttacagggcatgtaagcaacttgtcgctctctcttcatgcgaatttaaatttcagtaagcacggttcaattgcataagaacaaaacaattgaagataggagagaaaattaaatagaaacaagtatcacctaattaaacataaaagaaagacaaaaagaaagagtaaagaatgtatgtaatttaacttactgaagttttgttctcttcgtcccattgtccttacaacttgaattttgcaacaatttttttttacttgttaactaattaaaatttctatttgtaagacaaaaggaaattcactgatatggcgaaaaggaatggtccatgcttccattgcggcattgattgtaagtcctcttcttgttcttagaatttttgttcttttcattgtttttnnnnnnnnnnnnnnnnnnnnnnnnnnnnnnnnnnnnnnnnnnnnnnnnnnnnnnnnnnnnnnnnnnnnnnnnnnnnnnnnnnnnnnnnnnnnnnnnnnnnnnnnnnnnnnnnnnnnnnnnnnnnnnnnnnnnnnnnnnnnnnnnnnnnnnnnnnnnnnnnnnnnnnnnnnnnnnnnnnnnnnnnnnnnnnnnnnnnnnnnnnnnnnnnnnnnnnnnnnnnnnnnnnnnnnnnnnnnnnnnnnnnnnnnnnnnnnnnnnnnnnnnnnnnnnnnnnnnnnnnnnnnnnnnnnnnnnnnnnnnnnnnnnnnnnnnnnnnnnnnnnnnnnnnnnnnnnnnnnnnnnnnnnnnnnnnnnnnnnnnnnnnnnnnnnnnnnnnnnnnnnnnnnnnnnnnnnnnnnnnnnnnnnnnnnnnnnnnnnnnnnnnnnnnnnnnnnnnnnnnnnnnnnnnnnnnnnnnnnnnnnnnnnnnnnnnnnnnnnnnnnnnnnnnnnnnnnnnnnnnnnnnnnnnnnnnnnnnnnnnnnnnnnnnnnnnnnnnnnnnnnnnnnnnnnnnnnnnnnnnnnnnnnnnnnnnnnnnnnnnnnnnnnnnnnnnnnnnnnnnnnnnnnnnnnnnnnnnnnnnnnnnnnnnnnnnnnnnnnnnnnnnnnnnnnnnnnnnnnnnnnnnnnnnnnnnnnnnnnnnnnnnnnnnnnnnnnnnnnaatataactcaattagttcaaactcgttagttttgtttttggaatcaatgaaccaacctgatccatgatacataactaaatttattattattattattattaagttaagaaatacaaattaaagcatgcactaaagatgcctctaccttacacaattttatagagtcaaaatctcacacgaaagtagcaaatttcaataattacatccttatttataattaagatacctatatatacttagactaaagtctactattcacgttttaatttatatatataatataagttattttctaattgtaaagcattataaataaaattattttatttagttaaattagttaattaatgtactagtatcaaactgtgtgataatgtgatccgttttgcactccatatatgtgatgtaaaaatctagaaaaaaacaaaattctaaataattctcatttttataaaataaaaataataattttaaatatttagatccaattaatttaagctaaatcagttttttttatgattggattgatttggtttgaatttgataataaaattatagaaacctgaaccaattaatagtagaattttggtctgattggggaaagagtttagtccaacgtataaatagagttattacagctctcgaagaaagcctatgatctgccaatgctaaatctaacaatgcaatcatgttaattaaatgtatgatttaaaaccttatgatttcactttccttttttttactaaaccattccctatacagatcttccataattaacatgattgccattccagctagcggattagggcaaacccatgttccctcgtcaaatttgtctcccctccaccttaggcagtcgccaatagtgtgacttccttcatcttctgttgcgcacaactacttatcacatgaccatatagattgcaacatttgcaaattaattgagtgcaatccttaatattcaatattaaaccatctgttatgaaaccataaatatcccactattagatggctcaaatccatttccatactcaccatggcaaacttccctctaactgtgtcaatgatggctcaaatccatctgatatgtacacttacactgaccgacctagccaatgctaacaaaacactcatcatagtatttcttgcataaacaggaaaaacactatctagacttggttgttattgatcttcatcttggatgctatgaagtcggacatccatgaccaatgagatagtgatcgataaaaaaaaaaatcattcaaggatcattaccataacattttctctatcctcagctaaatcaaagttgaccataaaaaaaacatcaagcctaatgtcaactacatctacacccccaataaggtttccaaattgtcttcagatgatcacgttgtaagaaagttaatattcttccctaggtgtttgacaatcacaacatccttctatggcaaccatagttcctactactatcatcatcaatgtagaaatttggctccatggctatcaccatcttctagctcaactaaagagttttgcctaatcaaatctgtatgctcatgtcatgatagagaattttgtgatcctaatagcttctccaaaaaaaaaaataataatcttggaatgcatactcttacctctgccaggggcttcgaaggtgaaggaaaatatgttgtgaaccactattattcatgactaggggaaaaagtaacactctgcctctataatttttgaaaaataaaaataatgaaaaagataataaagttaaataacagtggatagttttcaagatgtaagtggagtgtgtcttgattgaagagaatagttatatggataaaaaagatatttaaaaagataattataggggtaaaaggaaaaaagaaatatgtactccaaaatattttcctttatatatctatagatatagattaagagagaattcctctcttattttgtataaaaatattaattttatatgttttattatatatccttcttttgtttataattcttttaaaatatatcctatgtgttttctaccttctatgtttgctagtgagtagtgtaaacacacgtttaatgaattttctgtaggcacccaaattaaaagaaacatataattgatttttttatctattatttaagaattattttgaatttttaattgatttatgggtagggtacgtgtgcagttcttggtttcccaaaatataactattcagataaatacgccatgttttacatcactaattacaaatcataacgtacatgtcatgttctagtctatatatgaataaatagacatatgtnnnnnnnnnnatggataaaaaagatatttaaaaagataattataggggtaaaaggaaaaaagaaatatgtactccaaaatattttcctttatatatctatagatatagattaagagagaattcctctcttattttgtataaaaatattaattttatatgttttattatatatccttcttttgtttataattcttttaaaatatatcctatgtgttttctaccttctatgtttgctagtgagtagtgtaaacacacgtttaatgaattttctgtaggcacccaaattaaaagaaacatataattgatttttttatctattatttaagaattattttgaatttttaattgatttatgggtagggtacgtgtgcagttcttggtttcccaaaatataactattcagataaatacgccatgttttacatcactaattacaaatcataacgtacatgtcatgttctagtctatatatgaataaatagacatatgtttttagaattattgcggcccaatgaaaaaaacatacgttattaacttgaaataaatagacatatattattgcaaacatgtttgttcatttaaatatatggacaattcaaaaccatattaacatgtattataattcaaaataattaggtaaccttaagaatcacgtacatgtgtttattttgtttcttttatgtgaatcaacatacaaagcgcaactaaaaatagttgtctctacagaaagttatttatgataaattaagacacttcaaaactatcatgtctctatagactataactataggcgcatgtagcccttaagaatgaacaaacaaaataactattcctattttatataaattattttgttcaaaacattttctcaaatgtttgagccagtcaccaacatatatatatggtttcatcagcttcgccacattggcgtagaggaccagaagacaagtcagtgttgtgcaacgcatgtggaataagatacaccaaatggggaagcattggccttcagaactattttcccaacaattttaaacctgagtaccttgataaccttaaaaatctagagggtagaaacaaggttctccatggttcaggctatgctacaaattcaagtaatgatactagtaaatatgtaagttaacttctttgaatattttgttgtgtgaatgcttcttatatataaattagtatttttgttaggtggaaaaaatccatgtatgtggaatccttatgttccatcaaggaaacgttcacacttagtacagatggagacatcaatccaaaggtttcatgaacaacttctcaagacgtggaaaaatgaagagaactcaaatgagtcattccaagaatcagaagaggtcttattaattgataacgtcaataacttcatacctagtaacgaaatagggcttggatgcattctccttaaaccagaagatgcttctgcatagaaggattcatttatgtatatccttcatgaatatgtatgagaatctttaagtttctctaaacatggcatattgcttttgaatattgaactttttgaattaaacttttttatgagcctttctcaagacttaaattctgtctctacactaggtgtttgtgtttcatgagatgattagaagtcatgtatgatctgataagtactatatatagatcaatatgaaatcggcatactttggaataatgattgtcttatgtcaactttgaactgaaggatgtgtgagttagggcctgtttgatcctattctcaatttctagttttaaaaactgttttataaacaattccacactattataagaaactggtttcgcatccaattaaaatccattaaattttaaaaactgtttctaaaacaagcgttttaaaaaccaaagacaaaaagattacaaatgttttccttttctgtattatatatttttgcaatgcaaatatatctgtatgacaaaaatattgcaattcaaaattaggaatttaagcgatcgaaaagagaagttgaaggatcctttgtagatgggaagcactggaaatttcttccagacaatgctgcactgcatacgggtctgtttctatttttttttatcattttttattttttatcatccaaagaaaaatatatatattaactagggtacaagggtacccaaccttattacagaaaaagtccaaccctgcaagcataacattacactttagaattgaaatatacattactatattaattacatatcatttgcaaaccattccatttctcccctcttttttgctaaaaattccaacgtcaactcaaaacatcaaccttcaattttgttttccatcttaccagccagtaaaagaagtatcattcaaaatatccaattgatcttagactttttcttaaccacttatcctcatacctgttccaagtcccaacaagagtaaactctcttacatgatcttttgatacctttccctagcatatactgtactacaacatgccaccaccaccagggctggagcttagttgtggttgaagccttgaatggggccatgccccaaattttttaagaaaacatattatacacacactaaaaatatttatatttttggccatgattaataagattttttataatctttgatagtattcattccttagttattaacgaatttaagtgttgaaaaatataaagaaggtgatttttaattattattactattaacaaggtgccaaagaaagttttgaagatccttgctgggatacaaagacagttcttgtggaatggagtggcagagacccaaaagattaactgggtaagttgggacagagtttgccttgcaaaagaagatggaggtctaggagttaaaactctggagatgtttaatgttagcttgctctcaaagtggaagtggagaaatctcaatgataaggagtttctgtggtatcctttattgtgttataaatacggcaaagcagatgttttttctttatctagaagaagctggccaaatgcatcacattaatggtggagggacattcagaatacaagttacaggtttgaaggtgtatatggatggttcgaggatctttttcagaggaaggttgggagtggtaaacaaaccgcgttttggagccacaaaggacttgataatctgtgtcttaaggatatgtaacctagattgtttcaagttaccacaaataaaggagcgactactggagatatgcttgctgataccaattccagaaacacatggaagcggacatggtttaaacatttgttttcgtgggaagaggagcttttggagtacccttgttgaactaacaaagaaatacatattaaaattttcctaatatcaaaaatgtgatagactccatctaaaacaagaaaattctctaaagatagctatagcttcacttgaccttctcctaacacatgtgccatactcccattcccatgctcacaataagttgcttgactctgtcagatgagaaatcagaggcagcaccaatgctaacaacattaggatgaggtttagggacgaaagacgtaggttggcaatggcgttgaaaatagttcttcatcaaatgattagctcgcccacaaacaaagcaaaaaatttcattccccatatttttattagtaggcttattgttgttattaaaagtatttttatttttagaaaaagaaagctttctatcaaacttatttttgttcaacccatgcttcttgaaggactcagagaaaggcttattagagctctcaacaagataggccttagaacgagaatcagattttgcaaataccttttggaaaaaatgatgtttattttgaacgcggagacaaacaggcaaatcatcaaatgtgaaactttcatctttatgtttcagatttcgagcaaaatcaatctaccaagaagacaattttgaaattatgaaagtcacaagcataatgtcatcaagaaaaacaattcctttcaatttcatgtcataaacaatgttttcaaattcatggatttgatatgaaatagattttccatcaacccctattgaacccttagaagccaacctgcaggaaaaaaaacataacaaaccaaaattacttgtaaagttactaaaagtaaaaagcaaaatcctaaaagataggaattctagttttatgtaacagattctaaaaaaaattatttttataaaaacaaaattgatataagtaatatatttttataaattataaattataaaataaatatttactaaaacttctgtcatcttcaggtagaaaacatatcacatctatttctgtcttgtttgataacttcaagaatatggtgtgaagtgtttaaatggatggggatcgaaaatgtttcccctcaggaggtttcccagtcacactctcagtttgggttttgcatgagagggaggaaaagccgtagatgtaaacattttatatggcacattacttgctggtgtgcatatggaaccatagaaatagtatagcttttaagggtaaagactgtgatctagggggtattttggctgccataaagcacatctcatggcaatggctaatgtacaaaggcggcaacaaaccaggaacttttttctcttcctagtgtttggagccattgcagtgcttcaaatgttgttgatgttcagagaagttaactatggcatttttgggacagaaagttaactttaggagaaatgattttttgatgtatgtaatacctgtacctcttgtacagattgggattggggtgtgtatttgcatccttatcatatcaatgctataccttttgcctttaaagaaaataattttatgttaatattacattttaagtttttatatttcttataatattagttcatatggagatgatttggattaatttagtctttccaaaacaatgattattttttacttcgagacacaaatatgaaattattttttactaatgtaaaatttgtttcactaaattcacttgtataaaaattatggaactaaattgatgtttgaactaaaaagaactataaaatgatataaatcaggtgaaaagcgagtctcataaaacacagtaaaaaatgatattaattttttttttttgattattcatttgactatttttcatgagattattactatgtttatgatctttttttgttcaaacatgcactagttggattttatagttttcatgtaagcaaatctaatgagacaagttttatgttttgaattaatcactatttcaaaaattatgtcttaaaatcgaagccatcattatttaagaaagaccaaattgatccaaatttaaaagataaaagatcaaaataaattatttaaaaatgaatcttaaaataagataaaggatcaaaagtataatttagtagtacatttttatatagatcaacaaaaattaataattaagtaaataaaagagtgtaacaactttataaaattaaccgattttttttttttagaaatgatgaagcataacaacaacgttctaaaaatattannnnnnnnnnnnnnnnnnnnnnnnnnnnnnnnnnnnnnnnnnnnnnnnnnnnnnnnnnnnnnnnnnnnnnnnnnnnnnnnnnnnnnnnnnncgaaaataacttttattttaaaacttattttttcttcttacataatacttattatgggggcaaagagagttcacatatacaagagtacaattcattaaactcactatgtttttagtattaaatggactttctaattcaacaaacaaccaaacaatctaataatttttttacagttttaatcctgtagagtcaaccccacctttaattgttcttctcctttatattaatttttttaatggcttattaaagttcatgtgcgttgcataacgactgcatatttttgtccctatatgatgatatagatggacattcacagagcatggagctacttgccatcctttccatgatgaaatggtaaaaaaacccaaggtagccttgtcaaacatatgaatttgaataacttataatgtaagcacggctcaattgcataaaaaaaaaaaaaacttgaagagaagagagtagaaaaaataaatggaatcttatgcttttatgttattaattaaagttgactgaagatttgttctgtttcttccggtagtcctacaacttgaattttgtaacataattttgtagtttgttctttaagttgatttcttttcaaggcttttgtggtgttgcttttctgataactataatttctatttgtcagataaaaggaaacattacagatatggggagaaagcatggtccatgcttccattgcaaaattcattgtaagtcctcttgtggttaattagaacttttgttttccgttagattgaacatggtgactgtatatggtattcaaaaaagatgaatattttatcttacaaattcaagacattcaaaatcagtcaaatgattcaattaaattggtcaaaaagtattggcatcaagaagttaatattattgaccttttaaaaattattttagtgttctaacttatacaattatataatctaattagttaaatatttatgatgtataagcccttaatcttttttctccttgtctaagcttatgcttggacaagcattcaattgcaccaaagttcaaactcacctttgattttttcaagtgtaatttcatgaaaatattgaagtttggttatttttaaccaacattacaaaactaagcatgttaaactagaaaaagaaaagaaaattctacattagtatgatattttatgctaaattttattattttttctttaaaataaaagtttttaaatataaattatttacttctaaatcaaattaacctttcatgaaattaaattttttaaatacttgaaagaaaacttaatttattcttgatagtaatcttatttaattcaagcatgactatctttatttatattttcattttttgtgtttaccgtaattttataaaaaggttaccttatttttaatatttttcttgttttcaaatatttgtatagccaacactaaannnnnnnnnnnnnnnnnnnnnnnnnnnnnnnnnnnnnnnnnnnnnnnnnnnnnnnnnnnnnnnnnnnnnnnnnnnnnnnnnnnnnnnnnnnnnnnnnnnnnnnnnnnnnnnnnnnnnnnnnnnnnnnnnnnnnnnnnnnnnnnnnnnnnnnnnnnnnnnnnnnnnnnnnnnnnnnnnnnnnnnnnnnnnnnnnnnnnnnnnnnnnnnnnnnnnnnnnnnnnnnnnnnnnnnnnnnnnnnnnnnnnnnnnnnnnnnnnnnnnnnnnnnnnnnnnnnnnnnnnnnnnnnnnnnnnnnnnnnnnnnnnnnnnnnnnnnnnnnnnnnnnnnnnnnnnnnnnnnnnnnnnnnnnnnnnnnnnnnnnnnncttaatttaatgagcttttaagtttggaccattaatgcatatattaaattctaattgcattaaaaaaaagggggtgtgtcatttatgatgagatgatatgactttttaaaaaaataaaaattgaagaaaacataaatttaaaagcaattataattggtttgaaatcttgggtataaagaccaagtaattattgtttcactgaagaccaagttaggatagtaattgatgtttttcattaaataataccgaatttgtctaatattacctttaaatcattttcatcgaaatttttatttaaatagtaattcaggtgttagcctacctaatgaataatgatatgaagaaattgtaatctatgtattttgattctatcaaatctcaagtaggctaatacctttttagctagctagaagtactataattaattgtatactgggccaggaggactaattattctatgaaaaataatattcatgtacatccgccttttcttgtgctgcacacattttcaataaaattcttttagcctttcaatacacacacacaaagcaaaccctagaaattgtttctacaaaaagttatgtatctaaaactaagacacttcaaaactatcatgtctctatgaatataggcacagataacccttaagaacaagcaagcaaaaccattcttattttatgcaaattattttgtccaaaatatctacttccaaattattcgagtagtgaccaacatatatatggctccatgatcaggtactccactttggcgtaatggacctgaagacaagccagtattgtgcaatgcatgtgggtcaagatacaggaaatgtggaagtcttgagaactatcttcccaaccattttcaaccagagtaccctgataaccttaaaaagctgaagcgtagaaaaactctgaagggtagaaaacatttaaagggtagaaaaaatctccttgtttcaagctatgttacaggtcatgataatagtaaataagttatctttttctttgaaaaacattgttgtgtgacttcatttattatatttctgacaattagtaatttttgctaggtggaaaaagtcgacgtttatggagccctaagattcctacaagaaaacgttcaccattggtacgcaaaaagataacaccaatgaagaggttttatatgcaacttcaaaatatgtgggaagattacgggaactcgaatgagtcctcctcagaagaggtcttaattttcaataacgtcaatagcttcatacctagtaatgaaataggccttggatgtattcctcttaaactagatgatgcttctgcatagaagggttcattttatgtatcctttatgaatatgttaaaaatgtgcttgagaatctgcatatggttttctaaatgtggtatgtcatttttgaatattgaaatttttgaacttaaaccttaatttgtatgagacttgaagaagctttaaattatgtcttccatgggatgatttgaaaattgttgctgcaaattgcctctcctttggctgcaacacattctttgctactgacttatgattatatataggcttatggtgttacagcgcaatccatatggttgtagacttacggggttacagacttattatggctacagactatgttatagacttatggtgttacagatttataacatcttatccatataatagcaaaataaaaagtggtcaaatacctcctcgtgcataaaatttagtaatacacttgtaaatattaaagcactggtagctaatcaatatctcatacaaatgaaattaaggataaaggttgatagctagagcatgatcattacatgaatttgatcattaattgcttgaaagtataaattaaatctttacatgactattaaattggcatgaaatatgttataacacataaaagggaggcaaacaaaaatggaattagatttactcttaaacatgaaaatttagacccttcacaacatttccttaatgcaaaaagtaaattaattttaacatttttgtgcattaatatgatgaagattcctaacttgtatagagaatgttcagaatgaatgaacctccaaccaaaatgctaagttttcatagttttttttctccttaaggccaaagataatattatattccaaaaaattacaaatatgtttggcaaaacgggcctggcccgccaggccagcccgcttagccagtaaaaaaatgcgggctgggttgataatatcaactcgctaataaaaaatgggacgagccagtccgacccgcaaattatgggccaaacgcggggcggggcggactagcccgctgggccaacattatttaaaatattaaatattaaaattaaatagatatatttaacatattttgaaataggtaattcttttaatttatactcttttgcactttcataattaacttataagttttaatatttaaatatttatgataatgatactttcaaatagtctttcattactaatatattacactttgtacagtttacatccataaattctatttgcaaatggtgtaattttgtgaattatcacataacattatttatttatgattaattttaaattatttactttttatttaactgtgtttttttaattatcatatttttattttaatataatttttctgtatttttttaaattaacttatttatttttttaaaattttttaagctggctggcccgcattaaagcgaggcgggctagcatttccagcccactttgcaaaagcgggctaggccagcccgccccatttttttgcgggccgatccgtttgtcatccctaagtacaaagatagaaatcacatttaaaacataacaagctcccgaagagcaccatattcaatgaagcaaatcaatatccaatgacccaaaagcaataaaagttacagcaacactatatcaactagccaaggacaatgaggaaggacagtaccaatgtgccacgttctaaataaaaaattttcacaatgtcacgtcaacaataaatattactagactacaacgtgggctatttcgtcccacaggccagcgaaatatgtgtgctaacgtggtgtcattttgttggtcatgtatttcgctacatgaaccagcgaaataggggatcaaagtgttagtgaccgggcagacaagggcaggacacgtggcagcgcaaggtatttcgctgggggccaagcaaaatatgtagcaatgggaaaaaaaagtcattgggaacatgtgtcatgtaactaattaaaaatagcattaaattaactaattaaagaattaaaaaactagaaaaacaagtaaatttttggatgattgaatcctaaatcctaattttgacctacttagagacattttttggaaaaaatagttgaccaaatccccttcggcaatttgcttaggatttcttatgttaatttcgagcgttttgacatatcgaacgcctcaatcaaacatttttatcaaaagttataaccatttaaagtttatataatcaatatcaccaccaattcctatagtgaaatcatacatcagtgacacgtgtcccaacatatttcgcttgactccctagcgaaatactttatgtctgtcacctgtcctgcccgttattgaccatgtatttcgttggctcatgtagcaaaatacgtggccaacagaatgatgccacattagcacacatatttcgctggattgtgggccgaaatagcccgcgtgacagtctggtaatgtaacaccccgtgtatacccggtgtattatcattgtataatcatcagattagcgcttaaactcagttaattaaaacctttttaaaacaagtttattttgcggaagcataaaaccgaaaaccatattttctcgatagcaatatgtatggaaacgcaacccacatcaagcatcaacacatgcccctgcttaaccagatcatacactcaaaacataggcagataacacagatatctcgaagatataaacatacaggaggaaaccacatcatatatatatataaccgagttatatatatacaacaactggcacccgaggtgcatatacaagatgataagcgtccgagcgctttctgatcccgaggacccttcctcacatgagggcatacaaatatacaggagtatacaagacaactacatgcgcaacgcatgtcttccctcacaggggtatacaacataaacaaaacaacatgctgagccgagctccaagcnnnnnnnnnnnnnnnnnnnnnnnnnnnnnnnnnnnnnnnnnnnnnnnnnnnnnnnnnnnnnnnnnnnnnnnnnnnnnnnnnnnnnnnnnnnnnnnnnnnnnnnnnnnnnnnnnnnnnnnnnnnnnnnnnnnnnnnnnnnnnnnnnnnnnnnnnnnnnnnnnnnnnnnnnnnnnnnnnnnnnnnnnnnnnnnnnnnnnnnnnnnnnnnnnnnnnnnnnnnnnnnnnnnnnnnnnnnnnnnnnnnnnnnnnnnnnnnnnnnnnnnnnnnnnnnnnnnnnnnnnnnnnnnnnnnnnnnnnnnnnnnnnnnnnnnnnnnnnnnnnnnnnnnnnnnnnnnnnnnnnnnnnnnnnnnnnnnnnnnnnnnnnnnnnnnnnnnnnnnnnnnnnnnnnnnnnnnnnnnnnnnnnnnnnnnnnnnnnnnnnnnnnnnnnnnnnnnnnnnnnnnnnnnnnnnnnnnnnnnnnnnnnnnnnnnnnnnnnnnnnnnnnnnnnnnnnnnnnnnnnnnnnnnnnnnnnnnnnnnnnnnnnnnnnnnnnnnnnnnnnnnnnnnnnnnnnnnnnnnnnnnnnnnnnnnnnnnnnnnnnnnnnnnnnnnnnnnnnnnnnnnnnnnnnnnnnnnnnnnnnnnnnnnnnnnnnnnnnnnnnnnnnnnnnnnnnnnnnnnnnnnnnnnnnnnnnnnnnnnnnnnnnnnnnnnnnnnnnnnnnnnnnnnnnnnnnnnnnnnnnnnnnnnnnnnnnnnnnnnnnnnnnnnnnnnnnnnnnnnnnnnnnnnnnnnnnnnnnnnnnnnnnnnnnnnnnnnnnnnnnnnnnnnnnnnnnnnnnnnnnnnnnnnnnnnnnnnnnnnnnnnnnnnnnnnnnnnnnnnnnnnnnnnnnnnnnnnnnnnnnnnnnnnnnnnnnnnnnnnnnnnnnnnnnnnnnnnnnnnnnnnnnnnnnnnnnnnnnnnnnnnnnnnnnnnnnnnnnnnnnnnnnnnnnnnnnnnnnnnnnnnnnnnnnnnnnnnnnnnnnnnnnnnnnnnnnnnnnnnnnnnnnnnnnnnnnnnnnnnnnnnnnnnnnnnnnnnnnnnnnnnnnnnnnnnnnnnnnnnnnnnnnnnnnnnnnnnnnnnnnnnnnnnnnnnnnnnnnnnnnnnnnnnnnnnnnnnnnnnnnnnnnnnnnnnnnnnnnnnnnnnnnnnnnnnnnnnnnnnnnnnnnnnnnnnnnnnnnnnnnnnnnnnnnnnnnnnnnnnnnnnnnnnnnnnnnnnnnnnnnnnnnnnnnnnnnnnnnnnnnnnnnnnnnnnnnnnnnnnnnnnnnnnnnnnnnnnnnnnnnnnnnnnnnnnnnnnnnnnnnnnnnnnnnnnnnnnnnnnnnnnnnnnnnnnnnnnnnnnnnnnnnnnnnnnnnnnnnnnnnnnnnnnnnnnnnnnnnnnnnnnnnnnnnnnnnnnnnnnnnnnnnnnnnnnnnnnnnnnnnnnnnnnnnnnnnnnnnnnnnnnnnnnnnnnnnnnnnnnnnnnnnnnnnnnnnnnnnnnnnnnnnnnnnnnnnnnnnnnnnnnnnnnnnnnnnnnnnnnnnnnnnnnnnnnnnnnnnnnnnnnnnnnnnnnnnnnnnnnnnnnnnnnnnnnnnnnnnnnnnnnnnnnnnnnnnnnnnnnnnnnnnnnnnnnnnnnnnnnnnnnnnnnnnnnnnnnnnnnnnnnnnnnnnnnnnnnnnnnnnnnnnnnnnnnnnnnnnnnnnnnnnnnnnnnnnnnnnnnnnnnnnnnnnnnnnnnnnnnnnnnnnnnnnnnnnnnnnnnnnnnnnnnnnnnnnnnnnnnnnnnnnnnnnnnnnnnnnnnnnnnnnnnnnnnnnnnnnnnnnnnnnnnnnnnnnnnnnnnnnnnnnnnnnnnnnnnnnnnnnnnnnnnnnnnnnnnnnnnnnnnnnnnnnnnnnnnnnnnnnnnnnnnnnnnnnnnnnnnnnnnnnnnnnnnnnnnnnnnnnnnnnnnnnnnnnnnnnnnnnnnnnnnnnnnnnnnnnnnnnnnnnnnnnnnnnnnnnnnnnnnnnnnnnnnnnnnnnnnnnnnnnnnnnnnnnnnnnnnnnnnnnnnnnnnnnnnnnnnnnnnnnnnnnnnnnnnnnnnnnnnnnnnnnnnnnnnnnnnnnnnnnnnnnnnnnnnnnnnnnnnnnnnnnnnnnnnnnnnnnnnnnnnnnnnnnnnnnnnnnnnnnnnnnnnnnnnnnnnnnnnnnnnnnnnnnnnnnnnnnnnnnnnnnnnnnnnnnnnnnnnnnnnnnnnnnnnnnnnnnnnnnnnnnnnnnnnnnnnnnnnnnnnnnnnnnnnnnnnnnnnnnnnnnnnnnnnnnnnnnnnnnnnnnnnnnnnnnnnnnnnnnnnnnnnnnnnnnnnnnnnnnnnnnnnnnnnnnnnnnnnnnnnnnnnnnnnnnnnnnnnnnnnnnnnnnnnnnnnnnnnnnnnnnnnnnnnnnnnnnnnnnnnnnnnnnnnnnnnnnnnnnnnnnnnnnnnnnnnnnnnnnnnnnnnnnnnnnnnnnnnnnnnnnnnnnnnnnnnnnnnnnnnnnnnnnnnnnnnnnnnnnnnnnnnnnnnnnnnnnnnnnnnnnnnnnnnnnnnnnnnnnnnnnnnnnnnnnnnnnnnnnnnnnnnnnnnnnggctcccgggtgaatactgaactggcccttgtgagcctcagctaggacgatgtccaccaactcacccttaggcaccacaatccgatcctgatacatcaccaggtcgtaatcctcccaggaaacatcctgttggccaatcatagctctcacatccttatcttgcttctgtgcctctcggatcctccgaatcagatcattggacaccttggtcctgctcaactcaagaccatgggcacctacagccacattcaggtgcatgtctctgaattgctcaaccaacttgcaatcagagatcatcatgcaggctgcactcacatgctttctactcaaagcatcagcaaccacatttgccttgcccggatggtatctcaactcaaaatcatagtctttgagaaactccatccatcgtctctgtctcatattcagctctttctggtcaaagaggtacttgagactcttgtggtcactgaacaccaccagcttagcaccatacagatagtgcctccaaatctttagagcaaacaccacggctgcaagctctaaatcatgagtaggataagattcctcatgaggcttcagttgcctggaagcataggcaacagccttcttatcctgcatcagcacacatccaagtccccgcttggacgcatcacaatacacctcaaagcttccttcagggtcaggaagggtcaacaccggagctgtggtcaacctttccttcaactcctgaaagcactgctcgcactcatgggtccaaacaaacggaacccccttccgggtgagtcgagtcaaaggtatcactatctgggagaacccctgaataaacctccggtagtatccggccaagccaaggaaactccgaacctcagatacatccttaggtctctcccaagacatcaccgcctctattttgctaggatcaactgataccccagctgctgagatcacatggccaaggaacttcacctcggataaccagaattcacacttggtcaacttggcatacaactgatcattcctcaaggtttgaagaacaatcttaagatgctcagcatgctccctttccgtctgggagtagatcagaatatcgtcaataaacaccaccacaaactgatccaagaaaggcctgaacaccctgttcatacaatccatgaacactgcaggggcattcgtcagaccaaagggaataacctgatactcaaagtgaccatacctagaccggaaggctgtctttggtatgtcagcaggctttatccgaatctggtgatatccggacctcaggtcaatcttagaaaacaccgtagctcccctcaactggtctagcagatcatctatacgaggcaaaggatacttattcttgatagtaaccttattcaactgtctgtaatccacacagagcctcatgctgccatccttcttcttcacgaagatcaccggtgctccccacggcgagacactcggtctgatgaactgcttagacagcaagtcctccaactgcaccttaagctccctcaactccagaggagccatgcgataaggcgctacagatatcggtcccacaccaggaaccagatcaatggagaactcgatctccctctcaggtggtagctgagtaannnnnnnnnnnnnnnnnnnnnnnnnnnnnnnnnnnnnnnnnnnnnnnnnnnnnnnnnnnnnnnnnnnnnnnnnnnnnnnnnnnnnnnnnnnnnnnnnnnnnnnnnnnnnnnnnnnnnnnnnnnnnnnnnnnnnnnnnnnnnnnnnnnnnnnnnnnnnnnnnnnnnnnnnnnnnnnnnnnnnnnnnnnnnnnnnnnnnnnnnnnnnnnnnnnnnnnnnnnnnnnnnnnnnnnnnnnnnnnnnnnnnnnnnnnnnnnnnnnnnnnnnnnnnnnnnnnnnnnnnnnnnnnnnnnnnnnnnnnnnnnnnnnnnnnnnnnnnnnnnnnnnnnnnnnnnnnnnnnnnnnnnnnnnnnnnnnnnnnnnnnnnnnnnnnnnnnnnnnnnnnnnnnnnnnnnnnnnnnnnnnnnnnnnnnnnnnnnnnnnnnnnnnnnnnnnnnnnnnnnnnnnnnnnnnnnnnnnnnnnnnnnnnnnnnnnnnnnnnnnnnnnnnnnnnnnnnnnnnnnnnnnnnnnnnnnnnnnnnnnnnnnnnnnnnnnnnnnnnnnnnnnnnnnnnnnnnnnnnnnnnnnnnnnnnnnnnnnnnnnnnnnnnnnnnnnnnnnnnnnnnnnnnnnnnnnnnnnnnnnnnnnnnnnnnnnnnnnnnnnnnnnnnnnnnnnnnnnnnnnnnnnnnnnnnnnnnnnnnnnnnnnnnnnnnnnnnnnnnnnnnnnnnnnnnnnnnnnnnnnnnnnnnnnnnnnnnnnnnnnnnnnnnnnnnnnnnnnnnnnnnnnnnnnnnnnnnnnnnnnnnnnnnnnnnnnnnnnnnnnnnnnnnnnnnnnnnnnnnnnnnnnnnnnnnnnnnnnnnnnnnnnnnnnnnnnnnnnnnnnnnnnnnnnnnnnnnnnnnnnnnnnnnnnnnnnnnnnnnnnnnnnnnnnnnnnnnnnnnnnnnnnnnnnnnnnnnnnnnnnnnnnnnnnnnnnnnnnnnnnnnnnnnnnnnnnnnnnnnnnnnnnnnnnnnnnnnnnnnnnnnnnnnnnnnnnnnnnnnnnnnnnnnnnnnnnnnnnnnnnnnnnnnnnnnnnnnnnnnnnnnnnnnnnnnnnnnnnnnnnnnnnnnnnnnnnnnnnnnnnnnnnnnnnnnnnnnnnnnnnnnnnnnnnnnnnnnnnnnnnnnnnnnnnnnnnnnnnnnnnnnnnnnnnnnnnnnnnnnnnnnnnnnnnnnnnnnnnnnnnnnnnnnnnnnnnnnnnnnnnnnnnnnnnnnnnnnnnnnnnnnnnnnnnnnnnnnnnnnnnnnnnnnnnnnnnnnnnnnnnnnnnnnnnnnnnnnnnnnnnnnnnnnnnnnnnnnnnnnnnnnnnnnnnnnnnnnnnnnnnnnnnnnnnnnnnnnnnnnnnnnnnnnnnnnnnnnnnnnnnnnnnnnnnnnnnnnnnnnnnnnnnnnnnnnnnnnnnnnnnnnnnnnnnnnnnnnnnnnnnnnnnnnnnnnnnnnnnnnnnnnnnnnnnnnnnnnnnnnnnnnnnnnnnnnnnnnnnnnnnnnnnnnnnnnnnnnnnnnnnnnnnnnnnnnnnnnnnnnnnnnnnnnnnnnnnnnnnnnnnnnnnnnnnnnnnnnnnnnnnnnnnnnnnnnnnnnnnnnnnnnnnnnnnnnnnnnnnnnnnnnnnnnnnnnnnnnnnnnnnnnnnnnnnnnnnnnnnnnnnnnnnnnnnnnnnnnnnnnnnnnnnnnnnnnnnnnnnnnnnnnnnnnnnnnnnnnnnnnnnnnnnnnnnnnnnnnnnnnnnnnnnnnnnnnnnnnnnnnnnnnnnnnnnnnnnnnnnnnnnnnnnnnnnnnnnnnnnnnnnnnnnnnnnnnnnnnnnnnnnnnnnnnnnnnnnnnnnnnnnnnnnnnnnnnnnnnnnnnnnnnnnnnnnnnnnnnnnnnnnnnnnnnnnnnnnnnnnnnnnnnnnnnnnnnnnnnnnnnnnnnnnnnnnnnnnnnnnnnnnnnnnnnnnnnnnnnnnnnnnnnnnnnnnnnnnnnnnnnnnnnnnnnnnnnnnnnnnnnnnnnnnnnnnnnnnnnnnnnnnnnnnnnnnnnnnnnnnnnnnnnnnnnnnnnnnnnnnnnnnnnnnnnnnnnnnnnnnnnnnnnnnnnnnnnnnnnnnnnnnnnnnnnnnnnnnnnnnnnnnnnnnnnnnnnnnnnnnnnnnnnnnnnnnnnnnnnnnnnnnnnnnnnnnnnnnnnnnnnnnnnnnnnnnnnnnnnnnnnnnnnnnnnnnnnnnnnnnnnnnnnnnnnnnnnnnnnnnnnnnnnnnnnnnnnnnnnnnnnnnnnnnnnnnnnnnnnnnnnnnnnnnnnnnnnnnnnnnnnnnnnnnnnnnnnnnnnnnnnnnnnnnnnnnnnnnnnnnnnnnnnnnnnnnnnnnnnnnnnnnnnnnnnnnnnnnnnnnnnnnnnnnnnnnnnnnnnnnnnnnnnnnnnnnnnnnnnnnnnnnnnnnnnnnnnnnnnnnnnnnnnnnnnnnnnnnnnnnnnnnnnnnnnnnnnnnnnnnnnnnnnnnnnnnnnnnnnnnnnnnnnnnnnnnnnnnnnnnnnnnnnnnnnnnnnnnnnnnnnnnnnnnnnnnnnnnnnnnnnnnnnnnnnnnnnnnnnnnnnnnnnnnnnnnnnnnnnnnnnnnnnnnnnnnnnnnnnnnnnnnnnnnnnnnnnnnnnnnnnnnnnnnnnnnnnnnnnnnnnnnnnnnnnnnnnnnnnnnnnnnnnnnnnnnnnnnnnnnnnnnnnnnnnnnnnnnnnnnnnnnnnnnnnnnnnnnnnnnnnnnnnnnnnnnnnnnnnnnnnnnnnnnnnnnnnnnnnnnnnnnnnnnnnnnnnnnnnnnnnnnnnnnnnnnnnnnnnnnnnnnnnnnnnnnnnnnnnnnnnnnnnnnnnnnnnnnnnnnnnnnnnnnnnnnnnnnnnnnnnnnnnnnnnnnnnnnnnnnnnnnnnnnnnnnnnnnnnnnnnnnnnnnnnnnnnnnnnnnnnnnnnnnnnnnnnnnnnnnnnnnnnnnnnnnnnnnnnnnnnnnnnnnnnnnnnnnnnnnnnnnnnnnnnnnnnnnnnnnnnnnnnnnnnnnnnnnnnnnnnnnnnnnnnnnnnnnnnnnnnnnnnnnnnnnnnnnnnnnnnnnnnnnnnnnnnnnnnnnnnnnnnnnnnnnnnnnnnnnnnnnnnnnnnnnnnnnnnnnnnnnnnnnnnnnnnnnnnnnnnnnnnnnnnnnnnnnnnnnnnnnnnnnnnnnnnnnnnnnnnnnnnnnnnnnnnnnnnnnnnnnnnnnnnnnnnnnnnnnnnnnnnnnnnnnnnnnnnnnnnnnnnnnnnnnnnnnnnnnnnnnnnnnnnnnnnnnnnnnnnnnnnnnnnnnnnnnnnnnnnnnnnnnnnnnnnnnnnnnnnnnnnnnnnnnnnnnnnnnnnnnnnnnnnnnnnnnnnnnnnnnnnnnnnnnnnnnnnnnnnnnnnnnnnnnnnnnnnnnnnnnnnnnnnnnnnnnnnnnnnnnnnnnnnnnnnnnnnnnnnnnnnnnnnnnnnnnnnnnnnnnnnnnnnnnnnnnnnnnnnnnnnnnnnnnnncaaccgcgccaactgggaaattcagggtggttctggcgccaccggcgccgacctggcgcccagagcgccaaccaccagaggccatggcacttggagcgccgttcccgcgcccacagcgccaacaagcagagaccctggcgccaagggcgccaacctggcgccgtcagcgccacaccttttggccacggcgccatccgcgccacacctggcgctggccgcgccagattatgcagaagcaattctgcagagtgttttctgcataatccaaaccaaaaggcctcagactcgcgccacacgcgtcctaattcgcgccaaacgcgctgggactaagggatattacaggtaatatttactgttggcatgacattgtggaaattttttatttggaatgtggcacattggtcattgttcccaatgaggatgacaagttacagtaaaagttttcatagttcttgaacttagcttttttagagcatcttcaatgggagcatttaaaatggatttctttatcacctttttgtgtttctcgcattactttttgtggtctctatgtcactcatgaggaactcaaacaaaattttgcttcaatacaagaaaatcacaagaaatcgcaagaaactccaaaaaatccacacatttatatttttttattaaaacttaacatttttttagtttttataaatacaaataaaaagtatgaataattgaagaaaaatgaaatataaattaaaaataatcaaagaaaaagtataatttatctcttgctaatgactctttatgcacttggaaatgtttttatttgcaatttcgagtttataaaaacatatgatagctgagttttacaccaccacagcgaaaatgaaatatatattttattacttccatttcaaccttctacattcttccattgactctctatgcattttttttaaataaacaaccttctaaattcttccataccacatgcatttttccattttcctttcctctttcttttctttctctcttatgtcactacaagaaaagcgatgttttccgatgcaccctttcctacccactaacttccgtcggaatattaacatttttccatgtatatttattacattagaaattggatttttcccaaaacaaaaaatagctgaaccctagccttgactatctcttcaatcccttaccactctcctactcttaccttcgttttaagcgtctcttcccatccctaagccaaggatggcatcggccatggctacaccggtgacaccgcgagatccattccggtcatcgtgcgtgaagggcagccgcaggtttccctctaatatgggtccttttaaaacataggtaggcagaagagcttccattgcagatttcgtttcatttgtgaaaagacgaacctaaaagagagagaatcagagcaagaagaaaaagatgatctatcggaagtggagtctcctcaccggcccggtcaccatcctcgacggcgtagtcatcgccatcgccgccgcaaatgttatcttcgtcaagaatgtaagctcctttcttccactctccaaatcccatcactccctttctgcactcaatccaaccccttggttttctccaaagttgcgattttgattgatttttctggatttgggtgccgatttatgatctgggtcttcagtaatttattgaaattcttgctactttttttttgcgatttgcttctgtaatgtcgctagtctctgatgtgtttatctctcgttagctaattgtgttcatttgattcatttttacgccgaggacgatggcggtactcacgcacacaccgaggaccacccagaattcggggtgaatgatgatgtgttccaagtgttcgacgaaatgtgagtatggctttctgaacttgttgtttttcataatgaatgttatgctatagttataatctttttttagctgttctcggattctcatgaagttatttcctcctttaggttgatccaaaagtatcaaataagtcacgttttgcacaagagcttatctcaactattttgatcactgtagctgtggggttggtctggtatgagtccctagtttccctttctccctctcttttccatgtagaaacatccactctctgatttttatatacttgtattgctactacacatcctttcaggtttattggtgctgctgcacttcaaaaatacattggaagcttgggtgggattggaccttcaggagttggatcaagttcttcctatgccccaaagatgctaaataaggaagtgatgcctgaaaaggttaacttgttaatctgttcttagttctcacttctcagatatctatttctgtatctcttgaatgtttctgtgattgaatagcttcaatttggataagctagaattttgatggatagtgaatatttgaatgagaagattctaggtggaataggctaatgaacaatggcatgatatatactatacctccataatcatttcctttctttatcttaataaaataatcctagctaattatgcctttacttgcaattttgtggaccagttgacgaaaaagttggaaagtcttaccaccccgtaatttctgaaagacatctgacattataatttcaagtttccttatttgttgtattagccttgtgtgtagaatatacagtaaaccaaaagttattctatgccttatgtgttctcttttcttaatctttctctatcacactttctttccttgcagaatgtaaaaacctttaaggatgtgaaaggtgtgatgatgcaaagcaagaacttgaggaagttgtggagtacctaaaaaatccatctaagtttacacgccttggaggaaagttgccaaaggtttgaagaggttaatttgtcattttttttcttttttttttcctgatagctttttttgtcaatttgcttgtcttataataaggtatcatacttttttgtgtgtattggttatgttttgttcatcaagtgtggctaaagtgttcctcttttcaggggattcttttgacaggagcacctggaactggaaaaactctactagccaaggtcagttagtttctgtcttgtcagacacatttttacagtgtttacgaagttattgtattatacaatttagaacctattggtcttcttccatatgctttttaggattcgttatcatttttagtatgccacactacactgttatatgctatattctattaggaagttcaaggaaggacataaatggactttggttcttgtctctcactttgatatttccttacactttgcataagtgttttgatctgtgactgtaactaaaatcctacattattgacatcaaccttttgagttaacctattgaaaattatcattgtaatgatctaatagtgtttgctttatctgggaccttgaaggctattgctggagaagctggtgtcccatttttctatcgagcaggctctgaatttgaggagatgtaagtcttctttcactttttatgttttcaatatcttaaatttttagcattgaacgcatttatatacagtctcttgagatcagaaacaagatattgcacagtcacagctgtaatgtaatgtgggtaaattataattcattagttgttttgaaaataataacatacaaagaatgcttttatattgcaaccttgataatgaaaatacagtagttgtcaattgtaatacagaatatgtttatgcttttctgttattgattactaaatgtattttattatcgttattctaatgggaacatactcttaccaactttagggctcaatctgtaacgcccggccacttgcaggatcaacgactatccctacataccaacacaagacttttcagtgtgctttgtcctcactcacacacttcctgagaannnnnnnnnnnnnnnnnnnnnnnnnnnnnnnnnnnnnnnnnnnnnnnnnnnnnnnnnnnnnnnnnnnnnnnnnnnnnnnnnnnnnnnnnnnnnnnnnnnnnnnnnnnnnnnnnnnnnnnnnnnnnnnnnnnnnnnnnnnnnnnnnnnnnnnnnnnnnnnnnnnnnnnnnnnnnnnnnnnnnnnnnnnnnnnnnnnnnnnnnnnnnnnnnnnnnnnnnnnnnnnnnnnnnnnnnnnnnnnnnnnnnnnnnnnnnnnnnnnnnnnnnnnnnnnnnnnnnnnnnnnnnnnnnnnnnnnnnnnnnnnnnnnnnnnnnnnnnnnnnnnnnnnnnnnnnnnnnnnnnnnnnnnnnnnnnnnnnnnnnnnnnnnnnnnnnnnnnnnnnnnnnnnnnnnnnnnnnnnnnnnnnnnnnnnnnnnnnnnnnnnnnnnnnnnnnnnnnnnnnnnnnnnnnnnnnnnnnnnnnnnnnnnnnnnnnnnnnnnnnnnnnnnnnnnnnnnnnnnnnnnnnnnnnnnnnnnnnnnnnnnnnnnnnnnnnnnnnnnnnnnnnnnnnnnnnnnnnnnnnnnnnnnnnnnnnnnnnnnnnnnnnnnnnnnnnnnnnnnnnnnnnnnnnnnnnnnnnnnnnnnnnnnnnnnnnnnnnnnnnnnnnnnnnnnnnnnnnnnnnnnnnnnnnnnnnnnnnnnnnnnnnnnnnnnnnnnnnnnnnnnnnnnnnnnnnnnnnnnnnnnnnnnnnnnnnnnnnnnnnnnnnnnnnnnnnnnnnnnnnnnnnnnnnnnnnnnnnnnnnnnnnnnnnnnnnnnnnnnnnnnnnnnnnnnnnnnnnnnnnnnnnnnnnnnnnnnnnnnnnnnnnnnnnnnnnnnnnnnnnnnnnnnnnnnnnnnnnnnnnnnnnnnnnnnnnnnnnnnnnnnnnnnnnnnnnnnnnnnnnnnnnnnnnnnnnnnnnnnnnnnnnnnnnnnnnnnnnnnnnnnnnnnnnnnnnnnnnnnnnnnnnnnnnnnnnnnnnnnnnnnnnnnnnnnnnnnnnnnnnnnnnnnnnnnnnnnnnnnnnnnnnnnnnnnnnnnnnnnnnnnnnnnnnnnnnnnnnnnnnnnnnnnnnnnnnnnnnnnnnnnnnnnnnnnnnnnnnnnnnnnnnnnnnnnnnnnnnnnnnnnnnnnnnnnnnnnnnnnnnnnnnnnnnnnnnnnnnnnnnnnnnnnnnnnnnnnnnnnnnnnnnnnnnnnnnnnnnnnnnnnnnnnnnnnnnnnnnnnnnnnnnnnnnnnnnnnnnnnnnnnnnnnnnnnnnnnnnnnnnnnnnnnnnnnnnnnnnnnnnnnnnnnnnnnnnnnnnnnnnnnnnnnnnnnnnnnnnnnnnnnnnnnnnnnnnnnnnnnnnnnnnnnnnnnnnnnnnnnnnnnnnnnnnnnnnnnnnnnnnnnnnnnnnnnnnnnnnnnnnnnnnnnnnnnnnnnnnnnnnnnnnnnnnnnnnnnnnnnnnnnnnnnnnnnnnnnnnnnnnnnnnnnnnnnnnnnnnnnnnnnnnnnnnnnnnnnnnnnnnnnnnnnnnnnnnnnnnnnnnnnnnnnnnnnnnnnnnnnnnnnnnnnnnnnnnnnnnnnnnnnnnnnnnnnnnnnnnnnnnnnnnnnnnnnnnnnnnnnnnnnnnnnnnnnnnnnnnnnnnnnnnnnnnnnnnnnnnnnnnnnnnnnnnnnnnnnnnnnnnnnnnnnnnnnnnnnnnnnnnnnnnnnnnnnnnnnnnnnnnnnnnnnnnnnnnnnnnnnnnnnnnnnnnnnnnnnnnnnnnnnnnnnnnnnnnnnnnnnnnnnnnnnnnnnnnnnnnnnnnnnnnnnnnnnnnnnnnnnnnnnnnnnnnnnnnnnnnnnnnnnnnnnnnnnnnnnnnnnnnnnnnnnnnnnnnnnnnnnnnnnnnnnnnnnnnnnnnnnnnnnnnnnnnnnnnnnnnnnnnnnnnnnnnnnnnnnnnnnnnnnnnnnnnnnnnnnnnnnnnnnnnnnnnnnnnnnnnnnnnnnnnnnnnnnnnnnnnnnnnnnnnnnnnnnnnnnnnnnnnnnnnnnnnnnnnnnnnnnnnnnnnnnnnnnnnnnnnnnnnnnnnnnnnnnnnnnnnnnnnnnnnnnnnnnnnnnnnnnnnnnnnnnnnnnnnnnnnnnnnnnnnnnnnnnnnnnnnnnnnnnnnnnnnnnnnnnnnnnnnnnnnnnnnnnnnnnnnnnnnnnnnnnnnnnnnnnnnnnnnnnnnnnnnnnnnnnnnnnnnnnnnnnnnnnnnnnnnnnnnnnnnnnnnnnnnnnnnnnnnnnnnnnnnnnnnnnnnnnnnnnnnnnnnnnnnnnnnnnnnnnnnnnnnnnnnnnnnnnnnnnnnnnnnnnnnnnnnnnnnnnnnnnnnnnnnnnnnnnnnnnnnnnnnnnnnnnnnnnnnnnnnnnnnnnnnnnnnnnnnnnnnnnnnnnnnnnnnnnnnnnnnnnnnnnnnnnnnnnnnnnnnaaagaaggtgagagtagctgaaatgaggagatatttatgacattgattgaggaaaaaagatggcagaaaattggttaaaggtagtttggacatgtacaaagaagtcacgtgattgctaaatgataatcactgactaagataaagacaaaactgaatttagcgcttccatcttaccaatataagaaatttgtaactgtaacagcatggggaggttaccaactgcaacaaattacaaagaagaaagaaacatgaggcagcatccctgttttccattcttctatacatcattccagtccagccctaattgggacttaggagatgatcaaaacaatgaatttgctgctagttcaaggttgtcaccagcattttggtgccaagcattagaccattagtggacaccttgttttggtggtccaatccaatgtatgacccactctagtttagaaatggccaaagacaaccagataatcttgagctaaacctgacacactcacgtttttagcaggtcaactactttactaggtttgaccaaccatcatattctatgctagtatataatatatatatatatatatatatatatatatatatatatgctgggcacaatttgttgggtgagtattcagtataggtgcaaagttggggtcagtttatgaatgtcacaaccttgcctataggtatcttaatctcattcgaatttcatgatatattgttagactttacatattggtgacatttattttgttgttgctactggtccacagttaatcttgtgatgactgatgtgttgcaaacacatcttgtttttagtctagttttaggttagaatttgattaaatacttaggtaaatagcttagaattagttgagtttaatattttattatttaaatctaatttcaataccaattgtgcaatttcaggtcaaaagaggagaataaaagaagcaagatctggaacatcacgcgtgtcgcgccactacccacgcgagacacttggaagaccagaggaaatcacgcgagaagcaccgttagtcaagtgagtcgcgtgggaacttcaagatctaagcttttcaactctgtcccttcacgcgatacacttggtaattcacgcgagtcgcgtgaagactcaaagaaataaggaattctcttctgcacatccacgcgaggcacttcacaacccacgcgacacgcgtcattcctttctgccagtccacgcgactcgcgtggtatcgcgcgcgggtcgcgtgaggttgatgctgtttccttatttaaattatatattttcagatttgatattatattaggattagttgccttaattaagtgattctataaatatatttagattccttaattaagaagatttgatttagatttggaacagaaaataggctttgttaccttaattagatctatctataaataaaggcctctggggggagttctagacatctcatatccattatctcttaccacagacactgatacctctctactcttcctttcttttctctaaacctttggaggtcaagaatcaaggcaaggtcaccaagaatgtattatttgacagcctttggtttcttgaagcttatggcaagctgaacttgtattgtgggaaggccatgaactgatgtaactcctctgtaacttgaattggtattgattctaatgctgttttgattattttattctattctgtgctatttaatgttttactcttaattggaattggccattctatttaagtattgagggttaggattcgcaatggacacgttgggattttaatttctgacctgtttagaataatagtcgtttttcgcctagacatagggatgcgtggctacggactttataatatgttctttgtatgcttaatttgatagatttcaccaagacattgggttttcgattcaggttaaagggttaattcactaaggaattagggattaactaacttaggaaagacttattctccgaataatcttaacaagatcacatgagatatattctttgaatacttagtttgacagattcactaagggtttaggtttctcgatcgaattaaagggttaaatcgttggttatgctcttaagagtctaggatttacgaatttaggaaagatttatcaagtgtgtgacctaagataataaaccaatcaagtgaaggaggtagaaacaaaagggattgcgcctgaccacaattgtttcttccattggtaatttcttttattttattgcatttatttaatttctgtttttattcaaacatcaatttatccaacaattacttctttgttctttattatttctgtttttattttccaatcatatataattaattttattgtaaaaattaccccaatccctgtggagacgataactctacttacctacttttattacttgttaacgatcggtgcacttgccgtattcacacaaatcgcacaacaatgactgttgtatttcttgtgctagtgcagctacagctcaagcctttaatggaccaactcagtcgggtaaaagacttgtctgtccctaaatttggcagtcttcaagcatgggaagctagagctagtgctgctgtccgtgcagctaatggagatatcaatgctggtgattctaaaatttcgcagccaggatataatggagttccttatagtagagacactaaggtaacattatcctgtttaagggtgttattatttctggcatgtgcatagatttgacaaccatggtactttttttctccccaattttattagtttaatccctccttgttgtgaatgtattattctcttcaaatagtgctgatatctcaactttgaaaaaagatggagctgattgtttttatttatcactttggatgaatttgaatctctgggttnnnnnnnnnnggaagaaagtgaaaagaaagaaaaataaaatatgagatgatctttagattatttggtacgagaaaaatgaaaagtaagaaagatgattttttgtttagttttataaaagtaagaaaaagaaaaaaaaagtgagaaaatctttagattgtttagtatgagagaaaataaaagaaaaataatttataactaaaatatgtcaaacaaaatttaataaaagaataatttttttaaaataattaaaaataaattatatgataataaatgaaaaaattgtaaaataaaataaaatcaaactaaatctttgaagattgattcagatttaatattatatttaaattgaatcaaatcatatcatcaacatccttagctatgcatccatccaacatcttcctttaaatatagttatattttgtgagtcatatagcactactaatcaatatcatcagtaatggatataaaattattatgagagaatgaatcaacttcggatnnnnnnnnnnttatttatcactttggatgaatttgaatctctgggttgcatctcatagcatgcacctttttttttggggggggggtgtttaaaataagaaatattgttagaaggaagaaagaatgaaagaggatagtaccttacttaacaaggagtcaaggactctgcaagaagaaacaaagagaaatcagataaacatgttagtaagataacaaataaagcattttggtgtctttacatatctgtcagctacctctcttaaaaaccatttgccaagcacctaagagaggcctgaaaaatatagttgaagataaaaataagattgatttctagtgaatgttcttgaatggtcaatacacagttacacacactcagttaaatagtatatatatatatatatatatatatatatatatatatagtgtgtgtgtgtgtaagcattgtgtagcatatgtggtgagtggttttaataatattaaggttttctttttttattcgcaacttttcaaggattatgcaaaaaaagtttgttgaatttgttattctaagacggttctgcaaaacaccgccttagaatgatctattttatttttttaaaaataacattctaagacggttactttaaaaaccgtcttagaaggtatcgactttccaggacaccattatcaaagacggctttaataaccgacgtagaaagcgcttctcatagagtattttcgacagaaaagtccgtcggaaatttcccacgagctattaccgatggaaataaaatccgtcgcctaacatttcctacgcccctttttccgacggatttttatccgtcggaaattccgtcgctaaatcggttttcccacggattttggttgttaccgacggattttttccgtctgaaatttcattttttttttgtagtgtgtgctttccactcacgcgccttcttccttacgcgacggcttacttgggcggcaacttcctctgtgcacgacctcttccttcgtgtcgcctccacctcgcgcggcgcaccaacctcttcctccatgtgcactgcctcttttgatgtagaccactgtcgcaacctcttccttcatgcgctcgacctcaggtttgttatttttcctctgttttttttacaggtagttgatatcgataatattattttattcataagtttcagttccttatataaggaccgcgtttcattcttgatgatacgattctgtcacgcaagccaactccaacgcaaaaaaaaattcaaggaacgattccttcaagtgaaggaacttggaagcactctagttgaagatgctcttagttatttgcaaaaggttcaattatatttgcactccctcccctaccttccaaaaagaggtgcggcatggtgtcaaatgatcattattcttgtcttttctttccccttatgctttggttagttttatggaagaaagtgaaaagaaagaaaaataaaatatgagatgatctttagattatttggtacgagaaaaatgaaaagtaagaaagatgattttttgtttagttttataaaagtaagaaaaagaaaaaaaaagtgagaaaatctttagattgtttagtatgagagaaaataaaagaaaaataatttataactaaaatatgtcaaacaaaatttaataaaagaataatttttttaaaataattaaaaataaattatatgataataaatgaaaaaattgtaaaataaaataaaatcaaactaaatctttgaagattgattcagatttaatattatatttaaattgaatcaaatcatatcatcaacatccttagctatgcatccatccaacatcttcctttaaatatagttatattttgtgagtcatatagcactactaatcaatatcatcagtaatggatataaaattattatgagagaatgaatcaacttcggatggttattatcgtttctttttccattaagctcgtttggagatggggtattgaatagtttattatcaattatagttactccctttccatgagaaagcctaattgtttttttttttaatgctannnnnnnnnnnnnnnnnnnnnnnnnnnnnnnnnnnnnnnnnnnnnnnnnnnnnnnnnnnnnnnnnnnnnnnnnnnnnnnnnnnnnnnnnnnnnnnnnnnnnnnnnnnnnnnnnnnnnnnnnnnnnnnnnnnnnnnnnnnnnntaaaacattacattattatcactctatatctcaatgttcataaacattacactaacactctttatatattatattaacatcccttacaaaaaagattcttgtaatagttaaaaaaaaaacaaaaaaatgtttatataatttcacaaacctcatagataatcaaccgtttgaatccccgatccattgaaagaggtactaacatttaatgtcttcataacatttcaaatactttatatacacctttttaaaacttaattcctgtcctgccccttagctaagtactgagcttgtgaagaaaatgccatcataaggttcgtaagtaatagctagaagtatctcatagattataagttaaacctctagtgcagctctatatcagcaatcactaaataatcaacgcatattagctcatgtctagcaagtaaaagaaaaaaagaattacattcaagaacatcaggacttcatcgtaataaatctagaagtgatgacggagagtttttagttatatcaaccgataatgtggagtcaaatctctaacaatccattttcatgttgaggagtagacattatttatttatttattccagaggatcagatattttaagtatgcagtttttttttttaaatgtaagtaagcaatttgtaagattggatatttacaaatagtctgataataataaaatctaatcatgggtgattcaatagatccaaggccggtcttgatattttatgagcatgggatgaaataataaaataagatcttatatataagtattttaaaatataaacataaatcatactaaaaagcagggcatataatttaattaaaaattatgtattttattaattaagtgaataacaacattttaacaaatttaaatatgatgaattacattaatcattcaatttactccttgctatctctagtcattggcaaaaatatcattgtctcatattaaacttacatgcactttttatgttaatttattaatttacttattttaaattttaactagtattttagtttgtgtgttacatcagataaataattatttttatataattattattatgattataattcataataaatatatttgttaaaatataaattaaatggtagattcataataaatactttaaattgtggcataattttatttttaaattggaacgagtagatgattaagaaacttaatataatttaaaaaaaaaagcataaatagagagtaaattgagattattaattgagatgttttttgtccaattatagagaatgtgtgggaaatgaacttgcatggaggaaagaaagtgctacaaatttctagttgagatagtaaggctaggagagttaaagttttattatccaaatttgggattttaatttatagtataaaaatagactcttttataatttgagttatagtttgtgttttttttcccttttgataaatcaaacacttcatttcaatatattattatatctccattacatttgaattgttgacatgttacactaagataaaaattcatttaacatatataaacttatagacataacattgaaaaaaactaacaactaaaatattaatactttataatcacatgctatactttaattcagatatgaaaaaataggtgataaaaaatatttttaatttgtttataaaactaatacaaaataacattaaaaaatcacaatataactatatgtattttttaatttattttttggaatccttcttttctgtgcgttcttggggatcttacccatttatcactcctacctaggatccgtctttaataggtccaacaataattattataataaattttaatatggtctttgaatttaaattatgacttagataagttctaaaagttaattcttataataaaaaatctcttttacttatatatattattttaatcccataatacattatgtgaaatttcaacactaaattatagtctttataagagaaagttgtaatttttagtctatgtatatgtacgtaacggttaatttttagatcttggtgatgagttctttattcatttcctttaaaaaaattattacaaaagttaatgactggtgttaaaaaaaattacacagataatcgaagatattgttttctcgtacagatattaaaactttaaaataaaaaagttacaggaatgaggaatcaaataaaataactagtataacgaatattacttatatagggactagtttgcaattttaataaaatagtgactccatttggttattacacaagggtaaagcatatttggtcacggtgtgtaagaaggggacccgcacagaataagtgtgcgtttggatagcttgaacaatcataaaatgaatcaattttagttttaagcaaattttatatatttaaattatttttataattatcataaaattaattatgatgtataaaaattatgataaaattgaaataaataaaagtaatttttacttcaatcaaaatcaattttatgataattaatcatgagagagtccaagtccaagagaaggtgtcttttattgattggtagtagaagtaattttgtttaagtgcttaagtcaatagtgagagagagagagacgcagcataagcatatagcaagaagaagagtagtaatagttgaaaaggaagaaagatgagcgacgaggaaaggaagaagcaaatagcggagctgagcaaaagcctgaaagaaggagagaggatcgtgggcccaacgagacggcccgacggaaccctccgcaagcccattcgaatccgcgccggctacacccctcaagacgaagtcgccatttaccaacccaaaggagcactcgtccgttccctaatttcttcttcttattcttattattccatttctctttctctcactcttgttctctgcagttgaaaaaggagatgggctcggctgggcctcccgggtacgaccccgacgccgattccaagcccaagaccaagtccgtcaagaggaacgagagaaagaaggaaaagcgcattcaggtatgtatgctaatgccgatgctgatatatataaaattagtgttctactttactttgtttaattgataaattttgatcaatgcgaattatataatgtgttatttcaggctgcgcttgaaaaggaaaagaatgtgagtgaagtcgaagagagtgggaagcaggaatctgtggaggcattgacctcgcaagtaaatgagctcgctgtgcaagattcccaagctcaagatattgataaaagaattcgagctctcaaaaagaaggtgcaccgtttatgctttgatgattcatacccttttctgttgacgccccactctttaacaatattatgcctttcgtgagagatattaatttcatgtgtttacattggaaaattatctccccgatcagactcacacacagacctaagaattctacaaatgtagttatttgccaatcataccacgtcatgtatgttagttggatcttttattcatatttcttaagatttcagttttttttttttttttcccatgtctcttgcatatttgagcagcattgtgttaggatccaattgcaaggtatgagacttggaatcccacattggaagtatgggattttagtgtggggtttgtaaggccttgggctctccaactacaatagttaacttttgtggtgtggttctctcaaggttcttatcaattggtatcagagccttccaccatgacttccagttgcaaacaagcggcgcggatggtgacaccgacattgcaatgttcgctcaggactaatgaaagggctagtgcacagccagcccgcgtgggcgccagagctacggagcgtggtgggatgttagggtccaattgcaaggtatgggacttggagtcccacattggaagtatgggattctagtgtggggtttataaggccttgggctctccaactacaatagctagcttttgtggtgtggttctctcaaggttcttatcacattgacacactcaatttctctttatctctcaggcaattcctttttcttaaatggtgtaagatgaacaaagatttccatttggcaaaaatgtcctaaaaatgtagcaagcatccctgccctttagttccttggtgattcagtgtgctgtgacttatcctgctaatgtgtccctcaattatttattgcgaagaaaatgaaggttcttaacatgtttcttgttgcaacatgaaatagtagagttaagaattttactaaaacaaatatttaaatttatgattgatgtgatatatgcttgtcatagtgggaattggatcctctagaattctgatataagcgcagggtcaggcaatttcatctttggcagtttaaaattgtataaatttgtattttgcctttattgcttaatgtatagaaacaaaattggaagagaatggtacagtggaaactgttatgtgtgtctgttgtcctgtattttgtctccatgtcatatctagtgtttgggttgtgcttcataggttatggtgctgctgtctatctagtattgtttatgtatgagccatgaggagtattagacttaatttcatgggtataggttggcatggtttgcccatattttcaagggtgtctgattaccttatgtgataggatttgttttgtgtctgctattcacttctgtctcgagggaatttataaccaatatgctgctagattggagagctaccttgctctctctctctatctcttttatttattgaataaaagatgagttttgctgcattttgtagcctctgcagctttctgtttacattttccttttttatatgatcccttatctctcctttctttctattaatgttcttaatatccgttaaaaaatgaaggaaagaagatattcaagtaatgttgttccatgaacttttaaatctttttggctcggcagactcaagatatataagaaagaacactcaaatataagaaggaactttacttgtttctcggatgtaaatgacaatgagaaaagctctccatatactaatgatcctacaaggctatttttggccaaaaagaagctgaaaattgtggaaaaattatgtcaacaagggattacaagggaatcttattaattactatggtgcatcaatgggttgtttgtaattcctataacagtttaccattattcatgatattcatggctgatcgaggtcgaactcggccaaattaatacggtttaaatgtagtactaggaagtgactcctaggtcgtctctcaaggatctcaattgtctgcgttagggattgaaacgtgtattgggggggtttttggcagaatgcgaaaatctaaattaaacagaaataacaattaattgcagtgattagaaacaagtcagacccttagaacatattgcgcctctaatttccttggttcacgaaagataatctgttctacttaatccttatcagtccagattaattaactaagcgaagattaacctaaaacttcattacacgaattaagcaaacgtgaacctcgttagggcaaactctcagaattaagtaaactgagattactgaatcaatcaatatcagaatcattaagcatgactctaattcgaaaaatacagaacagaaaccccaacaagaacgaaccaagcagaaacgaaattcaaaaacagagaacctccattaaagggtttgcaatctgtcctagggtccaaccctaggtttagccttccattaattcagaaataacaacagaaacacgaattgaatcgaaatgaaacattaaacgaaattaaaagcagaacgaaattaaaagcagaaacaaaattgaacagaaacgaaatagcagaaaacgaaactaaaaacagagaaacgaaattcgaaattgagaagatgaagcagaaaacgaaaacaatactgaaactgaacgcaaacgtattctgaaccgaaaattcaaacagggaacataaaccctagaaacaaagaaaactgcagagaacgaaatttactaaaaccctaaaggagaactgaacgaaaataatgttggctggtctgcatgggcacagtttcccaaatatatagagtgacggacctaaacgaaaatgggcttttcctaacaattttggcccaaaaacgaaaataaaataaaataaaataaaacgaaaataaaatgctctgaaaataatgctgacgtggcatcacaatcttcaagtccatgaattaattccaagcccaattaattattaaactgccctgaaaatcaaattggaataattaaacttaaaataatccaaattaattaaaatctgaattatcggtccaattaaatcctatatgagaaatagtgcaaatgtgaacgattaaacacaattcagggattaaaatgagtacagaaagatgagtaaatagtgataaatagtgactcatcaatcccttcttagttaccaccattacggttcatgacttctcatcatcctgtattacttatgctactcaagatctaatacaacttacagaatattgaccgtttagtttaaaagaggagaaggaaatgggaggcaaatagtggaggggagggacttttgcccactcattttctctcctctcccttccaaacctttgaatcaaacaaggatttttatcaaaatccctcccctccctttcatttctttctctaccaaatacaatgttagtgatgcaaaggtttcactagtcccatttttaggtagcttcggttttttgaccataaggatggatccttgctatcatctctcttgttgtaagttgcagtatgatactgagatgaatcttgatcaagacatataggagatattcaattttgtagttgatggtgtggttcaggagaaaatattgctataggtaggttgctggaaaagtgaatgttgtattgttgttcctaatgaattctttggaatctgtttgttcttttggagcattggatatgtttccaattttccatatgttgttaccattataaaatctagtaggtttatgattttatgtggctaatattttagctagtctagttgaagaattctcagaacatggatccacatcaacgcaatccttctgggaagcactggggactttgcatgacttgtctcattaaacaaatgtgtgtgtgtccttattaatgacaaatgtactgaacatcaaataattatatcaactttaccaaggagattgtgtcagagcgaattggaggctttataaacaaaatgattgtgattagagaaatgaatattagaattagaaagtataatactatgataggctaagcaacttagttcaataattaaaggtaaaattgttttggccattgtctagagaatttgaatgcatgacatggtggatgtgtttttattctcggtcttgctaaagaactatctcaaatagtgttttcatattttcctagcctaatattttgactgttaaattcagattcgacttacagaagcattggagcagaaaagtacagagcaaaatctgaagccagagcagttggaaaagctagcaaaattagaagattggcgtagggagttaaagctattggaagatgagaagggtgaaacaaccgtatcatgaacaaagtattcgaaattgcatgacaaaaatgtgtagttttatccatgtcttgaaagatatattccatggaaacaggtttaccaaagattttccattaatcgccatcttttgtgtgcaacttgtcagataaagtcaggctgaatttggatgaacttttcaacaagttataggaaaggaaaatttagaagtaaaatcaattttctcaaaagttgaaaaatatatatatcttgattttaacttgtaaaaggattgattgattttacctgtgtttgcatcccagtttatttaaactagactttaatcttcatttgttttaaaaaacaagttgcaatctgtatttaatattgactttaaagattgcacgagctctgattcgttgccattaaatatccattaggaagcttgtagaaattttaaaaacttaatagtgtttcggtaagtaaaatggaggctgctattgtaaatttctgagggcctaacttctaatagaacccctccatcttttcctttctcattctttcacctgtaatagtctcccatattcttcccccaaagctcccttcgaccctccttgaatcggtgagtttgcttcctttgctcacaaaattttaaccatttctcacttatacatttctctctatctgccagctgcaagaaatgtcgtgagtgcagtttgagacccaaaaagggccctacattctagctaatcatttctcacttgtacatttcctgattaatataattttctgaaaattattacctccatgggccacgtaattttcctaagctcataattatttgctgtaaaactttgttgggctatccactctgaagcctgaattagtatgagtggaggaagttgcggcttcatgtggtaatcttaacggtgtttgatttcttgattgagtacatttggtttatggaaatgacctttttaattgccctcgactgagattatgctgtgctcttgacactttattttattctattttatgttgattttgctgttggttcatcaaattaattgttgatttgggataaatttattggagtggcgatgtgagaagttgtaattgatggaatgtttaccatcccccgtgtatgttgttgcctgaccaaaggaaagtgttggggttgttgtcttggaattttcgtgcttcttacctctgcgaaggagtgaaagtttttggtataattgcatggcgtatgcttccaacatgaggcatttttttaatacacctaacatgaaaagtgtactttcaaaaatatcctttacattattaaggttacggatttcgtaaccttacgaattcgccaattgctatgagtttttttttttttgtttatggattgcctagtccgtaatctgtaagaggctttttttttacggatggtgcaatccataagtttttttttgtaagttaaaatatattttacaaaataatgacgtacgaccttcacattattaacacgatgctccaattagaagcaaacctacgtttcccttaaattttcaagtatccactggggcacaagcagaacttgcttaggctcatcaactttgtgtagtcttgaccctttggaaggtcctcgtgaacttgcaatactttatctttgtttttccaacgcttgtgtagttttttccgaatcttaccatgggctccaccagcaaaaaatgctaatattttgcggttattagggtgttggcccatattaggtgagcctagctttccataaggcaaatacacttctggaatggacatgtctctgttgggcagtaatcctttgaagtagtggcattgcaaagtgccctaatgaagtacttgaagagttcgggatttgcatctgaaattcttggaccctgaatcatcaagcaaagttcatgccctttttatttgaatttactaaaatcaaaagcaacatggcagtatttttcaatcagaattggagttttgccttattaatatgtataataaagatttggataaaagatcaccataaaacataaaggcgaaatttttaattctctttttattaaaaaaagaaactatattaaagttttgtatctagtaaaaacaatttgatcgattgtttttattattctattcaatccaaaatagtaatttgatctgactatttgtttgttcttttatattatgatttataataatttgttcctttaaatattctttacaaaaaaaaaaaatcgaaagcactgtccccaaactcccatcactaatgcccttccttaattatttttgtggatccgtcctctactccaatcaattaagctaatagatcaattatgctaaaaaataattaatgttgatacatatggactaatatacaatctaacccaaaaaaaaaaagtgagagttgggaaagttgatccgacggattcaactcacagtatgcatattaaagtaaagtaggttcaaaggcaaaaaaaacatgcatgtggggcaaagtgagttgtctcttaactacacacggttctcttaattggtctctctgtgcttttgaatttcacaccgtgtttggtggaaagcttgatattaaaaattcaaagtccacctaatttgacaaggaaagcaccaggtagcgtttcatctaatgttttctccatatagttgactatttacccaagttcatgatgatgtcaacaatgcaagttgtacaactaaacttcttccttgtgcaataaaatgccatctattacgaaggatgttttactgtcacaaaaaggatgtatttggtacgacaacattcagaaaatttataagtttatttgactaatttacaaaataatttgatcaaataaattttatttgatacgagcttattttaatagtttatcatgtattattaagtggtctaaaataaataatcagaatcacctaatattgtttttacatgagcgaggttggatttaacaaaaattatatcaaaatcatttatgcgtgactatttcacttcacttgcttgcaaaacatcaaaggaatttagtttagttgaataaatagaatatacgagtgttataaattttttaataccattttagattcctgtgagaaaaaattgactgtcaaaacttgacaacttgaaaggtactttagtttcatatgattgagaatgaggcaccaaccttcttgtgataatattaaattttctttaactttttttgaagtaaaggatacttgattagaagattactaataagtgaatacttaacatataagaaggaggtggagaaagtgtaagtttgtaaccgaccacaaaaaaaagtactaataatctaatatgaatataggatgaagagatccatcacagattggacggtgggggaccaatggcacacaaaaattcccatcctatgttttggagtaattaatgaaccagtagcaattatataagaagtctgtatctgtcatatatatatatatatatatatatatatatatatatatattctgcatcagttttgttaaaataaaaaactctgtaaattaattggccatgtgttattttttgcacatgaatttgaaaaaaggtgggaaagcgtgatacttttagctgtccagaaaataaagtaaagattaaaaaatttgaatgtgccttgcacgtgggatactttattttttttcaaagaggatactttaaaaattataagccacaccttattgtttacttaaatcggagaaaaataacaaaatcgtttatatgttaatttatttcgctttatatgtctatacagtagtaatataaagttcccgtaaaaaaatagtaatataaagtccacatttctcattaatcccattgatctttccttttgtagaatctcgttaattttattaactaatctttcaaataaatgtttgtgggaatggaacaaacgttgaagtacaaacaaacaggaagaaaaacaacacacacacacacatatatatatatatatatatatgttataatcatcattaaaattctaatctaaaactccatggttactaccaaaaaatttcaccttcagttaggctgtaaattttctttgatgtacagatatctttcttcgtccaaacttccgtggacaagtttttttccccgtagaggttcatttaacagagatactaataccataagggatttgttaattaatatctttaagatattagtttaaatttttttaaaaaatatttattgtgtaaattatagaaaatataaaaaaatataaataatataattttttattttaataaaaataatttattttaaatttcttaattaacgcattgaatgcatttattagcatttgtcataccataatcaagatagtaataactaacataatcaatacaaaagttaacaaaaaagcaaacattatatttgaagaatagtcataaacattaatatatcatcattaatcattgattaatctgaaatgaacaaagatgggcgatgcaatggaaagaaaccggtggttatagaaagttcagtttcatgggacacgtaggtcccaaagtagaaaaacaatgtcccatatgaatgatgatgatatgatgccatgcagatagtacgcaacaagtgctaccacataattggatgctcaaaaagctgttgcaatttcgagtttttgtgaaattctataattgattcaattaagctaataaatcaaaagaattaatttgatcttatatattaaaaatttaaaattatatgtatatattataaataagtatatgattaatattatttgagtagaaaaatttattgatattttaagatctaaaatacaaattaataataatctaaaattaatttttttaaaaaaaattcaaaattttaatttgaaataaaaaaattaaccaaatcagatttgttcaaatatgatccaaggacctacatagttggatttagtctagttatcttggatcaattgtatgatcaatttaattaaacaactaaattttgattcaaccgatcagaccaatctgaattaaataacacttaattatacattattttatatatttattttaaaaaattatatataaaataattatcacttaattttttaatgaaaatttctatacaaataatattaaaattaaaaacttttgaaagagtaagtaacttatatatgatcaatataaatgatccaatcacattttctacgcaatgatgatcaaacataggtttatattaatactcaaacccttcactattaactaagatttaacggatataattcaattagttaaacttatgtttaagttattatagataatttctgtttgatttttaccaattaagaaaccttcactttttaaccaattctaatagttttctattatgtataacaaatttattatactactaattatcttacaaatcatacttagcgtaaattttaattaattaattacctgtaaaatttctacaattaaactctattaatttaaaaacaaatatacttaaagaaattaagaaaaaaacaaaaacaaaaaagaagtcctatgatttgttgttcctttgatacagggtcgggtcactctctcttctctctccctctaacgtttcgaccacatggactgcacgcacagaactctccgccactctctctcttctctttctctatctctctctctctcttcatccatattcaaggctctcaggactatccttcaattttggacccttcaatattcgtgtgcaactctctttccattttctacatctttccattttccattattctctccaccgtcttctcttctggtacacatttttctcctcttctttgcagctctgcaaatttctctctctctttttctattaagatcttgtgggtaactgtgaaagctcgtgtctttatttttttcattgtttttcctttgaggtaattatgattgcggctttgggtctggttctgatgaaggacttcgtttttgttatttaagcttagaataattcgtttttgttttctgggaattttgtgtgctccagaattactatatgttgggttgttttgaagtgtggttgagctgaaacggttaatgatgggtttttgttcgcttttgtcatgtgttggatcttaaaactgtggagtcttctgggtttgttcaaaatttgcagctttttttcattgagttgttaaatgggaatgtggtcctcttggggggttcgttttttcccctgtttccttattcgcgtttcatgctctgagaaacgatttggtttgcatgtcttttgttagtgtcatgaataatgagttatgcagagcctaacttttagctttgtgtgtgtgttttaaattttttattggttcgttcttgtactgtttaatgtggatcttggaattcttgatgtcttctctatggttgaccatatttcagttttgaatttatttgtgaattgcagtggcttaatttcatttggctaaaatgttgtggttatttgaattctatgttttttcattggcttaatttgcccccttcctttttgctatttttgctttaatgtttatcctttttacttattttactttactgtgttttctggggtcaaccctttgcttgttttttaaattttttgtttggtggcttttcatttttgacttctttgggttgtttcacattttagaggagaaaatatctcatgtggtgtgattttaactgcaggatgtctctcaagatctgtctggggagtgaagcttaatttgattgttggtattaaggaataagatctcattcaacacactaaacaataaggattttgcaaatgctaaattttggcaggtccagaaatcagtcaagggcagccagagctacaacaatgggaggtattattctgtcctaaaatttgatcatgaatggtagtatgatcaactttcttattttttttctcctttgaatgaagtttggttgcttaaagtattaatcaatttgaaaatgggattagattattggaaaactttactttttttaacacttgactataggatagactgggtgcagatatatgaattgacaacataaggtgttggtgaattcattaattgtcaatgtcctgtaatttgttttgtgtttgttgttatttcccccccacttatcatgtaattggtgtattaaaatgtagtttctgtttttctgtcctttaggcatggattatgcagatccaaaaaggaaggggaattttgttgggaaagtatttcttgctgcggtattaacaacactatgcataatcatgatcaagcggtctccatctttgaattcccctagtccggtaatccctataccattgatacaattaaaatgccatacaccattaccatggtcaacctacatatgttagtgcatgtgttatgtttgttgtatgacgtgtatctgtagattagattatattgtttattgtagttgatgttataatacatttgtacctaacaattagacttgggagatttaggtataaatcctgttacacatgaatacaatgttttcgcttgacagctataatctttcatattttatttcattgtgaatttgtgtgttcatcaaagagactggagacatttattaggccattgaaatttgcgagacctactgcatagtggttttcagttataattctcttctttctctcgctcaatctttttgcgtaataagtcaactgtactgttttctcttttattcatctagctatttctaattcgtttttttccttctgtttctcccccctttttcagtttgcagttcacgaacctggagtcactcatgttttagtaacagggggtgcaggatatattggttcacatgctactctacgacttctgaaggagaattatcgtgtcaccatagtagtatgtcaattcataaagatgattctgttaaagctaaatgcactgatcagtgtggttgctacatacataacatttttttttctggcaggacaatctgtcacgaggaaatttgggggccatcaaggttcttcaagacttatttccagaacctggaaggcttcaatttatttatgctgacttgggagatccaatatctgtatgcttacacactttgttacaagaaatactttggtgtcacttctttttttattattttaatggcatatatggggaaggccattgaaagatagtttattcgactggttatcaggttaataaaatatttttggagaacaaatttgatgccgtgatgcacttcgctgctgttgcatatgtgggagaaagcactgttgatcctcttaagtaagcacttctagattttgtttgtcacatttatctcagctgaaaaagttgtggaagtggcacttatgttcagtttctaacacttctagattttgttcgtcacatttatctcagctgaaaaagttgtggaagtggcacttgtgttcagtttctaattttcaccatctatatcttagtaccacaaatcacattttcttttagatacacattgacattttaaacattatttgaactggcacagagatttctattatggtcttggctttgccaattaagtcacgcattgagtcccacaaactgtgatgcaagataatatatttttctatttactgttcaatattatggataagaacttcaaagacaaaccatagttgttcttattgacataatgtttacaatgcataccagactaataacagaaaagttggaccatttgaaaatcatctttatctagaggatatttttggtttgagtgtacctatatttgcaattgctactctatgaattgcattatgctattgctattgccattctttgtaattagatatgattttgttgagagttgaacaaattgttgttatgagaatgattatttagtgttggattgatcaactttggttttactttatagatttaatttatttctaattcgcatgtttgccaggtattatcacaatattacatcaaacactttgttggtattggagtctatggctaaacatgatgtgaagacattgatatattccagtacatgtgcaacatacggggaacctgagaagatgcccattacagaagaaacaaagcaggtgggaatctaaggatagttgaattatgggggttggttgagaatattttgtttttcattgcatcctgatttgactgtactgcttgaggagatttagtgttaaaattgatgttctatttctatatatcaggtcccaataaatccatatgggaaagccaagaagatggcagaagatattattcttgatttttctaaaaactctgaaatggcaataatgattctgaggtttgtattttggatttgcatttcccttcattttaaatagatttttatatcttatttttattccatttgccctttgttgcaaaagctgtaagtgattcttactatatctgaaatatatggaaaccttgcaaaatgatccatttaatcaatgcatagttgggaaaaattatggagcttctgacacgttcctttatgtgtggaaaacaatcaaaaagaaaaaacgacattattgtatttggattcgttggctttacaaaactgtctaccccatgttgtttggacaattgattcatgtacagtttgaggtttgactgtggatgaaatatagccaatcattggaagttgatgatgtttcagaattatctatgctggtaattattggtaacttttctttgggaaaccaccagatacttcaatgtgattggatcagaccctgagggaagattgggtgaggctcctaggcctgaactgcgagagcaaggtcgaatatcgggtgcctgctttgatgctgctcgtggtattgtacctggtttaaaggtatgcccattccatttatgcttatggctaaaaaggaattctcaatagaagtcaggctatgtttggatatttaatgataagtgaaatagaatggaatggagcgaaatgggcttaaaaagttcacacttcatcgtttagactttagatatcttggaatgggggaaaaagtaagccctagttcctcccacatgacacctccccttccccccaaattagagggtaagaaacaggagtattggatggaatggattcaaatgcattcattcaagttccattccatcccattctatttcaaataccaaacaatagaacctagtatcattctatttcattacttcatttcaaaaatcggaaattgctcttcttaaggagattacagtgcatcatatattatgcattttcagaggaattgaaccaatatgaggcaactagcttaggcgtaatatttttcagagccatcaaactcttgataaatcttctaattttcttttccatacatttagtctagaatataagtttttaactgaattttccaacatcagaataatgttcatattttcttgctagtgaaaaactcgagctgttgtgtatttaatttgaatttgcttagtattcatataagatattgacttagtcctacgtttcctgccaatcacgttgaagaatactacatctatggctttttaaccgttagaggttgttgcaattgcatttcatttatgctgaaaacttggtagaaaaaaggtttgtaagctcctatacaaaatctgaaaagaatttggtcatacaagtcctggaaatggtttgtaagcttaaacgtttaattttatggtacatggaaatctttgagcgtcaataataacttatttcttatacttattatttacaacttgctcaaatggtctagatgattatgtcatgaacttgtccaattttatcaaattcatttcatgtagtacttgcaggtgtgctcattgtgtgctgccactttgcaggtaagaggaacagactataagacggctgatggaacttgtgtacgagattatattgatgtaactgacctggttgatgctcatgtgaaagctctggaaaaggcgcaacctagtaaagtcgggttctacaatgttggcactggaaagggtaggttaaaacactttgatcatgaatatagcactttaggggtcgtttaattttgaaaaaaaaaaaaaatttcacttatttcctgcttcttgatatttatacaggaaaaagtgaaaatattgaagggccaaacttgccatcttgttttaaatctgtttcctgtttttaaagatttgtacaggaggtaaataaaaaaaaaagttattctgtgtttcctgtacaaatctttgaaaacagattaaaaacaaggtgtgttttttataattaacaatgaaaacagcaaatgaagacaagaaataaaagcacaagtaaacgccccctaaaacaacaaaacatttttttcactgttttctgtattaacatctgaaaacaagagataaagtaaaaacggaaaatagaactggaaaatgttcttaaaccattgtacatttctttgtagtaaaatagtttagctcataccttagttgtgtcaagattctcacgggtgttatgtttatcaggtagttcagtgaaggagtttgtggaagcttgtaaaaaggccacaggggttgacattaaagtagactaccttccacgtcgtcctggcgattatgctgaggtgtacagtgacccgacaaagatcaaacatgaattgaattggattgctaagcacactgatcttcaacagagtttgaaggttgcatggagatggcaaaaatctcatcgtgatggttacggggtttcaaatgcagtactttgaattacttagaattctaacatagcagaagactagaagaaaccccgacagcatccatttcagctgcccttctatatcttagaataggggttgatattatttttttcttcttttactccagtgatttggcactggggaattttttcttaggtagcatgtagtccattcgttacatgttacatgtattcaccgtataatgattcaataatataatgcagaggctctattataaattttgtctacaatgatatttatatcacattactttcatatctttcatttctctctctctctctctctctctctctctctcactttttcccatcccttatttctcttcagtcttacaccacaaaatacatatggtttttcatctttgaattctttccttgtcaagggcgtggtgtagtaattgttgtgcctgaatagaatcaacaggtggggggtccttttggtattttttggtcaattggacattacggagaactgaccataattccccaagtggaagcattcattgaggttagatgggacgcccgtgggttcttgcactactttgcctaagcgttagcacaggctaaggagtgtttatggaccatcgtttcttcttgattagatccatgcccttcacacatggccttcacaaatgttaactttttagtagcatttttaaatataatacacatgcacaattataaattacccttataatttgaaatataggaaaaaaatnnnnnnnnnnnnnnnnnnnnnnnnnnnnnnnnnnnnnnnnnnnnnnnnnnnnnnnnnnnnnnnnnnnnnnnnnnnnnnnnnnnnnnnnnnnnnntatatatatatatatatatatatatatatatatatatatataatttttataataataataataagtattcacttaacacgtctttaaaaacaaattattggttcgagtgatatttgactcatacttcttatgtaagattttgagttcaaatttagtgaattaaaaaatgcgatttgaaaaaaagactccactaataataattagtcaagtttcttgatagatattagtcactagcaaaattgataaatatttcacatcaatgttatggtgacaaaaaagcgtgtatagaatgagattaagtaatctaatcattgaattgaaatattttataaaataaatttagtttataaaatttcatgtaaactaaaaattaattgatatttaattgttctattttattgcgatagatatgttatttaaaatatcaatcaatatccattattagatatatatcaacaaatgtctaaattatatcaattttaatattaaataatttaataactaaattacttaatttcatattatacaaagagttattaataaatgtagcttggttctttcttctttacatgttttaaagttattaagacataattttatgacaccctacaaaatgtgtgtgcacgcgcttgtggtccttgtgtcatgcatgcatggcctaagacttttgaggggttgtcttaggtgttgtgtgttgtcgcttttggtttatgaatttgtggtccagtatctcggtgtattcatgaatgaatgtaattattatttgagtgctaatcacgctgctttcagtaacaattaaattcagataggtctggattaatcgaacaattaattgatattaaaaactcttatattaggtacgaaggactacgacttaattgcatttttttcatcataattttcctttcgagctatacatgcatttgaagtgaatttgggatagaagaagagattgataggaagtaaaaaagaaaaggttgaaagagaaactgaaaaatatagtaataagtaatgtgataagtaaagaagagataaaagaaaaaaaaatgaaaaaaagaatataattacttatataatatatattattaattattctaaagttaatgtaatgttttttctccttctttacaatgacaagaacacattgagaatattcttaaaatttaattcaatcatgactactttataatttgttacggcgataataatatatccaaattaaattcattctatcttattatttattgtcttaactacagatgattgtatgccgaattttacattgttatacactcaaggatgcatgtttttcaaatgcttcatgtccacaatatatttactcaccaaaacttaaggttccatttggtaaaaaaaatatgatagaataagatacagatttaggacttaaagtcaattggaatatattgttttttagaaaaatatatttattatcacatatatgaaaatgaaatataaaacatgataaaacatatttttggttcttctaaaattttaaagttcagttttaaatttnggaatatattgttttttagaaaaatatatttattatcacatatatgaaaatgaaatataaaacatgataaaatatatttttggttcttctaaaattttaaagttcagttttaaattttctatttattttccattttttgtccttctatttttgaaatgcaccattttttatcctcaaagtgttatctaaatcactttccatctttttataaagaaatggaaaaaaaaaatttgaggtccgacttagaaaaaatttaatgaactagtaacatattttatcatataaattataataaatggtccaatcaaataaagtataaaatgagcaaaatataaaaaagaaattagtcaataataaatatagggagcacaaatataataacagtatatatatatctttatgcttttttacaactgttaattatcctattttgttgtaattaattatttgatacaccattaaatgatttgtcaatccttagtatatatacaatagataaaatacaatagataagaatagttgaattattctctctctctctcaccacaatcatcagtccaacaaccccaccattttctataatgccaatcattatcattatcaaccttaaagttattactatatcattgtcactatcattattaacatctatcattaccatattgttatcaaatataagacaagatataacacaataattaaataggattaaaatttattatactcttattatcatatctaactgccaaatgagtggtaagaataattctttctgtcagagcattctcgtccttgtcatcatgcatgcatggtctaggactttcggggtatcctacgtgttgttcgttgtcgcttttggtttatgaatttgtggtccagtatctcgttgtccaatgaatttcgattattagttgaatatactaatcacgctgctttcaataacaaatcaaattcaggtgggttgggaccatattgattgatatgaatatctcttttattaataggattttgcacgtacggatggaccatgacttattgttaaatgataatagctacttaacatcactttttttccctctaaaaaatgactagaatacattgagaatattcttattacattatcatcatcacattacatttagacatataatcgtataaccaactttacattttaattgtttggggcatttgtcacctttattatgatattgatcatattctccatttaatctgcactgatagataaactatacacccaaagattttcttcaaacttcacaatatatgcactcatgaaaacttagtagtggtgaagacgtataggaattccctctgctgggataggtatcgaagaacctgaaaccttctcatcaggaagtataacttcccacttgaacttggttatgagaatgtgaatgaaattgaggaccacaaaccgtgtgtagtcttttccagggcaagttcttggtccagctccaaagggtatcaaagtgtatggaacaggaacattcccttcaaaccttgagggatcaaaaccttcaggttcatgaaagtaatttggattcttatttgttccaataaatgcccaaaagatctgtgaaaataaatgcaaataaagaagttagtgacaaatttaatttacatgtttcaattaatatcttaacaatctttctttatcaaggtaccttccacccctttggaatagtgaaaccttcatagtttatatctgttattgcctctctgaatgcacctggtgcagttgggtagagtctcatggtctcttgtgcaacagcccatgtgtatttcaatttctgtatgctgttccaatctagtgcagtaccggatcctttggattttgtaatatcagcatgctctgattcaaataaaagtaagcaagatatatagccttttttagaaaggaaaattaagcatacataattctgttgggccttatttgtgtctgccacttatatttggctatgtggtatgtcaaccttattttgtttcagatcttgcattttgagtccaaaaagaaaagccaaaaacaaaaactgtactctcctggcttaaacccaaaatcatattttatctcataccaccttaaaatagctacaatattttacagacaaaacttagatgcagtttcttagctatttctggtattgttttctgattaaaattagactttcacctcagcaatttgcatgataaagatttaggtaaaaagttactataagttattaacgtggaactccaattctgattagagagctgcactaaaagtagctaagaagctgaatttaaattttgtcatgttatatacaattagtatcttaaattaccggataagattttttggtagatatcaggcctctgtccaatgtgtttgatcatgaaagccagagtaatagctattggtatgtggccggaattcatcaaccccatgatgatgttgcttatttcaagtcttggcacatattttccaccctgctcagcaccgactacgtgtgctattaggtcatccacaacttgccccttggacaaagcgtcaatcttctctttgatcagaaattggatctctttccttatagcagctgcagccttcagtgccttatggtatgtggagcctggaaaattcacaggaacagaatagatcccaaaatacaagttctcaaactcactggcaaattttggtccatcaattcctaagaagaattggcacacaagtgtaagggtaaaggccttcaccaaagggtacaccttcacttctttttttccttcccagtgtgtcatgaaatgttggtgcatggtggattcaatcttgttccccatgtacctagatattccctcaggtttcagaatccccaagatcttcacaggagcagcagatgcagcttcttgtgttggttttgtcttaggtgcatgtgtttgatcaggaatgttgaagaacctgcgctgagtcttcatgtacgaaaccttgacaagctttgtctcattggtggagacaaatttgtttgctccagggccacaaagaaccactgttgactctcctagaatgtgtgtgtggaagatctctgaggagtgcttttgaaccctctcttgaaggaaatgttcaatcttgttgaacaaaaattggtaggtttcacccactaggggccacccaaagctacctgggggcaagcttttagtgccacctagtactagtagtcttcttcttttctgcaaaacaaagatagatgcaaccaaggtgagcaaagtaagtaacaaagattgcatgaaaaaacccatttcaagctacaaagtttctatgtagatggtagtctagaaatgttgattgttgaacactctttataaagaagtcaccgagccagtcaatatttctctctccaactgatcatagtttgttttggataataattcatgacacccatgacctaacattagatgacacttggacatagaaaaaagaaaatgtagatataatatatgatatgatatgataaaaaaaacagatattgataaaatatttaatatatacgagtattcatacatcattatgaatccattttctttgaaaaatgagacaaagtttaaagaataaagaattgtttgtgataatgattatatcgttgtcattgtaaaaataaataaaaagaactgcttctgtttctctctctatacagcagatattataatgtaacgatattgttttactacaattttttaacgcatgctattgcactagtgatttttaatatttttcttaaattttatctatatatattgtatatgtgcatgcaatacacattattaagctaaattgttaagttgggctccgctgggttacagatataatcgtaaattactctcgaaatgaataaaaagaagagcagtgaaagatttatttcctgcatttttttttaagttttcaactgaggaaattttgatttaaggtcttcaacggaacgataccttattctacattcaacacattggactaattgttaaacaaattttatttttttaaaacttaaaagaggctatagaatagaaagaaagagagataacaaaaattgatagagttcactcactagaagccacccaaaagtaagtggaggcaaccttttactgccacctagtcttcgtccttgcaaaacacatgcagtcaaggtgattaattataattagtataataaatttgcaagaaaattacatttcaaactacacaagttatagatgatagtgcatgttgaagtgcttttatatataggtcgccaaataatgtctttggtggttttttttttaaaaatttctaaagctttcctatattaggggtttgaataggttttggtcaaaattaggatccaatctaatcaaattcgatcgattcggtttagttcgattttcaaatttttttttgaaacctaacccaactcgttcatgaacggttcggttcagttcggaccaacgggttatccatttaaatttttttcttaaaactactattttatataatgattctttcaaatatccactacaattaacacaatattatcaaatgtatgaaaatagtaaaaatgatttatttaataccatcaacataatgttctaaaatagacttataatataaattaaaacaatagattcttgaacaagatttactataatagcctgaatacaactattttttacaaattaatttcttgcaataagttttactataaccaaaaattcaagtcaacactcaacaacgaaggttatttcttttcttctcatccctgtttccatcaaaatctcaatgaatacaaaccagaaaaatcacgggaagttaaaaagcttcggaaaagaaaaagaaagcgcaaaggaaaacttgatgcttgatcgatctgatgagatgagatgagatgagaaagaacagagaaggagctggtgtagaactgcaaagaagaagatgaaatgagagagaacagaagcaatgaagcacaaagaagaatatgagataagacagaacacagaagtgcaaaagaaaaagaaacataaacccgtgacatttataatacagcaccttcaaagcaagaatgagatgagatgattataggctgacccttcattcggccccacacctttttttattgtcaaaataattttttagtttttaaattttaatatatatatatatatataaataaataataaaatttatatttttattacgagttgacagatcggatcaacggatctataaatctagacttgtaactcaattcgtatatgaacaatttcaatcaaaaatacataaataacctaacttaaattattcatattaattcagattcacacttaacccatactcatgaacatccctacccaaatcatgatttagtcaaagattatacaaaacaaacttttccacacatagcgacttttctaactacatgcaattgtctattgtacctatctatctctctacttggcatcatgtatataatttatttatatttcttgctggttattatcttttctctcaccctacgtataaaacaatgggcgtagagttgacttttgacaaatgtccattggtaaatgtcatcattaggcacatgacatgttattaaaatcttgaaaatttatgtatggtttgatcgttcaaaattattctcttttttgttttttgtttaatgagaggtattcaagattttttatttgacatccaactaattatctctcctcttctggacccattttaaaataaaatgatacttttagttgtgactctatattcaaaccaaagatcaaatcttaaaccttaattaaggaaactaagtgttaaaccatttatatcaacaatttctaagaaaactactttttttactcttaaaaaaccgactcttgtcagacacattccctatatatatatatgtgtgtgatttttttattgtaagaaataagtgttataaattgactgttagatcatatttaaataatctagattaaaacacacacattaacaccttaaaattttcataacagtgatttgttccaatcattattgacggacttacatgcaaaaattttcttaaaaaaggtagattaaagaggatttttatataacctataatttatattataatttttgaatttttaaaataaaaaatctataattattcttcatttaattttttttttcattttaggatatatatcacgaagttttatatcaaatcaacttagtattttttcactaattaagttattcaatcaaaagagattttcagttctcgtgattatttttgtaagttaataatgagttaagtctacattctcgctattacctaccagatcgtattggtcaagatgtatgatttagttgatggaataggatgtataaattattgtaatttttttgatattattttatattcttatctatctaaaaatatcagaccgtatcattacttgataacctgccgccaatgaagaaaggatcaaagttatggcttttaaaattatgaatagacaaaactcataatcaatgacattaatttgtactctacctttttaattgaagattaactaggaatttatacacactataaaaaggaaatctgctagtagtttagtactgtcgtcaggtcactatagtcttgcccattaaaaaaagtacaagtacgcataaagacaactgattattaatcaaaatgtatgaagcagcataagagtataaaataaaaacaaacatcagcataaaaaatgaaaaaaattataaacttgacaaaatatctcaaactatattttagttgtatcgatatatattccaagcaatttaattctttttaatacagcaataatcatactatagttgttacccgattcttagttttccctcggcatcacttttctcatagtacattatctttccattattaatgttgtgccaagtcatttgaattgttttgtttgtctccattgttagttttagatggatgctctttgtggtcctgtatctggtccttcttcactatcaccggacattcatacatattgccattaattggagatttaattttccatagcctccccactgtaatataaataaaagtcataatagttgcttttaagttttatataactctttaaaaaaaggtattatgtaagagctatacgtgcttgcaaaagtcaagtatccattaaaataattagacccaaatctaatgagtattcattaaaactatctacaatacataaataataattcatttatgtgggtctctctatttatacaagaggataataaaaataagtttggatcatataatcatagataaatacaatgacgaacttacataataaataaaaaaatcactggtatataaatgtatttcctgaatttaataaaattacaagtaaaaatatagctaagattcacacatcttattctctcataataaaagtcttcttacttgatatgccacgtgtgtgtattgagaaaattaattgagctagatgtcatatccataattaatgttttattaattcattacaattagttccaatattgaaatggcatatttgtcttacttgtaaaaaagaaggaattaaaatatttcattaaaatggcaatgtctttagtttatcaacacactctatataatcaatatttataataagagagtcttaataaatactaataacacttctcttatactctctctatcatattataattattatctaggttcttttatatataagaaaaaaattaataaaaaaataaaaaataaataatttttttataaaattaatctttatcatggttaactcatttttcttgttttgggtgtgtgatacaaagaaaaccatcaagaagcgggatgagctatatacaccattattttttcttatacaccattcatgaacagtgtctttccaaaattacccttcgcttttttaacgcttttatacacggatacataatattgatacttacggattcttcaatccgtaagaattttttttacatgtacggattgggcaatccgtaagcccaatccgtttatttttttttatatacggattgggcaatccgtaaatccaaaccgtaaacccaatccgtatataaaaaaaataaactgattgggcttacggattgcccaatccgtacatgtaaaaaaaaaattcttacggattgacgaatccgtaagtatcaatattacgtatccatgtataaaagcgttaaaaaagcgaagggtaattttggaaaggcattattcatgaatggtgtataagaaaaaataatggtgtatgtagctcatccctcaagaagctaggccagcccacctaaggcagggaggcccgtctagcagtagaacaaggcctaaaaccctacccatgtgggctatcgggtttgacgacccagatcaatccgcaagtaggagcaaataggatttgtttgttcacttgttccaataaaaagaacgtcagtaacgcgattatggcctgagaagaacgttggaagtgataagtgataacataaaacagagtttcgttgaatctgcactaaaaccctacgcagacatcttggtgtaagtccaatcgatatagcagcaatgtctacgctcgaaattgaagctcgggagtaagtagtttcatttgcgagctcttgaaaataggaatttaattttcttcatttactgaatcacatgtttcaattttgtttgacgtctaattgaagctcgtttaatggttctttcgcacaatagatctcttttttcttttaaatttatgtgtaattttcaatttttgtttgccccttcgcagtgtcatcaaaattgtgcttcagttttgcaaagaaaattcgttgcatcagacttttcagatgctgcagaacgaatgccaggtttctcttaacactgttgacagcattgaaacctttgttgctgatattaatagtggaagatgggatgcgatattgcctcaagtttctcaactcaagcttcccaggaataagttggaggatttgtatgagcaggtattttgtgctgcgtgtgactcactttggtttatggcttgtcactgtttagtgtatgttcactcaatcacaaacttcaatgctgggtatggactttttgatggcttttaaaccctgtcatttatatgaacagctttaaattttaatttggcaatgaggttgggtggagttatcgagatttggtaggataggctgaaatgttgaaatagaggctggtgagggtcaaaatagtgatgcagttggcataggaaatgctgaatgctgttgctaatcaatcttcctagatgaatgttgttgttaatcaatctgcctaacctaaactcagttgctggttagtgttagcaagtagtagctactggcatggtgccctttcagatattgagttgttgattctcattttcttgacatgtgctttttgtgtagctggttcactagcttttaagtgcataatcattttttttttaattatgtgctgttcaaattttaggggagttgtaatattttctgtgctatataagtagtttaataatttttaacnnnnnnnnnnnnnnnnnnnnnnnnnnnnccccccccccaattggctaaaatacaacgtgttaattacttatttcaaaaaagagagaatcttaaggacttcaataactgatttaagttattaattccactctccgcatgggtggaataaaaggtgtttaattttggtagaaattgatgctgaaagaatttattttggaacaatttaggttaaaaaaatattatttgtatttgcaagtgatattttaagagtgagttgagaagaaacaattttgttagatggcgaagtataataatttttgaactatagatataaataattatttgtgccccacatctggattcaattcttgtcaatggagtaagttaaaaaatttcacttgtctttgagaatgcttgatagttgccaaatgaggtaggctactgggaatcaatttttcccacttcactttgaaagtgatgctaacaaattaggctaaaagagtattgagctgagccaatacaaataaagtgatattcaggaattgttgttcagcagtgtttgactgtttgctattcataaacgcttgtcttgtagtctgtaacacttgatctgtataacactctaataatgttgtctgtttcagtcaagttagtgatgtttcaaatagatttgtattttaacatgattgcagattgtattagaaatgattgaacttcgagaactggatactgcacgtgctattttaaggcaaacacaggtgatgggtgtaatgaaacaagagcagcctgaaagatatttgcgtcttgaacatctcctagttagaacttattttgatccaaatgaggttagaaatacattctataattttatttttttttcaatttcatgttgtgattgttgtctaaattaagcaacttgttacttgtttcccttttttctattttgtttctgcactctgttacaattgtttgatcattcagctttaactctgatggaaaattttcaaggactaaaaaaatcattaacacttattattatctgttcttggaataatgagtattatagaatgaattatgacttttgtagttttatttctagccatgtcctcaggattgatatttattggacttcattttgtttctttgcacaagggtttatgatttatgtcctatgtgacaggcttatcaagactcaacaaaagagaagcgacgtgctcaaatagcccaaggtttctgtcttttacttttgtagtagttactatctaattgtgatactattttttttttctttttattttaatgaacaactgtttcttgattggaaatgaaagttttcttcttccattgctagggatacagacaaacagtttgttatttatcttttttttgggggttttactttaataacttctctttcattgcattttcagctcttgcagcagaagttactgtagtgccaccatcccgattgatggctttaattggtcaggctttgaagtggcagcagcatcaaggtaattgcatggtaacatgttgatgccacaataaattactttcatggtcaacttttatatgaaaattaagatttatcatcactgtggtcatctgcttacaagttcttttgttgtgtttcttatgcaattcactgtgttatttattttttgttcttttggctcgggagccaggacaaagcctttacttcatttctgcaacttatagatgctagaaatgaatatttcagttatatgcatgcatgatgcatctttcatttctctaataataagcagaaaagaaacttcttgttggcaagccgctttaattatggtcgctctaagcctgccttcattgaagcctccaacaccttctttgtggcgtgagcggctgtgtttagtcatgcatcacttagtgatatggcataactgcctaagtagtgcttataaggcatgtttggttgtattggaaaaaaatccaagttccacatcagctagagatcaggccaagatagaatatataagtggtgggcaaccctcaccccatgagctagcttttggggttgagttaggcccaaatccaaattctaagatggtatcaaagcctatcctagatccatcaaacgggccacccaccatgtcatccacgcaccaagcccaaaagtgtctgggcatgaggggatgtattggaaaaaaacccaagtcccacatcgactaaagataaggccaaaatagacctaaacccacattctaagaggttgtcatgatgctatttgtaggaaaatttatatctttacatcttgattgagctgattgagctatgctttcctttgggctttctcagggttacttcctccaggaacgcagtttgatttgtttcgtggaacagctgctatgaaacaagatgtggatgacatgtatccaacgactctttctcacacgataaaggtatgttttctatattcatttaggcattgtttcacagtttgattagttttattctgccaaatcacattgaaggttgcataatctgaccatttatctatttttctttcatatgacatttgttattcatcattattttccctgtcttattatttttaaaggcttgcataatctgacccttatgttttgtgtctgcttgtttagtttgggacaaaaagtcatgcagaatgtgcttgcttttcaccggatgggcagtttcttgtatcatgctcagttgatgggtttattgaggtatacataatttgagtttaaagtttcattttcaacagttttcttcctgatttttgggacatatttctaggtgtgggattacataagtggaaagctgaagaaagatctacaataccaagctgatgtgagtgagtttttatttgaatggctttactgccaagaataaataaatgtcttgtatgtgatagttgatgatgaatttggaaatagatatttggctgatatatttccttggtaagattcacttagccccaaggttaccaaacacttttgttactctggtacctttacgtttataactgcattaaaagctgtagaaaagatatttcactcagatctctgttgtcattttaggaactatttcaactttgactgtaacattaagtacagtttggtggttctgtaatatatataaatataaatttatgcacagattactccttttactcatgtgattgtattttctttcatgatacgatgtcttgttttgatgatttgtctcttcctcactttgtgttcagtaagtgtatgaagttgtgaacatatctgcttgatttatgctgtctaagaattttaatactatcgatttaaaggaaatttcttatagtttaccaaaagtctttgccttagacattttctgattctatgaacttgcaggaagtgttcatgatgcatgatgatgctgtgctttgtgtagactttagcagagattcagaaatgcttgcatctgggtctcaagatggaaagattaaagtgagtaatacttgtctgcatttaaggctgcatgagctaacctttagaagaaattcttgtattcttgattttgtagatttttatattttcaaggtgtgcactgcacatattttttttttgatcagcaaagataatatatatatatatatatatatatatataaaacagtacaaggagtactgctgaagatacaaaacagcgggatctacacagaactttgatggctttataccaaagccgacgaagttctgacagatcgcgcaaaaagaaaaaaccaaagacgaaatacatgtaaattaacccctccccaaaggtacaaaacactctctcaagttgctagaccaataatggaaaggggtatcaaaaccattctctaggttcctcagccaagaccagcaaaagaaaatggcatcttccaaaagtttgtggccattaaaggattcattatgaaaaaggatctggtttctaagattccaagtacaccatgttaaggctgtccaccaagttagccacctagataaagctttcccacgtagatggcaaaaagaggattgtctaaaatgctcctttggagtgcactgcacatataacttcgctatttctgtgaaatagaactgagctaccaaacaaaattcatttggtgaaatttagattgtatgactgaagcatgggttaatagtgaatagtgtcaaattgtgcaacaatagtatagtgatgatgtggggaagattggcctctggtagctttaatttgtgcttgcattgtgtttttgctttgcactgattgcaatctagatggtggtattttatggacaaaattgtaaagtggctgcaacattaggcagtggcgaaatcatgtattttgcccaccctccacccttttacggcattggccactcatttttgtagggatatttttgtgattttacactattttttgcaacagtaggattttaggattagtatcccttcatccatacagaaaacccagccaccgcaccctgtatttacacctccctattcttccctcatcttttctggctaccatgtaccacccagcaacctgagtgttttctggccattggccaaacctgtacttttttttggcagccagagcttatgtactcaggtctttgctctgtcacctctattttgcatagcttagtcagtcccaccttcctgtcttgcatgccttttttttacgtgggtgataatctgcgctgtctttttcttcccttatgcttgactgttgttattgacttataaattaagtcttagattagtggtaattgtgtctaggctgatttttattttttaacgatgaatatgtctttattggttttctttcttttttttttatttttttatttttaaaaaagagcatttatatgaatgcggtataaattatttattgtgcatgttgggccatcttgcattccatttcactctatgatttgtgtttataacttcttatggtcctactttgtctcattatcttgtggttccttgaatttttgctgtcttcagttcttgtcgatgttgtagttgctgacttgctgtttttggaaatgttaatatgtaaaacttaaaactgtatatttcacatatcattttaggtctggcgtatcaggactggtcagtgcttacggcgtcttgaacgtgctcattctcaaggtgtcacaagtgtttccttctcccgtgatggaagccagttattaagcacttcatttgacagcacagcaaggtttttcatttaattttacttatttaacgttgttttgttagagataaccatttataagccattagctcacctgacataaaatttaggcttgaaattaacaagcagagcatgaatgatctagtgattagaagttggcattattatagtagatagtagcaagcctaaaatccaccatacaaatgttgggttgacattgcggccaatggaggaaagcatggtggttgctggttgcaatatatttttcttttcaaatgctaaaataaatctaccaaatataattgtcatgtactaactatctggaaaggttaagttgcgctgaaaggacacgaatggtcctccttttcctctatataatcatcatttcattgtcttcaagtgagagatatcctttttcttgtacttgcgattcttcatagcctcctcttcattcttcttccaaacagtggcgctagagcttgtgagaggattcttattagagatattggagaaatggaaatgaaattactcatttatgtgctgctctttattctttaatttagagcacaactccttgttcaaatctttaatgctttattactgcagtatattttatatcttaacgataaaatgctagcaactgttaagtgaaaatgttcccctttttgtaatacagaattcatggcctcaaatctggaaagatgttgaaagagttccgtggccatacatcttatgtgaatgatgcaatttttacaaatgatgggagtcgtgttattactgcctcaagtgactgtacaatcaaggtctgttacttggcattgtacttgaagttccttgtttatctggtgttcataagagatgtatttttttctccatattgtaggtctgggatgtgaagactacagactgcatacaaacttttaagccacctcctcctttaagagtgtgtcttcaaaaatttactattatgggttttgctattcaattttctgatgtcatcccagcaaatttgttcatttttctaatttctgatttctttggaatgttagggaggtgatgcttctgtcaattctgttcacattttccccaagaatactgatcacattgttgtttgtaacaaaacgtcatccatatatatcatgacacttcaaggacaggtatacataaaagagtggatgactggaagttattttgtttatacttatttcattagtgtctttatattagaattattgatgttggcattgtctttcttaatgaattgtctgcaaggataagtatatatgtaattctgcatattcatgctgcctgaatgtggatatttacttacgtgcggtttggagaaccttgggctatacttgttctcatttcttttcatcagtttttacaatgaagtgttgtagcagcatgttaggatctaattgcaaggtatgaaaattgagttcatcattatttctctgtcaattgataggttgtgaagagcttctcatctggtaaaagagaaggtggagactttgttgcagcctgtgtttcccctaaaggagaatggatttactgtgttggtgaagacaggtatcctatttatgtataatatgacacagctccttcgtttaatccagtagacaaagattttaagtacatgttgtaaactgcttcatcacatacgctttatgattgatattttcccatattccttgagcacaataacttggcctaattttgcagtaccataagttagtttgatgacattttccaaatcagtaattttttttttttgtcgaaataatatctctaattcaccaattatctttccaaaaattgttatattcttcatggattcgtttaatccagtagacaaagattttaagtacattttgtaaactgcttcatcacatatgctttatgattgatattttcccatattccttaagcacaataacttagcctaattttgcagtaccataagtgagtttgatgacattttccaaatcaataattttttttttgtcgaaataatatctctaattcaccaattatctttccaaaaattgttatattcttcatggaactgtaaattgaatgcaggaatatgtactgcttcagctatcaatctggcaaattggagcatctaatgaaggtatgtgtaattttatatgtagttagtcagagattagatctataaatttgtttcaaattggtctcaattcccatcgatattgtaatactgtttttatatatatattatcgtattacatgttttgaattagtgtctttctttggtatttttatgtcaccgagaaaagttatttgtccaaaaatttataaaacaatttgtatgactaagagagagagaaagacagaaatatgaaatgtataaatgatataatggagacagatagacaaaaaaaaaagtgtacatattgttatttgagttatataaataacaactctttaccaccttcatcttgttgcatcttttgttaaaaatggggaaccatgtaaattatgtaaaaactaactagaactggaatcagcccgcttggtggttttttatgccttgaagctcatttctttagataatacgttgtgcattctctgttgatcaaccctctctgccttgcgtatggttaaatgggattttattttctcgtattctgttccgagacaatatgcttatttttctactgaggttgttatcttgatatatgaatttatttatgatataatgaatttctctctggctaacggcaggtccatgagaaggaagttataggtgtcactcatcatccccataggaatcttgttgcaacatttagtgaagactgcacaatgaagttgtggaagccatgaatcttgtctgctttaagtctatttctattctatcttgttaacataattgaacatctgtgtagtttgtgcaatgtatatattcaggagtttaattttaatgtattgttggtaaaattattttatattgttgacgaatgatatgttgctagaaagccgatgctgaggtggagttattgacagattgaaaattcaaaatgtctatttacaatttttacttcagtttttattttatttttaaatctatccttattttctgaaacgtcataattatataaactgtttcatgtactatatgcaatactaaacacaattaattttttaataatgtatttgtaatgtacttgaaactgtatactatatattttgatttacatggaggaatgatataagtatatatttccaatactgtgaatagatccctaagaggattggatctgaacaatctaatgaaacccggaaacaaatcaaagaatagatatgaaagaaaagcaactagaatatacactcttatattaacacgatcaacactacctcatatatatcatgtatatactacttaagcatgttgttagggttagatttttggtcaagtaaatgattttttttgttagtagagacaaaatttattttgatgaactttatgtatggaaagaaattaaatttcaattattggttagagatatctttatctttaatgtatataaaaattaaagatgtatttttttttttaatgagcaagtacttatgaatttgttatctttttaacgagtagacaaagtcttatgtaatcctgaatgcaacattaaacatatattatgacatgatttcataaccattttttcccgtgtaaaatgaaaataagacttttttcacgtacaaacatctttttttgttctttttgctgtgaaaagaaatactttctttcgctgtaaaatgtttcgtgcaagggaacctaagtcaaacacatgaaaatggcactttggttatacatggaagaaaaacagtattcattagatattgtatacaatatttaatgaatactagagataatacaatcaaattcatgtcctagtaagaaatttataccataaccaaaactaaaggagcaactatagccttgttctctcattttcttgctcattttaccttgttactccttttcctccctcttgagccacataaccttttgattggtgtatcatcagcagccactttaagcatcaccacagacagagaagccttgatgtcattcaagtctcaactgagtaatgagactcttagccccttatcttcttggaaccataattcatctccttgcaattggactggtgttctatgtgacaggcttggccaaagagtaactggcttgaatctttcaggctttggactctcaggtcacttaagtccttatattggtaacctttcctcccttcagtccctccaattgcagaataaccaactcagaggagtgattcctgaccaaattggcaacctattcagtattaaagttctaatatgagctctaacatgttagaaggaaagtgttaggtactggtacagaatatagagagaacaaaaatgctttattcaactcacaaacacaattcttgattacacagtgacttcgagggtcacaacctccaattcccccctattttcctctccgagctcccctcttatacatttctctctaaaactgttagttataactaactcatcttagttatactaactattaaattgctatctaaacccccttgcataagtttgaccccacctcctatcaataccctccccttgaagctggaccttgtccccaaggtccattttaggaaacatcctctgtaattcttcagccaactcccagctattctcacctgtaattcttcagccaactcccagctattctcatggtgaggtaactctctccatttaatcaacacttcttgtttcccagttgcatttgtcctctgtttaagaatcctttctgactgcatgtgaagctcccactgctcatctaacattgctggcaatggctgaggtacaacagttgctttgactgattttttaagcaatgaaatgtgaaaaactggatgaattttactgtctgctggcagttctaacttgtaagccacttcacccaatttctgtattattttgtagggtccataaaacctgggacttaatttttcattcacttttctggccaaagacttcattctatatggttgtatctttaagtagacccaatctcccacttcaaaactcacttccctcctacgtttattagcatgcttcctcatatgatcctgggattttagcaaattactccttaactcctgtaacaacacatctctatcaatacaaagcttctctacttcttctagtttagaaggaatatcactgttttttacccacaaaggaggtgcttgtccatataatgcctgaaaaggggacattttggcagatatgttgtaattagtattgaaccaaaattcagcccaagctagctgactaggccaattcctaggttttgttcctgtcatacacctcaagtaagcctccaagcacctatttacaacttctgtctgcccatctgtttgtgggtgataggcagaactaaacttcagctgtgttccagcccttctaaataattctttccaaaatgaactcatgaataatctgtccctatctgagactattgaagcaggaaatccatgtaatctaaccacctcttgaatgaacacttcagccacttcctttgctgtaaaaggatgacacaatgccaaaaaatgagcatatttagtcaatctgtccactattactaatatggtatccttcccttgagctttaggcaaccctccaataaagtccatagatatatcagtccagaccttgcttggaatgggtaagggttgtaataatcaagctggagacaatgtactggccttatttttttgacaagtttcacactcagccacataattccttatatctttcttcatgccctgccaataaaccacatcagctattcttttataggttctgaaaaaaccagaatgtcctccaatagatgaatcatgaaattccttcaacattaaaggaattctagcagaattttttggtaacactaatctgtttttgttatacagcttccctccttgcactacatacccaggtttctccattgtcttggtgatgataccttgataaatctcatatagtggctggtctactcttaattcttcctcccattcaacccaatcattctcctggaccatagaaactgctgcaaaagcaaattgccttgacaaagcatcagctacacattctccttccctggtctgtactggatttcaaaattatacccaatcaacttaatagcccacttaagttgttcctcagttaacaacttttgttcatttaaaaatttcaaactctgctggtcagtttttatgataaatcttcctcctaacagataatgtttccatttctttacagccaatactactgccattaattctctttcataaactgacttcaactgtcctctctcagataaagccttgctccaaaaggctaagggtctgccttcttgtgatagtacagcccctaatcctgatcctgaagcatcagtctccaacacaaaggttttagaaaaatcaggtacccctagcacaggaagattactcattaattccttcaatttctcaaatgctttatcagcttcattattccaatgaaaagcatcctttttcagtaaagcattcaatggttgagcccattttccatagttcttcacaaaccttctgtaatatccagtcaaaccaaggaatcctctcagcccttttatgtccttaggtactggccatttactcatggcttccagcttgctaggatctgcttctaccccttctccagaaatcaaatggcccaaatactccaattccttctgaccaaaaatacatttttttctatttacatataattcctgctgttgcagtttctgtaaaactgctttcaaatgctcttgatgctcctttaagttcttgctgtacaccaatatatcatcaaagaaaaccaacacaaatctccttaaaaatggtctgaaaacttcattcattagtgattgaaaagtggaaggagcattggtcaacccaaaaggcatgaccaagaactcataatgcccttcatgagttctaaaagctgttttggccacatcctcttccttcattctaatctgatgatagccagaccttaagtccaacttagaaaaccattgtgcacctccaatctcatccaataactcctctatgacaggtataggaaacctatcaggcactgtaattttgttaagcctcatataatccacacaaaacctccagcttccatcttttttcttaaccaaaataacagggctagcaaaagggctattgcttggcctaataataccagccatcaacatctctctaactaatctttcaatctcatctttttgataatgagggtacttataaggtctaatattaggaattttagtaccttgttgcaaagtaatagtgtgatccttctctctttgaggaggcaacccttgaggttctttaaaaactccttcaaacatcttcagtacttgttctaccttatcaggtatccattctgctccttgtttctgttctgcagttttaacttccaacataaacctctgctcatcctcttctatacctccttttatcagtttcatactaacaaccgatttaagcaattcaggttcagccttaagcacaacctttctattctgaaccttaacaatcaaagtgagcttatcaaaattagccttcacttctcccaacccagccaaccactccacacctaaaaccacatcagcccctcctaaatcaaataagtaacaattttgcaccacatgcagcccttgtaactccatttgcaatgaattacacaccccttgacagcttattttatgtccatctcctacctccacataataagttttggtaggagtgacttccaattttaattcctgcaccaatttcatagaaataaaattgtgagttgccccacaatcaatcaagaccactaccttcttatctttgattcttccccatagcttgagtgatcttttagaagtaaatccctcaatgctatgcaatgacagctgatgtattttccccacctcctcttcttcacagcctccatgattctccatttcatcttcactctcatcctcctccaaaatcatcacccttagctgtttgtttttacatacgtgtgtgggatggtatttttcattgcaagtaaagcattctcccttacgcatcttctcattcacttccaaaggagacaatctttgaaaagttttctttttgtttgggccctcaccacttgttttagccccgctactaacttccactgcccttccacccccttgctgccaatcttttccattcctggacccagtaaaattagatttggccacaggaggtatccactttgttgatctaggtaccctctcccatactctgtttttctcttcaatttgtctggccttcagcatagtatccatcaaggttttaggttcatgtaacctaacctcagtcccaatttcttctctcaatcctttcacaaatacttccattaaaaaattctcacccaaacctttaccagcacctacatgtttctcaaaaagcccaatgtattcttgaacagattcctcttgctttaaagataacaaaacctggaagggatttcccaaattggagctttgaaatctttgtatcacagctgttttgaaatcttcccatgactgatgcgcactccaattctcccaccattgataccaagccaaggcctctccctccatagctaccaatatcgcctctaacttctcttcttcactcacatgttgtaacaggaaaaaccgttctactcgcgccacccaacctatcgggtcttcccctgaaaaaattggcatctcaatctgccgccactgtcgcgcctctagctcctctctctcgcgattcttggttcttgcttctccggcttgcctacgctcttccctcgtcggtggttccagagtcgcagccaacctttgcaatattctttcgattccgtctaaccgggtttccatcttgacccggttagcctctgttgcgacccgataagcctccatggcctcgcgatcaatctccctagcctcgcgcgtctcttctagcgctctctccatcacgtcaattctggcatccatcttgttgttgtttttcgtacccattcacctcacaggctccaggagtggagctctgataccagtgttaggtactggtacagaatatagagagaacaaaaatgctttattcaactcacaagcacaattcttgattacacagtggcttcaagggtcacaacctccaattcccccctcttttcctctccgagctcccctcttatacatttctctctaaaactgttatttataactaactcagcttagttatactaactattaaattgctatctaaacccccttgcataagtttgaccccacctcctatcagaaagcttccttcaaacatcacccacttgaatcagcttcaggttcttgatttatcctcaaacaagattgtcagcaagattcctgagacatcagcagcttgaaaaagctcgaggttttgaaactgggaaggaatagcctctatggtgcaataccagcatctctagggaacatttcttctctcaaaagtatgagttggggcaccaactttctcagtgaccggattcccagtgaattgggtaggctccatgggacggttccacccgctatatacaacttatcttcccttgttaactttgccttagcttcaaacactttgtgtggggagagattcctcaagatgttggtcaaaaacttccaaaactcatagtattccgtatctgcttcaattatttcacaggtggaattccaagatctttgcacaacctcaccaacattcaggtcattcgcatgtcttccaaccatttggatggaacagtgccacctggtttgggaaatctcccatttcttcgcacgtataatattcggtataacaggatagtgagttcaggtgttagtggtttagacttcattagttctttgacaaacagcactcacctgaaatttctggcaattgatggcaatatgctggaaggtgtgattcctgaaaccattgacaatctctccaaggatctcacaaaattatacatgggagagaatcgtttcaatggaagcataccctcctccatcggtcatctaagtggcttgaagttgttaagctacaattcaatctccggagaagttccacaagagctaggccagttagaggaactacaagcgctatctctggctggaaatgagatatcaggaggtattcctaacatacttggtaatctcctgaagttaaacctagttgatttgtcaagaaacaaacttgcgggaagaatacctatcagttttgggaatttgcataacctgctttacatggacttatcaagaaaccaacttaacagaagcatacctatggaaatcctcaatctcccaactttgagcaatgtttggaacatgtcaatgaacttattgagtggaccaatacctcaagttggcagattgagtagtgtggcctccgttgacttttctaacaaccaattgtatggtggaatccccagctcattcagcaattgtctcagcttggaaaaattatctttggccaggaatcagctttcaggtcccattccaaaggctcttggagatgtgagaggcttggaaactttggacctatcctccaaccaactctctggaaccattcctattgaaattcaaaagttacttgggcttaagctattgaacctctcgtacaatgatatagatgtagccattcctagtggtggagttttccaaaatctctttgcggtccatttagaaggaaatagaaaactctgcttgcatttctcatgcatgcctcacggccaaggaagaaaaaatgtaagactttacataatggtagccatcgtgttaacattgatactatgtctcactattggcttaatactatatatagagaacaaaaaggtgaaggtagcaccagtagcataatttgaacagctaaaacctcctgcaccaatggtctcttatgatgagctttgtttggcaactgaggagttcagccaggaaaacctattaggagttgaaagctttggctcagtttatgaaggccatctaagtcatggaactactgttgcagtgaaagttcttgacactctaagaactggctctttaaagagtttctttgcagaatgtcctatgaagaactcaaggcatcgaaatttggttaagctgatcacatcatgctgtagtattgactttaaaaaaatgattttctggctctggtctatgagtacctgtgcaatggtagcttggaagattggatcaatgggaggagaaagcatgcaaagggaagtgggttgaaccttatggagagactgaacatagctatagatgttgctagtgcattgcactacccgcacaatgatagtgaaattccagttgtgcactgtgattagaactcttctctggtaaaagcccaacagatgagtgtttcacaggaggcctaagcataagaagatgggtgcaatcaatattaaaaaacaagacagtgcaagtcattttcatgatgacccttcagagggaccaaatgtacaactcaattgtgtggatgcaactgtaggggttggcatatcttgcactgcagacaacacagatgaacgcattggtatcagagtagctgttcgtcaactaaaagctgctagagactctcttttgaatcagtctgatgacgtgagtcttacagaaacattgaccgtactgccacggtcaagaaaaaaaaataccaaaatgccacgcctacagtaaattttaccagactgccacgcggcctatttcgctggcataagtagcgaaataggtgggctgacgtggcgccccagcagtggctacatatttcgctggtcagaccagcgaaataggtagtcaaagcgccagactgacatggcagagcagttatgtcacgtgtcctatttcgctagcctccccagcgaaataggcacgcagttattgaacggttacgccacttggcctatttcgctactgcctccagcgaaataggcctcatttactgacccgttacagcaacgtggcacctatttcgctaccatgcccagcgaaataggccacgtggtccccctataaaatcccccctcccccctttcattttcactctttcccttttctctcattttcgaattttcttctcctnnnnnnnnnnnnnnnnnnnnnnnnnnnnnnnnnnnnnnnnnnnnnnnnnnnnnnnnnnnnnnnnnnnnnnnnnnnnnnnnnnnnnnnnnnnnnnnnnnnnnnnnnnnnnnnnnnnnnnnnnnnnnnnnnnnnnnnnnnnnnnnnnnnnnnnnnnnnnnnnnnnnnnnnnnnnnnnnnnnnnnnnnnnnnnnnnnnnnnnnnnnnnnnnnnnnnnnnnnnnnnnnnnnnnnnnnnnnnnnnnnnnnnnnnnnnnnnnnnnnnnnnnnnnnnnnnnnnnnnnnnnnnnnnnnnnnnnnnnnnnnnnnnnnnnnnnnnnnnnnnnnnnnnnnnnnnnnnnnnnnnnnnnnnnnnnnnnnnnnnnnnnnnnnnnnnnnnnnnnnnnnnnnnnnnnnnnnnnnnnnnnnnnnnnnnnnnnnnnnnnnnnnnnnnnnnnnnnnnnnnnnnnnnnnnnnnnnnnnnnnnnnnnnnnnnnnnnnnnnnnnnnnnnnnnnnnnnnnnnnnnnnnnnnnnnnnnnnnnnnnnnnnnnnnnnnnnnnnnnnnnnnnnnnnnnnnnnnnnnnnnnnnnnnnnnnnnnnnnnnnnnnnnnnnnnnnnnnnnnnnnnnnnnnnnnnnnnnnnnnnnnnnnnnnnnnnnnnnnnnnnnnnnnnnnnnnnnnnnnnnnnnnnnnnnnnnnnnnnnnnnnnnnnnnnnnnnnnnnnnnnnnnnnnnnnnnnnnnnnnnnnnnnnnnnnnnnnnnnnnnnnnnnnnnnnnnnnnnnnnnnnnnnnnnnnnnnnnnnnnnnnnnnnnnnnnnnnnnnnnnnnnnnnnnnnnnnnnnnnnnnnnnnnnnnnnnnnnnnnnnnnnnnnnnnnnnnnnnnnnnnnnnnnnnnnnnnnnnnnnnnnnnnnnnnnnnnnnnnnnnnnnnnnnnnnnnnnnnnnnnnnnnnnnnnnnnnnnnnnnnnnnnnnnnnnnnnnnnnnnnnnnnnnnnnnnnnnnnnnnnnnnnnnnnnnnnnnnnnttttttgtaattaatttaaataaatttattgtgttaatttataggtattaggtcataaactttagattagaggaggattagagtatagttagtttttaggttttaaacattaggttagagcaaaataaatatgtatgtcttttgaaacattaggttagaagaattatatttgagaagttttgaacattaggttagaggatcatatatacttgttatgtttgcaatattaggttagatgataatatatacttgttatgtttattatattaggatacaggatcaataattaaaaattagagttgataatgtataggatagagannnnnnnnnnctcattttgcatatactctcaaacacatatagctttctcactttgcacaagaattggacagcttcaatacgctggggtgggagtttaaatagggggggtgctgtagtaatccgctacatgggctagcaaaataggtaacctatttcgctaggcctgacagcgaaataggtaaaagctgccacgtgtgcttaattcgctatcacgcccagcgaaataggttacctatttcgcttgtcagggcagcgaaatactcccagccagccacgtggcgtgtctgctctgccatgtcagtctggcgctttgactacctatttcgctggtctgaccagcgaaatatgtagccactgctggggcgccacgtcagccaacctatttcgctactgatgccagcgaaataggccgtgtggcagtctggtaaaatttactgttggcgtggcattttggtgtttttttttcttgaccgtgacagtacggtcaatgtttcgagtcttacacctactagtactagagataccaagtcttgcgtccatgtttcagcaaagtgaactgttccgagataggaaagagtcagatagatggttggcaccgtacggtcctttacactttgcagccatgtttgacaaatactagtagtgcacaagttgaaacgttcgggttgaaataagcgcaaagaataatatataatataataatacttttgttgaccatgtaatgatcaaatactttactattttaggccaattaatcgctctagtcatgaatggtagaaattgagacacatttctgccgccaaccttgtcaattataaaacttatgtaaagaagaatggtggttgatggcatataatttgttcaaaatgtaacatcttttcctttttgtattgtgataattattagtactttttatccttgcaattattaatggattttttcttcttcacattaaaacaaaaatttattttagttaattttgaaaaaaaaacttacaacttaaatataatttaagtcttgacttattaaatatattatttgtcttcttgaaatttagtgctatgttttagaaaatccaattttttttttatataggaaattaagagcaaacagccctcttagaaaggttataattagaaaacttgtaatttaagctgtacagattttttatatgactttgaaatagatttccaaaatttataccaattacggttctacgtctctgggtattactttattttacattacatctattcaggctaccaaaggccaaaagtgtcttaacctagtcttacgtgtaagttattataaaccttaagttacttggtttgattcctttcgatcaaaaaaatttaagccccttttctttctctcttgaagctaacatgagtttgatgaagcactgaaaccgttactcttgtcctttttctgcgaatcttttgaacctatttcagttttcactctttatttgttaatttccttttattttcccgctagcccaatgcacgttttctatcattaatttaattttgtttcataattttttttctattctcggtgacgccatattgcttggccgagacagaagattgtttaaaacttcgttgcgtcagagtgtgacaatcagaactgcatgtacatgtagttccaaaaaatgtcagtgttgtggctagagagaaaatttcatttgaaggatggtagctgtgcttctgggctaggcgcgcgcaacaactctaggtatattctttttcttcttccaagcagccatgcatgcacgttggattaaggattggtctatcacaaaactaaatcaagattacaagagaaaaatatatataaccgatattaatatgaaaataatgtagcagtggtaattagaatatttgtattcatcattagtgtttcttggactcagatgaataaaataataaccaaaacaatgatagtaattaataaaaaagtaacaacaaactaatattacattttttaaaactaaagtcagatctcttaatcaaggtgttagattcaagtgatgaaaaaatatatcgagagaaaaaattctatcaaaaatagttagtcgagtttttttatcaatattatttatcaacagaatttatagtataatataacaataaaaggaacaacattactaatattattaattattccaaaaataatagtaataataaaaagttagacttccttgctaaaagaattagtttctactctcttgtcaatagagagatatcctggtgtaaataaataatgttattgtaaatcaaaataaactacttaactaacaaaaaacttaattaaaaatgcttgaattaactgataaaaaaaaattgcttgaattaatatataagcagtgccaataatcatctttttcgcacaaagtgtgatccaccattcttctttatagtcataagtaagttttacaagagatagagttacacataaacataaacacaattgttatttatttaattaataccctatttaaaggttggtggtcgaaatgcttctatttcaaccatacatgactagagtctagggttcactttattgaaacatggaagtaacgcttggtatctcttgtaggactctcatcagacagtttcaaaagagagtctctagcagcttttagttggcgaacagcatctctaatgccaatgcgttcatctgggttgtctgcagtgcaagatatgccaactcctacagttgcatccaaatatttgagttgcagatttggtccctcagaagggtcatcatggaaagtgaaggacagcaacttagggtcaatgacttgcactgtcttgttttttatggctgattgcacccatcttcttatacttaggcctcctgtgaaacactcatctgttgggcttttaccagagaagagctctagtaacacaataccaaaactgtatacatctccagctgcagatggtttctctccccatccatactctgcattgggcaagtaacaatactaattatttatcatgtttcacaatttgtaatggaattaattaaaaggttgataaagaaaaagttgtaaggattctaacctggaggtatgtaaccaattgagcccctaaggacatgagtggagctaatggaaacttgattagttgagttttgaatcagcgacctagccaatccaaagtctccaacctttgatgtcatgtcttcatccaatagaatgttgctaggcttcaaatcacagtgcacaactgggatttcactatcattgtgcaggtaatccaatgcacaagcaacatctatagctatgtttagtctctccataaggttcaacccatttccgtttgcatgatttctcctccccttgatccaatcttccaagctaccattgcacaggtactcatacaccagagccagaaaatcattgtttttgaagtcaacactagagcatgatgtgatcagcttaaccaaatttcgatgccttgagttcttcatagcctcacattctgcaaagaaactcttcaaagagccagttcttatggtgtcgagaactttcactgcaacagtagctccttgacttagatggcctttataaactgagccaaagcttccaactcctaataggttttcctggctgaactcctcagttgccagacgaagttcatcataagagaccattggtgcatgaggtttcagctgttcagatgttgctgccgctgctgttaccttcacccttttgttctttatatacagtagcaagccaattgtgagacatagtattaatgttaccacgatggctatgatgatgtaaagtcttgcatttcttccatggccatgaggcatgcatgggaagtacaagcagagttttctattgccttctaaatggacatcagagagattttggaaaactccaccactaggaattgctccttctaaatcattgtacgagaggtttaagaacttaaggacatgtagattttgtagttcaataggtaaggctccagagagttggttggaggacaagtccaaagtttccaagcctttcaaatctccaagagcctttgggatgggacctgaaagctgattccgggccaaaaacaaattttctaagctgagacaattgctgaatgagctggggatgccaccaaacaattggttgctagaaaagtcaatggaggcaacagtaatcaatctccctatttgaggtattggtccactcaaaaagttcatagacaggttcaaaacattgctcaaagttgggagattgagtatttccataggtatgcttccatcgagtttgttgctggataagtccatgtaaagcaggttttgcaaattcccaaaactggtaggtattctccccacaagtttgttttttgacaaatcaatctggtttaactttaggagattaccaagggagtttggaattcctcctgatatctcatttccagccagagatagctcttgtagttcctctaactggcctaactcatttgggatatctccaaagattgaattgtagcttaagtttaacaacttcaagccacttagacgaccaatggaggagggtatgcttccattgaaacgattctgtcccatgtataatattgtgagatccttggagagattgccaatgctttcaggaattacaccttccagcatgttaccatcaatagccagaaagttcaggtgagtgctgtttgtcaaagaagtgatgaagtctagacctctcacacctgaactcactatcctgttatagccaatattatacatgcgaagaaatgggagatttcccaaaccaggtggcactgttccttccaaaaggttggaagccatgcgaataacccgaatgttggtgaggttgtgcaatgagcctggaattccacctgtgaatttattgaagcagaaattgaacactaggagttttggaagtttttgaccaacatcctggggaatctcaccccacagagagtttgcagctaaggccaagttgacaagggaagataagttgtatataacaggtggaacagtcccagtgagattgttgagagtgagatcaagctcaatcaagttgtggagcctacccaagtcactgggaatccagccagtgagaaagttggtgccaaaacttatatttttaagagaagaaatgttccctatggacgctggtattgcaccatagaggctattccttcccagtttcaaagcctgaagcttttgcaagctgctgatgtcctcaggaatcttgctggcaatcttgtttgaggataaatcaagaatctggagctgtttcaggtgggtggtgtttgaaggaagctttccttctaacatgttagtgctcaaatttagaactctcagattgaataggttgccaatttggtcaggaatcagtcctatgagttggttattctgcaattggagggactgaagagaagagaggttaccaatataagggcttaagtgacctgagagtcccaagcctgaaagatcaaggcctgtcactctttggccatgcttgtcacacaggacaccagtccagttgcagggggatgaattatggttccaagaagataaagggctaagagtgtcattactcagttgagatttgaatgagatcaaggcttctctgtcagaggtgatgcttaaagtggctgatgatacaccaagcaaaaggttgtgtagatcaagaaagaggaaaaagagtaataaggcaaaatgaacaggtaattgagaaaacaaagccatactttgctgtttgcttcttaggtttgtttatgatattaatttcttactaagatgtgtatttataatagttcggctgcagctggcatgcaatgcattgcttagcttttctctttactagatatttacccgcccgttacgcgtacgcttaaatatttgacaaatagtgtatatagttatgactcatgagtaatgatcactaatgatataagtagtgatattttcacatatcaatatttcattaacaatttttttttaatcacattatttcatctatcatatttatatttttctctttttttttttctttttcactgggtgtctgcaaatattttggtatcaaattatatttttcctaatgatatatgggtacccatttatcttttagccaaaaaaaatggatactcatatttaatacctatttgacactttcttttcctctatttctctttttttatatcaaattatattatttgtcataatttatacctgtactttttctattgtttctctttatatattattatccaatacttatactttaaagtagttttatattattatcaaatgatataagtttaatgactcttctaataactattttataagttatacttgtactaatttatgattagttaattatataaaattttactttaaccatgcatagtcattaaattcaagatatttttcttttaatattataattgttacgctaaagtaatatgtaatttaaaattatgttttgataataatttaaatttaaaacagtgtccttaatatatatattttttctttatcctaacatttttttgttgttgatacttggtgctttgatctcatgtagacaatgaagcagactaattccattatataaataggttattcaggaagaaaacgtcagtaacttacattcaaaagagtaattgaaatatcataatgaaagaaatgtaataaattatacattaagaagannnnnnnnnnnnnnnnnnnnnnnnnnnnnnnnnnnnnnnnnnnnnnnnnnnnnnnnnnnnnnnnnnnnnnnnnnnnnnnnnnnnnnnnnnnnnnnnnnnnnnnnnnnnnnnnnnnnnnnnnnnnnnnnnnnnnnnnnnnnnnnnnnnnnnnnnnnnnnnnnnnnnnnnnnnnnnnnnnnnnnnnnnnnnnnnnnnnnnnnnnnnnnnnnnnnnnnnnnnnnnnnnnnnnnnnnnnnnnnnnnnnnnnnnnnnnnnnnnnnnnnnnnnnnnnnnnatatattataaataaatagataagtatatttatttaagagtaaatcatatataaactaatcgatggtaaaagatttttatattatacaaattgtcgatatatgatatatatatgataattttgttgaatttaacaataaataaatatatgcttgtactattgcacaatttttacaaaaataaaaaagagaggaaaaaagtgaaatgacaattaagaaaattctgaaaatttatttagccaacacgtggagataagtggagagtttttataatattattgattatcataaaagtcatatttattatttttttattgcttgagtgtgtcattttttttttacattgacatgcatagaaattaaactttgttttgattatagattcttttaaaaatatatatatttgcacaaaattgtatatattttaataaaaaaaattgaagtgcgaagtaaaataattaatataattgaaaaagattaaaataatattataaaaaagtatatgaataatatagttctatcatttacatgtaaagccctgnnnnnnnnnngattatcataaaagtcatatttattattttttttattggttgagtgtgtcatttttttttacattgacatgcatagaaattaaattttgttttgattatagattcttttaaatatatatatatatttgcacaaaattgtatatatttttataataaaaaattgaagtgcgaagtaaaataattaatataattgaaaaagataaaaataatattataaaaaagtatatgaataatatagttctatcatttacatgtaaagccctgttatatataatttttttttaattttaacctttgttttatctattatgggacatatatcttacaattttctctctcatcttcttgtggccttttctagtataaaaatcgaactgaattggccgatcagaccaaaaaactggtgaattgatcttatgaccggttcaaataatcaataaaatcaacttgaagaaaaactggttagaatcggagaaaaccagtcaataatcagcaagaaagaatgctgcagagtgggtccagaaaaattgaattttaattcttaattaaggccaagaagatattatcttttactttttaataaaaaaatattatcttttattttttatatataaaatcccgaggtagtatctttttctccagtagaaaaagtcttatgtaatagttaatgcaacaggtttttggacagcatagtcaatgcaacattaaacataaataaaaacatattttaataacaggtgtacttttaacatatgtcacataaatttgcatatatttaatgttaatataaagtaactagtaagctactaagatccaatggtttatatataataaagagaaatataacctcaaattttgttttcaacactgtttttggaattgattttaaaaaaaaaaatcaattttgatgaatcttatatttaaattatgaaataaaatcatcaaataataaatatgactcataaaatttaataattttaataaatttaaattaaattttagttgatcacattaataataaaaataatatcgttaacatttctcctaataaaatgcgttgtcctcttagcggtaaaacatcatacataatagaattagtttcttaattctaacaattaaaaatgataacgcctaatgttggatatgcctctgattatttgtaatattttacttttattactagtttgggctagaacccatgaatagttactgttagggtttcttttaatcttatttatattccctttgtaaaccgtgtgatttgtaacgagtggcggtgaggtgattatagtacagacaagttggacgtagcctacattgggtgaaccaggataaatcactgtgtcatatctctcttccttattctctttttattttttcgatttgtgtgtgattgtcgatttccaacacctgaatggtaaactactcagaatttttagagattacttaaagaatatatgatgtgaaacttgtctaacctttacctcacgaattttttttgagtaaaatcataaatactacgtgtcactatactattattttttcaatatgacattaaacacctaacttatttatatattatattttgttcttaatttttttatctttggttactgttaatattaaagttttccctttatgaaatattcatattatattctgcgcatccttgaaaatctgagggtttttggactgctattgaaaatctcttctctgtccctatctcttctttattagtgtgctcaaattcattcaatcattggtaaaaaaaattatagcaaaatccttatacttatttttaccatagcaactctcaatttatccttaaaaaattctctcaaattacaattattattttccaagtcattaaccatcaagcttccaaatgcactaaaattttcactgtctttttttttaactacatgactggtcctacatcgcgtctatatttttcttcttggggctctaattatgcatattctagggtcaatgcacattttttgaggaaaaaaaaaaaaacaggagcgaatgttatagctagaaaaacgtcattggtcaaactgacacatatgagtaaatttggaggcgtgtagaacacttaacctactacatttgtgtttgacattgttagttgattaagaaggtgacaattggattaacttgtgaaccacgattttcaattttagaaattgtttttaaattttgataattgtaggaactaaattaacgtacgaattttatgaattttagaaatcctacaatttcatgctatattaaaatgataatattttatgactaggctatcatgtgtcaggcaacatggttgtgtcacattagcatgtctaatgttagttgattagaaacgattattagacatttacattttagacgattaatttcatcaacaatgtacaatatatttccgaaattattttgaaaatttaataattttacagacctaattatcttaaaatttgcaactaaaatgataattttgataaattaatggtttttgcttaatgtatagttcttccgacttagtgaagatatagtccagcagatttactcaagtatattgttttctaacatgttgaagtaactcccacgctaacgcacctcaccagtctattcaggttgggagataattccgattgatatctaaatgattggttatccgtttgttttatactaaatgttgggttatgcattcattcactacttgtctacttttagtttatatttttatcgattaatttcaaaagaataccaatattttcaaaaatgcatttatatttaagatgatgttaaaacaagtttaaaacaaaaaaatactttaaataatagcaagtataaatatcttgaaaatataaatatgttttttcaaaaaaaaatctcatttaaaattaattctattttttttatcatattattgacttaaatcaaaaacttgtttaagagaccgagttcatttctcagattagtcatttgttggttaaaaataaattatattagttatgaaaataattttttaaattctatctaaaataattctactcaaattaaaaaaaaaaagttttgagaactcaaaaagataatctgaagaatccaatttattggccgaaataattggcaaacaccaaacaatgaagttattggattataaaaatagcaattgaaaagccaccgaaaattaaggtaaggtaaatgctcctagttaagagcgtcaggcaaaacgccaagttgttgagaaaaatataaagaaaccaaaagtctgggtcaaggattgtgttgcattccacaatgcaaggtcaaggtgatagtgacagtgaaagaatttggattctctgcagtctctccacggctagccatttatctatctctctatgtttcctttacctttcaatatgaaaagattaatgtaataaaatatattttaaaatatttatatatgagaattactaacacactgacacttcttttccagttagagtagattagtaatctacaccaaaatttgttttacaaaaaaaatcaatccttccactactttaataaatatagttaataactcaaatttgtttgtttaaaatattatttctctctcttagtcgcattcaacaaactcaggtgtgagcggttcttttggtgtgcaaatgagaattgttgatggaagagtgtggaccgatgacaaatttggagtaagaagatgcatgcaaagtttgaaactttgggttagaccaacgtgagggatggaaccgagagacaggagagaatgatcagtggagaaaagagaaaaatattatttctaacaaacatatttcaattactataatacccttaaactacatttttttaagtagtggaagtgattgggtttttttgtcaaacaaatttgtatattactatatcactcttattcgttctcatttgaattctcctctacctcttatcaagtgtgtatttaacgcacgtagcatgcatatgatacttttaatatcaagaacgagttaagtatttaattgttcctaaatatcaaaaactaatttcatatttatatcttacaatacactttttaacatgcattcgatattatagtatctcttatgctttttacatcaattgaataatttagctaaacattttatcttttttcaatctattatttttaatatatttaattctaactttaatttcaatatttttaaaataatatttttataattaaaaacaataatatatcataatataaattatttttcataaatctaaaatataatttatatgtaaaaaaattatttattacatattttaattataatatattttatatattttaaattatttatttatttattatcaattttaatcatatgaaataaatattttatcatatgtaatgtgctgcctaaaatgccagtttagttataattttccttgtatcctctccgtcccaataacgtcatgaaaaaggccttgttgacaaaaacataaaagccaaaagtcagggtcaagattgtgttgcattatataatgggaggtgataatgttatgaaaaggtcaatgcaaaatataatttttggaatatttatattaaataacaaaattagttataattttcctaacatcctgatttcttcttttaggtaaatttctagaaacacagggaaaaaatcatagttttaaatttatatatatatatatatatatgtgtgtgtgagagagagagagagagagagagagattaaaatcagtttttgaagaagttaatatgagaaattaaagcttctataaaaaaaattatgaataaactaattttaatataagaataaaaaatttccttattttttcacctagaagttcttatagataaacttatccaaatatcctcttactaatgactaaaatttatttcgctgacaaaaacaaaacctcttgatnnnnnnnnnnnnnnnnnnnnnnnnnnnnnnnnnnnnnnnnnnnnnnnnnnnnnnnnnnnnnnnnnnnnnnnnnnnnnnnnnnnnnnnnnnnnnnnnnnnnnnnnnnnnnnnnnnnnnnnnnnnnnnnnnnnnnnnnnnnnnnnnnnnnnnnnnnnnnnnnnnnnnnnnnnnnnnnnnnnnnnnnnnnnnnnnnnnnnnnnnnnnnnnnnnnnnnnnnnnnnnnnnnnnnnnnnnnnnnnnnnnnnnnnnnnnnnnnnnnnnnnnnnnnnnnnnnnnnnnnnnnnnnnnnnnnnnnnnnnnnnnnnnnnnnnnnnnnnnnnnnnnnnnnnnnnnnnnnnnnnnnnnnnnnnnnnnnnnnnnnnnnnnnnnnnnnnnnnnnnnnnnnnnnnnnnnnnnnnnnnnnnnnnnnnnnnnnnnnnnnnnnnnnnnnnnnnnnnnnnnnnnnnnnnnnnnnnnnnnnnnnnnnnnnnnnnnnnnnnnnnnnnnnnnnnnnnnnnnnnnnnnnnnnnnnnnnnnnnnnnnnnnnnnnnnnnnnnnnnnnnnnnnnnnnnnnnnnnnnnnnnnnnnnnnnnnnnnnnnnnnnnnnnnnnnnnnnnnnnnnnnnnnnnnnnnnnnntaagagaaactttaaaaatgactgtttatacataaattaatttaatttttgaaaaaaatatttttcttcttctcataataagtgtttatggaaaaattatccaaattaatttaaacatgaccattggagctcaaatatcttttggctctttgtgagagaaattagagaaaaattaacaggagaactttctttcatacataaacaaaattgttttattacttaagattttgagttgtcacatagtaaattgttacaaatattttgaaataattaaaatccaactgttatttcaacacagaacagatttttaacgtcaaggatgaaaaaagaaaactgaagtaaatattggaaattaaaattgtttaatttaaaaaaattaaaagtaaaaagttaaaaaaaaattcagaactaaaaatataattaatccaaaaattggttcatatgtccaaaaaggagtttttttttttcctggtgagggcatttaatttttttaacaggagtgcatagtaaatagaatattctatttcactatgaccttacgagttacgttgctaccgcaacagcaatagaagatttccatttaagaagatggaaggttgtcttgaacttgaaggatgaaagaagggataggtggttgattataattttttttattaattattaatatttatggataaaaaaaaattcatttcactttaccttatctaggagatacgttgcaacttgcaattgaacaccaatgccataaggtcaaatatgcattttgacagaaaaatgaaaatggcacaccagcaacagcaacttatgtattgatatattgacatcatgacatgtgtcgcaatgaaaggatttgtaaacagaccttagtttcaaattttaatcttgttaaaatttatgaatttttatgtggagatttaattgttgtaaaataagatttgcatctattttaaaaaaatatttttttactcttttttttcataaattgatttgtatttagttatttaaaaatcttaaaatatgatatattattgaaataaaaaataaaaaatattttaaaattaatataatactataaaatctaaaaagaaagtaattaaaatctaaaaattgagatcttctattacatatactttaatagaaagatttctatttttacgtggtccttacgagatagtacgttgcaatcgaacactaaatgtcatatcaaggccaaacattttgataccgcagcagaaaacccacttccagtagttttcttgtgttgaatgatttccaccggaagtagaattcaagtcttcaatgcattaaattaattcacattaatgcatttgaataagtcttcagggaataacaaaatttggactcatatttatcacagtgcgcgtctaaaatatttacttttttcttatttgtccaatttgaaaaacaacttatttttactgaactatttaattattcaagataatattaaatagtaccatttaattatatgctcttatttttacttaattcttaattattttatatgcttttcatatataaaagacaaataattaataataaaaattatattaggaaatttaaaataatttcaatataatatatttttgtgggtctattcaaataaacttttttactaatatttaggaaaagaaaaaaatataataaacttgttcaaagtctaacccgttttgaggtgatttttagttgagtttattttatttttttaaaaaaaacaagattttagtttttaaatttatgttttttattttatttttagtttcaaaatatacttattttttaaaagttttttattttattaaaattaatttaatagtgttttttgttgcgatgactatgattacattaataacaataatgatattgtatagtactaatattgataaaggtgatggagataatagtgactatagtggtagaaacatcaaaaaagctatgtcaaatatagaaagtgagtgttttttaaattaaaaacaaaattgataaaaaaaaatcttgattttaaaaatgaatcaaaatcatttcaactttatttttatcaaatgagttttattttcaaaattatatttgataaccaaaaactcacaatcacctcaaatagatcctaagcttatgcacaagttaatttaaaatatctctctcaaattaacttctctaaaagtttatttttgaattatgtataaattaattttaaaattttaagtttattttgttcttctatgaatgcttaaggaaaaaattattaaaacatgtgataaggctttctgaatatgttagtgttgggttagtacatacgtttggctatgtgagtgctgaatttagttgaacaccacttgtttgatgaacaaaatctgaatagaaaatgtttttttttaatatattgagtaaatggtgtatgcttttaattaagctgcttccaaagatgttggatactagtttcatgccagcaccacaagttagcaactaattaatctttattttatctcgagtgccaggtttgaaatggcacaaactctcgggtctatatgcgtcttgcgtttataaacaaactcgtttcgatatgctcctttaatgtactatttaatttggctaagaggttcatatatgttttaggaattgaattgttgaaccatttattattgacccgagcatgtatttcttcattcattgcccaaaaatcaatacaaatcatgcaagtcttcaaggacaaggacatagcatacgagcattcaccttgaagggtccatgtcgttgacattcattgccaatgaccttaatttgaacaaccttgaaaaatctttcattcttatctttttattttaacaagttttgtgtgctgtggtgggattttgatgcatataaatatataataaaagttacggaggtttgttaattatgttattggttcgcttgatacagattttgagcgaattttgtactgtgacaaatacatttcctcactaggtggctgtacaggctgctttatatttgtatttgtgtcgcgataagtatgatctattccttacacatgctactgctgcatttcaactttttcatatgataacctcacacctccttgatttttgtttttaaattatttgtttgcataatctgtcagacgagtttatgaagtgccattccctcaaaagttatattttaaaatactaatataatttaaaatttattttgatgtattttcaatgtaaagatagataaccgtataacaaatatttatactataatacttctaatcaaactctataatttatgaaaaaaacaaaaatttccaattaaaatttgctgtgtttccaacttatagtttatcatagtgatcaaagtgattatcacagcaatataacacagtgaaaatgagcttatttctaaattagatatgtttacttttatttaatttaaagcatatcattaatcttaaccaactaaaagtttagatttttaaattcctctaaaggatcaagtaagaaattttggtccatcaaaaaatatccaacacatttataattggttatgcataataaatgagtaatttattttactctcaaaagtgagttactagctctaaaggttcactttggtaaaaaaaaaaaaaaacgtctagaagtgcatgatccctaaaatttaaaggtaaataaagatggaacaacagttactcaacaaagcatatgagaattcacaattatcactaatcgcttgtagtgtccttgttaacaacttgggctgggtgtcctccaagtgcataccggacaaaaataacccacctcacgtatgcaaccagactatacgacctttttttttttttgagccacagactatactacctaataagtgctgcacaatttggtattatacaaacgtaactttacactattaagtataacgaatgaaaaaatagcttaatacattttttaaacaaagactagattaagaaaacaaagcaaaataaaaaatgaattactgaagaagtaattaaagacactaatcatattaattagctggttataagattttaaaaatgactgccacaggaatgttgacaacatgaccttgattaccatacagcccaattctcccatagctagcagcagaactgttgctggttgcattgaagatcacagacaagactagtctccccccacttgcaagagagaagtgattaggagacaccttcatagacgtgccatatggagcactccaaccaacattgtatgtttcatttccagcaatgttttggattgttctttgtaccactctagattggttcaaccttgctattatgattgagggcaagttcagatcagggccatatagtgttgaattataagtccagcaattttgaccggtgtagtttagcactgtaggagttgaaccattgataccacataggaatgacatgtagtcatcatagcctacaaagaaaatatgtataaacacatttggaaattcagaaaacaggcttgtttattaatccagcagctttcataaatttgagctagataagtgagacatttgaacaacaatcgttgctgaatttttgaaacatttgaacttgcatggaaattataatgatttgaaagttcattagtcaagtgagacttactagaatcaaaaagcaatcccggatttaatgctgcagtagcattcacaaaaccacttcccatgtcaaagggagttgctggagataggttttggtctatggaggggtatgatcgctgagccattattggcctcccattgttgtcatacagagaacctgtagtggaaagtgcagatccaatggctgcaggactaaaattgggaaacgtttgcttaattagtgcagcaagaccagcaacatgaggtgcagccatgcttgtgccagacatcattgcaaaactctcacctgttagaatagtgtagatcagatattcacatatcagtatattgacatgcttaataaattaaaattcctatttcctagtataaatatttataacttaaaaagatgttatgtttaacttggaacaggccaaataaacaccttaaacttgtttatgttttgttttctagtaaaaataagcttatgtattgacaaacctagaaattcaacagaatcagtggcaacagaactccaagcagcccatataaaatttccaggagctaccaagttgggtttcataatatcagcttcatgaggaagactgtcctctggatctggtcccctggcagagtaatacacaacctttggggcctcagtattgtagttggcttctaatccaccaccaatgctagcaacagccccaaatttaacaattttttttgaatccccatctatttgcagtgaagaattgtagtattgcagtaatatctgcacagttaaaaaagcaaagtgaatagttggtctcagtgtcattcccacacacatgtaagcaaggaatagaaataagttgactgttgacaaatgtcaaatccacaccatggtttttcatgcagatattcggtgttgcttgcactattctccaattagaattggagtttcacctcagtaatttgcataattgaatgtttgcattaaaggattatttagcaggtgaaactccaattctgattgaagaacagtaccaacagcacccatataataaaatacaagcgaaaaaaaataagaaaaaagacagtatacatgtgcaagggagaaaatgaacaatgcaccttggaatcatttgcagatggaattattatgccagccattttcattggaactgggttaagctgaaaagcagacacaaaagggtccatggagaaaacaacaccaactgcactaaggttcatggctgtttctaatgcctgttgaatggtggagagcccaaccacaaatcggactgaatagctacagatcaggaggtttccctggactaaatcctgactgaacttacttgcatcttgacactcaccaatatacatatcatcagtaactgttgtgtttttgttcaaagcatgtcttgcatgaatcagtttaaacatcgtgttctcatatgttccagctggggaaagtaattaaacaaaaatgaaaaaaaattagggtattaataaaaatctcaataggcgtactgatgtaacaaattatacttgcacaaattaataattaaatcattttattgttcatcaaggaacttccccaatgtaacatgattaaggtcttaaaggtaacaaaaagtagttgtttcagtagtgtagtgtccattttaaatcttgaatttctttgttcttggtagggattcatatataaagtatgacatcactttttgaaatcactcactcacaccagatttaccccatccaagtaattactttcccatctgcacttctttgttaatttcaagaccaaatgcccaccaaggccaaaaggccaagtttgtcttaaacaaattcatgtatagctaaccaggattagagcaacagaattttacgtgctagtccaacaccggatatggtcacactatttccaagacatagggagttgctataaactcgatcatgagaggtggcaccaacagtaaagatccatggactgaaggaggacatgctcataggtgatggtccagtattgccagcagcttgcactacaaaaataccagctttcacagctgatagcaatgccatatctattggattgaagaaagttgcgatgcccgaaggacgcctattaggagtgattgacaagcatattatgtcaaccccatcctgacctgcctgtaaacaattgattatactataagccataccataaatgtaaaattggggatacaattaagtaaacagattttgaaaggaacacatgcaaggaaagtactttttacactttacagtaactcttcaattcaagaccatgcataccctcaatgaaaatttaaataaatgaatgaataaatacattaacaaactttaaatgaaaagtaaattatattggatcaacccacaggttaaatttagaatcctaatacaatctatattacatgctcttcactgaatcagaattatttgaagccaataaacaggctgttgaaaaatggataacaataattatgtagttaatcaagcaatcatattggcgagtactagagaaaggaagagataacattaagatgataaaaacaagaaaatatatcaagtgtcaacaaatgacctaaagtaaaattatcaaatattactgacacataaatggcatacaaaagtacagacacctggtcaatagctgcaacaacatctgctgcaaatcctccaaatctcttgtatagtgccttgtaaatggcaatgctgtaaaatattgaaatggaatgcattcaaatgttacatatatagaataaaaattaattatgcttgcatgtaattattagaaatccaggttagaacagatccactcttcattttgttcttgaataaaaagaattacatacaccgttaatataattttctataatctttttcaagtgccaaataaatttacataaattgtcggttactgtacatggagatcaattctatggaattgaagcattccacaggggagaaaaagagataagtgacagagaccaaggcagaaaataaagtagagcatatgacagaatatgtggaaaatttaattatgaatggcaggtaatgtacacagggacaatggagtggtccatctcctaggacagctacctattttggttctgaacctggcccaaccattgaaggagttttctttcagtttttcttgtagaaaatcttgtaattttgagagacaggaaatatttcccccttacttctgaaaatcatattgcaagtctcatttcggggcttaaatgctctaaagcatcctgagcttttgataattaatcaatctcgtaaatatgacttggaaaaatcttctagatgcacagaccactgacttaatacatagaaccacatacccttgcaaggtaataaatatctagaggtctaatattttaactgcattgatatactagcctatgttatcttgaagctcaatgcaaggaaggaaccctctttaagaatatagatactcagctttagcacctagttgagcacttctctgcaaagcaaaaggcattaagcgtttctgagataaattacatctttctatcactagatatcaactttctcttcttttttctcccttttaagtctattggtccatttcatctcatcgtcaattattttccaaaatgacacatgagtttttaacttgtataaagttcaagattagttactgtgaatgaggagccatcccactagcatttccaaaaaattgcccagcaacgaccactggaattccatggtttccggctgcaacagaagctgtgtgcctgttatagatatatcagaatggacattcagtgaaaaaacaagtaaaatgaagttttagttttgtggcacacttaattcaaatacctatcatattttgaacttttgaatgaaagaaacatgattgatagtctggcatgaatatgtaagttcatttttaactttcaagcattggctaaatccatatcggcgagtagcaattccagaccatttttcaatatattttctttctaaactattaaagctaaacaaaacagggggagaactaattgatgagttcaaaattctgataaacagaagctagatagaaatgattcatcaaagttcaagcagagggaaataaacttcaaaaagataaaattatagaaagacagatttgttgatatggacaaaaagaggaggagaatggaccagatgtccaattgtggttaacaacatttgaacacaagactcatttggaaacacgaaacactcacgtgccgtggccatcaccatcaaagggagaagcatagtcctgggatgagttaaatattcctctggttatagcagaagctgcaaaatgtctagccccaacaagtttcctattgcaagaactggccggaaaatctggcgtaacctcacagacgccagagaaatgagcaggaacggggaatggatgttcagatttatcatctgcaaaactagggtgtgtaggatcaatgccagtgtcaacaaacccaatagtgattccttctccagcagtttcaaacccacctgcttgcaaccaagctccctgtggcagacccaaaaattgtggagtgtgtgtggttgcagttctcacagaaaaatccaaaaccacattggacacttctcttctccttgaaagtttttctgccttcaagatttcaaaaatcaagaacatgttggttgaagaagtttaccagatcacaaatacaaaaaccaaaatatgcacaaatggaaacaactcaaacaacgaagcacatatttcttcacagaataagcacacaatcaagatgttgaaaagtaaaaccattccatacctgtcgttgggtaaccagcacagcgaatccattaatcaagtaatgatagctatagagcttcagatatttctccccattaaacactttattcaataacgagtcgtgaactcgggcaaagtacgaaaaacgtttcataactggctttgtaacattctgatgtctgaaaaaaaaaaaaaaaaaannnnnnnnnnnnnnnnnnnnnnnnnnnnnnnnnnnnnnnnntctctcaaatgaatgcacaattaagcacaaaagtcaaaaaattggagactaaaaatatggtacaaagtacaggaatttagagtatcaaacaaatactataatgataaggttttcaaacaacttgtacacgagttgtgtagatactatgacaatcatttaaacaaatgttcatcttatcatcataacacaaatacataacttcaacaagaagtctcaccctcagctataaaaggaatgtaacaattaatacactttgaacacagtttgttaacattgaaaacaaatatgggggggtaccttggtttgtgaactctagttcttctcccagatgaaccatgtctagagttcttgcccactgtgatcaactcatgatgatgatagtgagaagcaggagcttgtctcagagtaacaatgtacacagctgtagttgcatcactttgacacacggaaggtatcagaaccattcccaagaaaaacagtaccactaaatgtgtatgctgtgaccaatgcatgttttccgtttgggttttggaatgcaaagccaaagccccaccaagcatgaacaagagtgatgacaactattgttcagttcagcagcacgtagtaaagtccatcttcaactgtaagacttgttgacctttaatagtatttatgaaagttgagtaaatactgaaaaactgtgtctggttttgcagcttgttctgaagcctgaagtggaagtggaaagtggagccaactcaacaatgatattaaagcaggttggttcggaattaacaggtcaagtatgtatggagaatcttaaactatctcgggtgctgtgatagtgtggagtagtagtatagtatagtagcatagtaatacatacatgaattatttattcaacaataagccttaacatacatcctctctttaattgttgaaatttatgagtttaactaattttcaaatgaaatctattaaataaaaaatggatttcacatatttaatttcattcaataaaaaaatgtattcagaagacacaaaagaaaatgtaaataaaatttagtttaatatttatgtactgaaaatatataaaataattttatattatcattaaatcataaattgtttaaattattttaaaataattactttaaaaattaatgaatttattatacatacataatgaaatgagttgtaattaaataaatgttttaaaaaaatttacattatataactttttctcataaaatttagtgtacgtagattatactgagatatccattgcatactgacttatggaatattgaatgttcctatactaaacctaaatctagataacatttataaagggaaggtttcagtggggcatgtacgtgtagccttcaacctaacattacaaatatttaaggcactgctttttggctgtgccccaaagaaagtggatacataatggttcggtggcatttcaagtgcaagtgcctttgcgcacatgtcatagtgatagtgcacctccacccggtgcaaaaagtgttatctcatagcattctaagttaaaaatgcatgttttggaaaaaaaaaaaaaaattgctttgctgattagttatcattatgagatccacgcatgcctcaattttttactctttggtggctatttgagaccaagaagcaagactgccatattttgataaagttttgttttatatgaaactttttggttgtgaataaaatatagttgaggtgcaatgaccactgcgaagtaaactaataaaatatggtttactaaaaaagttgttgataagactgataaaataaaagattattttaagacaattatattatttacatattttttttataagattactttcttatctcctcccattacattgatcattttctttttttaactagagtatcccagttagaaactaagaactaatctacattaaatctcatcaagtcttgtactcatgttagttgtaacttgatgagttcgagtattaaaaatgtttctgttgataagcaataggtaaattttactataaattttcacaaaagatgataattttttctagtctagcaaatggatgtgtcttctcttagtctaatatatcatgctcataagttattaattttaatatatatatatatatagttttatttatttacttaaaaataaactcactggctttttcggtaacattggtcaaagtgataggccatggtatcattccatctttctccgcactttaggaacaatcttttaaaatatctgttgaagtgcttcttcgaatggcgaaagatcccgattctagctactactacaagcagtttggtatggtatggtatggctttcttttctatttcaaatgatgactttgtgcatgtgtccccaataccagaagaaaggcttttgggtgtgagattctgttccaattgcaattttgtatcaatcccatgaagttccgaaatttcaggattctattcttttcttcaaactttttggacctccaaatcaaaatctgtaagtagttaatttccttttttttcattataaaatatttataaaatctaatctaaaaatgtcaaaagtaatttaaaaaaaaaacaaaaaataatatcaaataatttatagcaacttacttactatttctcaaacaaaaacccttgacaatgtcaagtacctgagtacatttgtaatagtcaaacgacattaaaaaaaagaaaaagaaaaattggtgaattagccgagtcctaactatgcataaaaagataaaaacctagacctaaataaacgagacgcaagtgtaatattaataatagcagataaagattatgtgacatccgtcctatctttgaaaatataaatgtaattttttttctagcttacatcataaaaagtagggatttaaatacaatattataagtttcttaaaactgatcatatctactaagatatatattttacgaaatttaagtggttgagagtttctacatcaaagtactggggagaaactctgtcaagcttctacacttatctcgatcattgccataaaattctctcgttcttctttactttcactctctttttttaaacaaattttcactcactcttaaatttagagttgatagttttattctcatttttattaaattttataacaaatcttcattattactaattagttttaaatcaaatatgaattatctcgttttacagtctattccacttaatttttcttctcaagtaattagaaatacattttattgtaatgttataatatttggtgttagtatttatataagtattttctttgtttatttatgtgttatgggttggataaatttttgtataaacacttttatgagaagaaaataaaaaataataatttaataaattaattcgtagaagttttcttatattaatttatctaaaaagatgattttaaattcatgcataagttaattttagtttatgaataaattcaatttttttattttctttttataaaaataagtttgaaaaagtttatccaaacatccctttcttcatcttagtccaattatcgctaaggatcacattatctagaattttcctctcatttgaggcacctcagaatcatccgtcggatctattttaatttttttttttccagtgttcactttattcaatactcttttatttctaatgtaaaatttaagctatttcttcatttccacaaatccagattactaatgatctgtccgcccaacccgtgactctggcccaaaatttcctcactcccctgtccatcgatctggtccaattaacgttccttccttgtttcccatctccaccccttctcttgggcatttgtttcctgcactcccattattgcatcctgtacctcccattgcattccggaaagctcattctgaaatgcaaaatggattttctggaatgcaatcatagctgtaggatgcaatagcccttctcttgaggcttgagcgtactactcagtgtatttggtttggtggtaagaaatcatggtgagtttagtacaaatgcaactatttgttgcttcctaaaatcatagtgagtttaactctctctcttaatatgactatggcttttgacaatatcattgagagattgatcaataattactacttcagcataatatactgaaaaattatggtaattatgactgtcattgagatattgataggcaattgctactttagtatgatctcattaaattaggataacttgacgtaatggaacatgattattgattaggaaagagttcaaactttctttttttggttaataacctgactagtatttaatcccccaaatcaagcagtcctataagggacttggtgacatgtagtcaggggttgaacccaaattagtttatgcttagaggattattagttatacaggagccacacagagctaactttcctacaaatcagaaaacagcatgtggagatttatgaatgctgtttgcttcaaactaaaatcagatattcaatgtctatcaataaaaaagatcagatattcaatattctgaccaagaaggaacttattccaaatttaactctccatgtattgttcctactcttgtcatcatttatagcagtaacatttgtttttctatttatatacataattggagagtatgaagatcactaaggatgaaacatgtactaaaatactatcaaagctgcaggccaggccatcagaagtaaatgtaaactcaaaaggaaagttggaatgggtcaatggcattagcacctacaattggtccatgtcattatccatctctaagttattgacaccgagcaagtagcaaaattttatctggcctttcacccagcatcatcttcagttcaattggtcactgaaagaaaggacctcactaagaactaaaatgaaatacgacttatctaaagtcagatagagctgagatgttacactttatgcacaagctttctggatttcctctatcagagatacaaatgccgctctccacttagtgaactgtgcatcagagctgaataacttatgcatggcacttaattcatcagaacttgcctttttcaagaatccttgtagcaccaatttcatctcttcaaaagaatcacaacttcctatgatgctatcttgctcctgctttatcaaacaggcatcaaaaagcttagtcttgacatcacctagggagttgcttgaaccatgactgaacttacagtcatcaatggcactgcctgaggattcagagacaacttctttgtgattccagtactcgatgcattgatgattgggatcctcagcttcaatggcctggaaatttttttcagaattgattaaaacatcataagtcaaaacatgataagctacattaaactagttcaagaaaactggctgaagataagatccgaattccaaactttatgactataaatctatattagaaaagaatacaccagtgatattaattttagcaaaacaagggtgtgaatagcttaaacattcatgagtttgcattacctgaataacggatggtgaaaggaatccaaacatttcgtgaccgttaatgctttgcagaagttccaagggaggaagttctatttcaccttgactcctttgcctcttgatttcatgatttagtctgtcaagaactgattcccagcacctatctgctgaggtgtttgtgaaagcctcatttggatgttcttccatggtaacctgaaatatattttactgaatgagaaagaaatatacttccaactgaaaaatgtccatgcaaataccatttaaaatagaataacaagaaatcaattatcacttagttccattatattatgttagaagattgtcagcttccatgaattttcatacagaaactcagcataaacttttctattcaatggaaaattagcagcagctgagtttctccaaaaaaatatccaagaaaaaaagtcttctctgaaaatgtttagcattgtctttaagacaaatgcaccatattttagcagtttagccaacagcagacttgatcaaaaaattacaagcctactgcccctcaagagagaaaaaaaggattgcggagagatacccttgatttttgtaaatgagtaagtgaatttccctgtacaccttaactcctatttatattattaaataggtttaaagtacatatatctacaagcagaaagtagtcgatatgattttaacatgaaacagaaacatcaggaataataccttgaaaataggcccaagaaatccagcatcatagacttcagaaacatagttacaaattcttggtggatcaagaatgctaaagaacttaacacgactcttgaatccttcataaatttaccaaaacaaatgaaatgttaaactcccacaaaaaaaattaaaggcatattacaagcccagaaaagatcctacactgcagcttaccttttggatatattgcatgcttactgcaccacagctttccacaaataacagagcccaaatttacaggctcaacagaaataccaaacttctgcattaagaagctttggtttgtcaacaatatacttgtattggaggtttcaacgtcacccattttagatacactgttgagttgctctcctgaatcagaatgcatctgcagatccaccccaaacaatttataaccatcaagtgtacaagaattttgaacatcccttgaacaagatgaaaattctttgccagcaatacaatcagccccaggttccatgttgtctggttcatttctggcctctgcaaagctgactttttccacatatggaacacccttattatgatggtaatcagcagcatgcagaaaataattttcaggttcaccagacataacatcaatattcaaatccacagaacctcctttctccaccgtaactttatcgtccatgaccaaatctttttcattcaaattgtctttatgacagtctttagtgccatatggtgcactaaaagtttcatggtgaaatgagtggactaattctgctgaaatgtggctgtaagaactactaggtatagttgaatttgacttatcattacttcctgtacaagttgagtttttcccttctttgtaactctgggtttggcaaatggcgctctccacatcttgtttgtaaatgcaagcatcctcagcattagcagaaaccattccagagtttctatttgaccacacttcaatagcatgcgattctccctctaatgcttcaaccaatgtacttagttcattcatagtataacgaaacagaataaatctgttgtccatttcacatgagcaaaacaaatttgagtgtttgagacaagaataacagtcaggagagcacttgcaacctacagcagataggtgcaagtcatagaagcaagagaagcattctctttcctcaaacaaatcaaatttactgtccatcttcagcatctttaaatgagttggaagacagtcaagcctttccttttccatagttatccttgtctgtcaaaaataagggtaacaaaatttggaaaaaaaaaataatgaaatgaagaacaggtatctccatgggaactaaaattaaataataaatgccaaccaaagtgttataaagctttataaatatgtggagtgggttatgatcaaagataaagagtatgcaagaatcattaccttaactgccttggtaagaactccatctttcccacaagcacttctccattttatatattttagattttcttttccatgaagagttagctcttcaagggcatgcacggcttcctgagcacatccaaataataacttgtcatgagacaatgaagtcttacggcactgcaaactgtaaagctcggcagcattctggccatgcacaagccaatcaacaggagccacattcacagcctctgcacagttgaagccacaattgaagccacagtggtatgcccttggaaaggtaacaacaaattcccctgaatgctgaacagtgtgatgtacaggaaccccctcagatttaagaattgatggagataactgagtcacctgctcaaagatgaaatcataaccactagaatcataatacagttcccaaactctatctactacacaaagagaactaaaatatccaagacttgtatgagagatgaacagatgtgctagagagttctggagagataagatagggtcgctttggtagaaacagaattgtcaaagttcagcatactacataacgagagaaaggtcataaaacagataactataccataattttaaaatctttaatggacttgtaaagaactaagggtaacttgacaaatgcaggtgatatgaccaagagcgtttaccatcatgccaaaagcttgatctattagcaaaggtgaaacttttgacatatagcatcctacattaaacgcaaaccattccctatttaaggctttaagccattattaggcaaaagccactaggtcaaacctgaccctcacaaccttttggacatatcattttgtccctcgaagagaaggttcaccctcaaacattaagatgattggaaacatatcaaacccgtgatttgaacccgtgttgactctaattctaaatgatatgaccaatacacttaccacaggacatttgtctacaggaacttatgtgtcgtacagtatacatcaccgcaggacatttgtctacaggaaccattaagttgtttagatgatacttactcctaatcaacactttatcccaaactcaataggagcttaccaggtagattctatactgaactagtgaactttgattcttgggaaggccaaggattaactcttctagaagcttaagttattaagtggaaacataataacaattttatatctacaagatggctcacacaagggaagctaaggcttgaagtgtggatagtgcataagtccatcatacctagtgaaaatagttaggatcataatcttgaccacttgttcatagtggctcaaatactatgtcatggatatcctaaaaacttttctcaagtggagggtcaagaatagtttttcatttccagcacagggagaataaaccgggattttgagagaggggggggggggtcttctctaccttactcataaattttactcataaattgattacctaataactccagtttccgctatatatataattttacaaataaaagtatcatacactaaactaaacaaatgtgtcacgcctttaactaaacaaacatgaagtgacactctgaagtctaaagatttcaaaatttcatcatggttttagtttcttaactttcacaggtggcattaaaagttcctagcaaacttccaacaaaatacacatttagcatccactacaatctctgtttgtttatgaaatctctatattgaaacagaatgaaggcaaccaaaaaactgaaatttaggaggaaagtacaattctgnnnnnnnnnnttctctcttaattaaagtcaatcttataactccaattttatttacttttttaattacaaagtataattgtttttacctttttcattttttattcagcattctcgcttttccaaaattcttttcttttaactttttcaaaacttccttttatttttccaaaaaaaaaatatatacattttctctcaccctctattatatgggttaatgtcccttcctcatgcttgtatttccctttcctctcaaaatattgtattggacttttttttaacagataatataatacatttttgttttatatggtctatgatgcaacatcattgttaatagcttttagattaatttatagtgcaactttttatcatggattttccacatnnnnnnnnnngggtcaagaatagtttttcatttccagcacagggagaataaaccagagggggggggggaggggggggtctctaccttactcataaattgattacctaataactctagcttccgctatatatatatatatatatatatatatatatatatatataattttataaataaaagtatcatacactaaactaatcaaatgcatcacgcctttaactaaacacacatgaagtgacactctgaagtctaaagatttcaaaatgtcatcatagttttagtttcttaactttcacaggtggcattaaaatttcctagcaaacttccaacaaaatacacatttagcatcaactacaatctctgtttgtttatgaaatttctatattgaaacagaatgaaggcaaccaaaaaactgaaatttaggaggaaagtacaattctgagtagtataccaattcattgagtagatttggttgttcttcaaataaatcaggcaagtgctttctcattgcatcttccagacctggagcatggcttccaggtactccataccatacttttgggtcaccccagtgcagataattaagtgaatagaggtgatggtcctcaacatgctgttgcaaggagaaagaaacaagaaaaaggtgttagtttttattggaaagtatgaagatctgaaacaaaagcaatgcaaaattgaagacaatattacttgttttatagctcaatatttcaaacaaatcaacataaagcagtggaaccaaaaatgttgagtgtaagcacaccgagaattctattatactatacatgattcaataattatgcagtttgtagggatccctatctggattctagtctatgtcttacactagttctagtcctttattttctccgctgaacctttaatgaaattatattttttttataaaacagacagattttaaaaatttcaactcagctttcatgaaaaataacttaaactctataactccacagacagatacagaaagtgattaaaaagaaaatcagtaatatcatcagttatgccttaaactttgtttcttgcatagatttagactgaaagaaaatgtaattctcactacttacccagcaaaatgaggaaaagcacattccaacatacagccatggaactacaactcctgagatatcacttccttcaaaacataaggcagaacctggcagtcgcgggaagttattcagattccagccagacagggcatatctatctgactcattcttagttaaggatgatgtcttaggaaaaccacttccaagtgatccagtttccaagtcagctccataatacaccttcaaaaataacagaataatatataatttttttgcttaattatgtgacagtaagactaatgatattatcaatgaaccgcaattagtacctcaacctcatcagttggttgctctattattcgccagtattcaccttcaatttcctccacagagggtttccatctctgctggtgactactatcactaacttttccatattcattggcatcattcaatccaaagtagcaatctttaaaaacattggcatattgctgaaagtctttaagtgtgaagtccgaccctgattggaatccaaacttctcctcaggctcagaagcaacattagcttcagaacctgatttggcagttctcgtatccatgcccatctttgactgctttctacgttttcgtttccttcccctaattttctttctcatgggttccctgttctgaagcaagtcaatttgctgaatacgagtgggaaattttgcattttcccataaatctttctcctgaagagggcaaggtggtacccagcaagctggagggacaatcctacatatgccataaggttcagcttgggggcgaatcttagctatgtaaccaagtgtgtcttcaaactcctgataagagtataaacaaaaatttaattcaaaatacaatataaccaccaccaaaaactataatactatgatagtgataattataagtacctcaatagttggataaaacagaggtgcttcatcaactataggccggcatgcttcaaccggatcccatctggctgatatctgcaacatgacaacaacatataaaaaaataaaaactacgtatcccattgcccggaggctccacgctatacgcagataaaggagagggatattgtacgcagccttatccttgcatatgcaaagaggctgtttccggattcgaacccatgattaacaagtcaccaagacatcaacaagtcaccatgacaacaacatatatgcatagtaatttttaaatcatttttttctattgaatatccaaactgatatttattcaccataaaaaatatccaaactctataggaagacaaattcacagcacagtagatcatgctaaatacctttctatgtcgtggactgccagaagactcaagtgtgttttccatttctggtttatgcctaagaggattatcctgcaaaatatcacatgtatgaatgctaaatttgttgactctgataaaaaatgattgggagaaacatcaaagtctagcaacgtctaacacaaaatgtcctttccaaaggatttattcaaacactgtaacagattaatttcaagcatttatgttgctacaccagctagaaatcatgtaaaatttatggagtttcaggtaaaggcagaacagcgactcaatcatgcagttactgccatctaatcttctaaaacaagttatacaacattgatgcccttcatttgcttatgctggtaaggtataagcagtgtatgccatgagacagatttaagtttgattgaagcctcaactagcagtattgactcatcattgatgcaaggttggagatagctctcagaattcaaagacaacaggatgcaatcttgtattaaaaaaaaaaaaagaaatcggtatcaaatgtaaaaccaaaacggttttcgtactttggcatcattcaggttgcttacatcatagttgaataaatacacttcaaacggttacaaaaagattaactaaatttaagtgaatcacatttttatagctcaaaaaaacatcctcatattttaagctttaataagatagactcagagagcattagattagtattttcaaagttcaaatgcatgcaatgctcttgaaaccaaataatgtaaatgcaattcaatacaaaacaggaaccatcaaaagattaggcgatccaatgccagacataataaaacattccggaaagctaaacaaaccagtcaccaccaccagggtgagaaatttccaatctttccaaaccccaaaaaacgaaaagtcacataacatgtaaagaccagcctacagtaaaaaaaattaagggtttacaattcctgagtaaattaacatcatccttctgaggagcagaaattagcacaggaactaaactagtaatatcaaatattacacaagcgaaaacacaatcacaatgtcttaaacataatgagaaaagacaaaaaagaaagaaagcaatgaaggaaggaagagatacacaaaaataacaacagttttcaaattccataaacaaagaaaagatctgaaatttgtgatgatccataataacagaggatggaaaatttgaacagagtagcagcacatggatgaaaagcgctctagaacacgtaccacattgtcaaggtttaaaatttaaatcacaaaatgagaaaaaagaaagaaccaacctcttcggcgtgagattctgcagccaatttcaactgtttcattcaatgcaaaatgaaagataaacccaattgaataagttattgagcctgcaacaagaacagagaccattgtaactaaccttatcagagtcccaattagccaaagagacattccacaaaacagtttcccacttatctatctattacccaactaactgaccccaaacaaaccttaaaactgctaaaaaaaaaactacaacaaaacaaatgcagaacacaaacgtactcaatgcagcaaaattcttcccgaaaagttgtttccacgttctgaaggaaaaacacagcagttgcgtacaaaagaattaaccacgaaaattccttcacaaatcaaacgaaaacccaaatgcaaattgaattgcatgtatatatattttattttatttattgtatctaagtatgtaccaatgcatgaatgtagcaaaccccaaaatttgttgtgaaattgcaaaagaatcaaaaatctacaaatcttggattctaaattctaatgcccaaaatcaaatagcagcagaggaccttttaataacgataaaaatagaaacaaaagaatagagtgggacataaaaaccatgtaaatatattttgacaggtgtaatgggaaacaaaattaaataaatagtgattgaaaataatggaatggatacgaagtcccaggtgaaaccccaacaacagtacttgtacagttacgctacactacaaaaagattttaattccattaataatgataataaattttttgtaccgaataagcgacaataatattaatattaaaactaattataaaagttattctgaaaaagaaaaacaaatcttttaatatctttgaaaaaataaggggacagaaaagaaagtgaactgctgtggcagcgggaagcggctaagattctacactgaaagacgtgcaattgtacttgaacacttttgctcaaataaaatttgttgtcgttttataaattttaataacttaactattatctacttctaagataatgttttgtaaaatgaagataaacgatttcataccagcaatgagtttattgcgttgtcttatcacttatttaagtcttaataacattttttttatgttacctttagtatcgaccatcatcaataataatatgtaaattaaaattaatcataataactcacaaaaatatcattacacgttttcataacttcatttttattatttttttaccggacttattattatgagaatatataaaaattattaatagcataataataaatgtgatagaattggtattaataactcttcgaattggaatagaaaaaaggaataaattttcaaattgaattaagaaacagatccaatgacattaaaacatcttataatatatttattgttaaaagatgtatttaataatttctatgaataatttatatctaattactaagaatgggtcaactcagcatatcatctaatagaaaatatttaaaaatttgttagtggatttattgttgataaaattcctcaaatatttaaaaggttgttagtagatttatttatgataaaattcatcgtagtctaaattgtatcaaataatctaagtgaatgtcaatttaaaaggtgaaggtgtgtagtgcgcgcaatattaactgaaagtgatgaaacaacccaacgaaccacaaaatgaatggcacattttcttggcttgctttcttaagtctcgtttggtttacacgttggctttcctactcctccacattccacaacaaactggcgtttgcaacatttgtcatttgcttcggcagatataaccatgtttgtataaccatcacatccaaatatgttaaaaataaaatatatgaaaagtattttttttttaagaaagtacaatcaacacgtaaaaatatattcaaaacgattatataaaaaaaaacgattatctaaaatgaatttaatatgtcccttacagattaatatatttttaatctatgacataaaaagataaagaaaatagaaagtcttttaacatacaattttctttgacaatgttacttatcctttttttaaagtcgatgtcattatctaatatgttgattttttttgttaataagaaggaatagaactcacaatctttttttatgttccttctctcttaattaaagtcaatcttataactccaattttatttacttttttaattacaaagtataattgtttttacctttttcattttttattcagcattctcgcttttccaaaattcttttcttttaactttttcaaaacttccttttatttttccaaaaaaaaaatatatacattttctctcaccctctattatatgggttaatgtcccttcctcatgcttgtatttccctttcctctcaaaatattgtattggacttttttttaacagataatataatacatttttgttttatatggtctatgatgcaacatcattgttaatagcttttagattaatttatagtgcaactttttatcatggattttccacatnnnnnnnnnntttttaaaaagaaaaattataaacaaaaagtcgtgccttgaaaaatatgcgacttcatattgaggattttatttcttaatttcaactttttatttataaattttattttaaaaattattaactattataattatagtttgattttaatttttaacttttgatatgatatgttgtaccaaactgaatatatctttcttttttaatacactgaatattaatattacagaaatatttataaatcctaattaaaattgtattctaaaaattaaaattataannnnnnnnnntctctcttaattaaagtcaatcttataactccaattttatttacttttttaattacaaagtataattgtttttacctttttcattttttattcagcattctcgcttttccaaaattcttttcttttaactttttcaaaacttccttttatttttccaaaaaaaaaatatatacattttctctcaccctctattatatgggttaatgtcccttcctcatgcttgtatttccctttcctctcaaaatattgtattggacttttttttaacagataatataatacatttttgttttatatggtctatgatgcaacatcattgttaatagcttttagattaatttatagtgcaactttttatcatggattttccacatctgatccttaatccttcttcttggtaccactcttcgttgtgcgtcaccttcaaaggcaatttcgggacagaattgccactttttttttcttctattttctgcttcttctccctctccttccctctttgtcacctttggcggaccctccattaatctcatgcttcgcagcaccatcaacatcaaccttaactcctagaacctcgttgaggaaaccaactatatcccccataggaaatggtcaaagaaggaaccaaatggagaccaacgagcaccaaaggtattaatctaaagactattaacaatggtgcaccacagaccacatgaagtagtggtgtgtcgtagaatctaaaaactattaataaataaggtcaattttgaattcacattaattaattggcattgaaagtgttgaattctacatttgaattacctcaattgctcttgcttcaatctacaatcaattggaaagactatgctttttcatatctatcattctcataagttcgatctagtttaaaattcattgatatttgatgccaaatttcccttttcattgcacaaataaatatataaacaatggtattgtaaataaataaataaaattaattgatgaaatttcatgtgcctattttttaatttgaaaatcttatgtctagacatacgacaacaataagaataaaatatgacatttttaatgtcttttcttgacttataaattgacgttttatctttatcccattatattcatcctttaataatatatttatgaacgaacaatcaattatataataaaaatttcaatttttcacacaaaaataaatttaaagtacatgcaatataactgaaaagaggtaaagagaaattttacataaataattatacatgtttattaccctataagagatttgggaatgtcctcccaaacctcacaagcatgtctatcatttgacagttatatccaaaagaaataaagaatcaacaacataatatcaagtttcaagaagtttttcacctttttactttgaagcagttcaagatcaacaataaaatggcgtaagataaatatttttaagaaaaaagaaagatgaattcaattcttnnnnnnnnnnnnnnnnnnnnnnnnnnnnnnnnnnnnnnnnnnnnnnnnnnnnnnnnnnnnnnnnnnnnnnnnnnnnnnnnngcaatattgtgacagattttgcttaagacaatcaaatatgtgcgacgtgaaatgttttaagagtttaattttttttaagctaaagtgagaagaaaataacctctgatgaatttttttaaatttgagagttgtttttcttcttttcttgaccccccagaacttttataaacccaaagaagggtaggtttgtccaattatcaatttatgggtatttttgacaaattataaaaaaattaatgaaaaaattgacataactgaaaatatagtcattaattaaaggaaaatgtaatttatctcaaaaaaattacataaaaaatgaagtggcaaagtatcaactcacagatgcattgccacgtgaccctatgaaagtcccacaccaatataatttgtgaaaaagtaaataatgagaatatttttgtgctttagtataagaaaaaggagaaagaaaaatataaataaaaaatttaataaatgatcgttaatgattttatttaaattgggatttaattttaaattaatcacacacatatatatatacacatttgtaaggattctaagattttcctactttaatctgtatttttatatgtttttattttaataatttatttctatatgcaccgaaaataataataataaattatgtgatgtaatatgatggaaagatttaaaagaaagtaaataaaaaagtaaaaatattatataaatatataaataattaatgcgtgtgaaaattgaaaaaagaaaaatataattgaggtatcaatagaagtgatatggtggaaagaagaaaaataagacaggtagcagggtgcgtgacactgtgactaagggtaattgtttgtcgtaatataatgctagtatatattattaatattaaatgttcaatttttatttatttataattaaattgaagcgacaaagtttttaccaaaaaatttagtttaattgatttaaccgagcacgtgaatattagaaaccctagtgtgttttgtagtaggtgttgggtatgtgatagtacactacaccgataatggataaattgtagtgattcatcaaaaatgttactgccttaatcataacctagagtcgacaacgactcatccacatgtgagatgtgtataaacgctctcaagatctccctgccctcaactacaagattggcgcctcatcaaagggtgtagctactttggaccctaagtccagcaataatgatataattataggcacttttgttagagttgatatccattaaaaaaaattacaaagaaattttgttttttcttaatctcaatttctaatattacaataattattaagttataagattgatttaatagctgaagaatgaagaagaaaaaaaaacatcttaaatttaaatctttttcactgacaaaagctaataaactagcacatcaataaaaaatacttattacaataattatcaataattcttatttagtagatgtaatcattcaactgtcttaattttaacataaagattgtttttaaaataaaacttttaacagaaagattaattgtcatgcacatgagtatgagtatgaacaaattcatcaagttatattaattagttttttttttaccactgtgattaggtctttaagtgagatataaggttgatatagtaatgaagggaaaaatgaagggatataagttgcaagttcgaatcttttgccaataaaaattatcagtattaataattaatatttgtcaataaacaaataaaattaaaatataatcttcgtcttccttgtaggattccaagctagatatcttcacaaacttcgaccctttaagttgattataaaattaatcttcggttctagatttagttatatttaaaattcatcgtctatcataaatgatgtnnnnnnnnnnnnnnnnnnnnnnnnnnnnnnnnnttatataaaaattgaatttagatttttctttacaaacttaaaacttaacacgttgtgaactatgttatatccattaaatacatcaatttgttactaatcgatcgagaattgagggcaataattaaaaaaataaacaataaaaaaattaattacagcaagatataggtaatttaccacatctcattgcttcaaatcttactttcactctctccttttataatttgagatttataattttattctcatctctttattaacttttatggaaatgctttctcataattaaattattctaatcatattctcctttgaaatttatggagaatcccatcttattacactgtaatcttcttactctatcttaaaataactataataatctttgttattactaagtattagaattgtttttttatgatagactaagtattagaattgttattgttattattaataatagtaatattagtattattttgttattcttttactagttattatcataattttggttattataagtcctagatcactaagaatcacatttattaattttgtttctctcactcgagacatgcatctcataatttccatgtcagttaatttcctttctttttagtatttggctaatttattaagatataatcccgcacttgtagagatactttggctaatttatatattactgttgggaattataatggacaaacaaaacacattaacttaatttcagaacagccaatgcagttgagagtggggagcaagacagttggcaaaaaagacaaagaggagattcatgccaccaacatattttacacaaaaactaagaaatttttataaaagtccatgtaatcaacgtatttatttgtggtcctatgacacaactaaatacacatatatcacacactggattgcacttaaacaggtgaatatagaaagcaggatatcaatatgtatcatgcattaattgtaagcatgaaggtgctaaatgtgatttagcttgagcagcttggtgatggacatcactgtaacaacgagaaggagaatgagaccaacgaaagaggcaacgagggcaacaccacctcggttgcagtatgcttcgaatttgtcacatatcttatcccaccttgcatgtgaattaccattccttcctaattctgccatgaatgttgctgcaccatctccagttgctgctagagccatcgtcatcttcacccaaaaggatatatagtcaaatagttttcatatatatttgttaatttaataatttaattttgataaaatgttagtataacaatttgtaaattatcaaataattagaaatcactttaaatatgatttttaaaataattattatgaaaatcaacaattttatttatatgacaatctattataagagttgattttgacattttatggatctgaagtaaaacaataaataaaacccccttacatacgtgtattcataagaaaatataaacatataattttactaaaaatgatttataaattcatttcataaaaaataattaagtgggtgatacttccaaataaacatgccacattttaatttgactttaaaaagaatgaaagtggtaaattttaatctatttatgaaaataatataaaaaagcctattattcaatttcaactgatgaactttttttttttcaggaaaattaatctgtttcctgtcttgggccacgggccattacctctctagattaggtccgaaattgactttatatgtgattattttttttggttgagaaattttagcggaagcaagaaggagatggtgtttcacagaaaacctctggactcaaaaaatatttacaaaaacttatctttatctcattctaacaagacaaatgagaattcaaatataaggcctgtcttactctactcaaggaatcccttgggatgactttatatatgattagagaactatgtaaagatttttatattttatatatattattgtaaattctaattaaattcttaacttgaatataaaaaaatgtgtaaaagtgaaggtgactaaaaaaaaaagtaggatccattcagtaccacgtctaatattgcaatcagtccaagacgaagtccttcgtaatcatattggggtcctaatatctccactcctatcaccagcaagttatagaaactagcaattgcattgactatcacgaagaatctgcctcaccataaataacacataagaaggtcaacatgtctagctaatatagtactataatattgcaatgttaaaaaaagtgtaaacgaaaacaaaggaaaattaaaccatatgatttgtagaactaacataaaagctggagtgtgctgaaacattgcagtaagagtaattgttactgggttggtgccaatggtagcaactaccatgcctttggtttgtttgttgaatgccataacaagtgtagcagatgctgtggcaaaaaatgcgaccaccctaagggacaaaatgacccaatccttcatgggcttgggatcaggaacagcactgaaagcaagctctagtttgtctccattttctgaggccattgtgcaagtatttgccagttgattaccgtagtgagaaaatggtcggagataatgcagatggcctaaggagaaggatgggttaatataagataaagcaaaattgatcaaccatatcatttgttaagtctaagaagccaagtgtgggttctgtctctgaattcttaaggttgtcggaccaactaaattcagttgttgctaattggtgagaaatatgtgagtagctgcaactccaaaattttaattctatattattaaaaataaaaaataaagttatgtttcataacaacaacaattatagcaataatgttaaaagtttaataatcgatgagcatgtaacatgaataaattgacatattgttacaggttcaaactttatattaactttgacattgaataaatgaagatgtgcgtggagtgaatgttattaattattataccggcttctctaaatgagcaacagagcaagtcaatttatttgaggctaagataaacaattttaatggtgtgttgtagtagtattttttatttttgtttttgtttttgaaatcacggtgtgttttattttgtgatttgaactttatctcaatttgatgcacttgcaaatttgcaatctctctctctctctctctctctctcattctctcaacaatgtaagtattatttttatatttaaatgtttttttatctacgctaaatttagagatatttccctaaaacttattaaatttacaccaagaagcagaatgcttaatacaaataaaattaattatatttattttattactagatcaatatattaattaaatatgtaataagttccataaatgaataaaaaaataccgtgaatannnnnnnnnnnnnnnnnnnnnnnnnnnnnnnnnnnnnnnnnnnnnnnnnnnnnnnnnnnnnnnnnnnnnnnnnnnnnnnnnnnnnnnnnnnnnnnnnnnnnnnnnnnnnnnnnnnnnnnnnnnnnnnnnnnnnnnnnnnnnnnnnnncaaattttattattaataatttattatctccgtcatcagtatatcaacaaattcaacgcggtttacggcttggcttagattgattttgaagttaatttattccatttgatcattttagaaaaacctatacgcaaagaaaagtcaaatttaattaatcaaatataatcatttataattttattaaataaattatatattttttaatggacaactcgttatttttaatcaataaacaaatgaaagttcataagattagaattttgaaccggcatataaattcctctattatttaatttttcatttaaggaaaaatacttattaaataaaaaataaaatatatagtaaatataaaaatcttgttcagatactaagtttcatcacaaaccataacttgatataaattacaaattacaagttaaaacaatttcaagtttattttaagaaactaatgcaagtttactatatatatttatggttttgtttaatttatttctattttgaacattaaaaaaaattgaactgaatgttgttcattttttttcaacaaacgattttaaagatttatttgatttttttagaccagtctgctaattttgaacagtttgggaaaataaatttttgaatagtattctataataaacaagatttttgtgagttgtgataaggctaaaaataatggtgactttggattgctgtcatgggacattttgcgtaagcgttaggaacaagtaaaatatattttatgattttcaatttacatctttaaggtaattatttaaaataaaaaaatgagagcatgttagatagacacaaacttnnnnnnnnnnnnnnnnnnnnnnnnnnnnnnnnnnnnnnnnnnnnnnnnnnnnnnnnnnnnnnnnnnnnnnnnnnnnnnnnnnnnnnnnnnnnnnnnnnnnnnnnnnnnnnnnnnnnnnnnnnnnnnnnnnnnnnnnnnnnnnnnnnnnnnnnnnnnnnnnnnnnnnnnnnnnnnnnnnnnnnnnnnnnnnnnnnnnnnnnnnnnnnnnnnnnnnnnnnnnnnnnnnnnnnnnnnnnnnnnnnnnnnnnnnnnnnnnnnnnnnnnnnnnnnnnnnnnnnnnnnnnnnnnnnnnnnnnnnnnnnnnnnnnnnnnnnnnnnnnnnnnnnnnnnnnnnnnnnnnnnnnnnnnnnnnnnnnnnnnnnnnnnnnnnnnnnnnnnnnnnnnnnnnnnnnnnnnnnnnnnnnnnnnnnnnnnnnnnnnnnnnnnnnnnnnnnnnnnnnnnnnnnnnnnnnnnnnnnnnnnnnnnnnnnnnnnnnnnnnnnnnnnnnnnnnnnnnnnnnnnnnnnnnnnnnnnnnnnnnnnnnnnnnnnnnnnnnnnnnnnnnnnnnnnnnnnnnnnnnnnnnnnnnnnnnnnnnnnnnnnnnnnnnnnnnnnnnnnnnnnnnnnnnnnnnnnnnnnnnnnnnnnnnnnnnnnnnnnnnnnnnnnnnnnnnnnnnnnnnnnnnnnnnnnnnnnnnnnnnnnnnnnnnnnnnnnnnnnnnnnnnnnnnnnnnnnnnnnnnnnnnnnnnnnnnnnnnnnnnnnnnnnnnnnnnnnnnnnnnnnnnnnnnnnnnnnnnnnnnnnnnnnnnnnnnnnnnnnnnnnnnnnnnnnnnnnnnnnnnnnnnnnnnnnnnnnnnnnnnnnnnnnnnnnnnnnnnnnnnnnnnnnnnnnnnnnnnnnnnnnnnnnnnnnnnnnnnnnnnnnnnnnnnnnnnnnnnnnnnnnnnnnnnnnnnnnnnnnnnnnnnnnnnnnnnnnnnnnnnnnnnnnnnnnnnnnnnnnnnnnnnnnnnnnnnnnnnnnnnnnnnnnnnnnnnnnnnnnnnnnnnnnnnnnnnnnnnnnnnnnnnnnnnnnnnnnnnnnnnnnnnnnnnnnnnnnnnnnnnnnnnnnnnnnnnnnnnnnnnnnnnnnnnnnnnnnnnnnnnnnnnnnnnnnnnnnnnnnnnnnnnnnnnnnnnnnnnnnnnnnnnnnnnnnnnnnnnnnnnnnnnnnnnnnnnnnnnnnnnnnnnnnnnnnnnnnnnnnnnnnnnnnnnnnnnnnnnnnnnnnnnnnnnnnnnnnnnnnnnnnnnnnnnnnnnnnnnnnnnnnnnnnnnnnnnnnnnnnnnnnnnnnnnnnnnnnnnnnnnnnnnnnnnnnnnnnnnnnnnnnnnnnnnnnnnnnnnnnnnnnnnnnnnnnnnnnnnnnnnnnnnnnnnnnnnnnnnnnnnnnnnnnnnnnnnnnnnnnnnnnnnnnnnnnnnnnnnnnnnnnnnnnnnnnnnnnnnnnnnnnnnnnatcaactttaatattcaagtaattttttgtgtaattatctaggatttctatgatctgtcctttatatttggagtttcttttttgggctttgctcctcctcgctaaaaaaaaaaattgtataaaatttataaatttaatgacatcataaaatttaagataaataatttatttaaggaagtgaagatgctcttaatttttatctgatatttattttaccatgataaaagaataagtaaaagggaccaatgttttatacttttattttgattaaaaaaaaagaaaaaagaaacgtacactaatagtcgctgaagaaatttccgaaagtgtgtgtgcgatgagaagatgatgaggaaacattggtagaagtaattgaagagagagagagagagggttgaatttgttttcttcttcatttctctaaagagaatctaatctcaatcctcattacagatttcttcattcctctctcaatcttttctgttttccccctttgacatcctcgttttcgccgaaacaaaaacaactaagatttttttttgttttttatttttcttcttcttgttgttatttgactcggttgttgcagcagggtcgggagccacaggtattgccagatcctttgttatttccattatcttatttgttttgattttctgttttgggtgtgttttgtttggttatggaacatatgtgtctggttttggttttggagcatattatattgaacatattgactctcgaatgttggggttggtcatatttgtctgcggagcaggtgctacgtgtttttgacttggatcaggcattctggtgtctggtttcctctgtaaaacaaattagtgggaattttggttcaattggttattgattcatttgcgtgtgagtcttagcgtttcattttggttgagtttcctggtgaatggtctttaactttgcagctatgcagagccaagttgtgtgcaatggttgtaggagccttctgctttacccaagaggggcaaccaatgtttgttgtgcattgtgcaacacaattacctctgttcctccacctggtaagctcattggttgtttctgtttttgcaaattttaagattaggtaaactcactcattttatattggtgtgtctcccgtctttatctatttggtatgtgccatttattcaatttgaaacaaatcatgttgccttctggatttaatatttacatgtagtcagactccattttgatgcttattctgaggaactctaccataataataacctgcagggatggaaatgtctcaactttattgtggaggttgtaggacattgctaatgtacacacgtggagctacaagtgtgagatgttcctgctgtcacactgtaaaccttgttccaccaggtactgaatgttagtatgttcttgttaaaaaaaccactacatgttagtatgttaccttagtggtttagcattgattttggtggactgtatgttaatttgcttgttaatataaatcttctattttataattgtggtgatgttttgttggattacttggttattgaatatatggttaatgtgaatggtgttaccaaatcctggtgaaggggtcagcaaggggtgcattaaggtgatccttttatttatttattcatttatttcctgtgtattctttgggatgcatctggcttgctacttaaaaagattgctaccaacttgacctttcattagaaagaaggtttccctttttgagggaggtcatgactcatgaccacataacctcgattcagtcttcctcatctattatccctctttgttcaaattcctatagggtggaagataagttgaaaaaattatgtgagattcctttcacatgcggttggagattgtaatatggtcatctggttatttgccagtttgttgtaaggctagaaaagaatgaggtcttagtcttggtggtttagtttctaagaacattactctagtggcaaaatggttatggtggtttcccttggaacttatctatctgtgattctgtggtactgtatgatttgtaaattttggaaccttatctttttgtgaattcattttccagcaaatcacatagaatataggtttgtgtcagaatccccccctcccaaaaaaaagcagcagcagcagccacattcatcaattcttccttcatgatcaatcaatgaaaatgttgattcttaacatttgtccttgccctattgcttttgcttacagtctggactctggagaagaacaatcttaatcacaaagatataaaaacatgagagttagtataaatggcaaacagttgttataatttatagccagctacttgttaatctgtcattgagttttatttctttgataaaagaatatactttcataatcatttttcattgtcattttttggaatattccaattccaatgttaattttgaattgcatattaactacaagatgttgggatccttatgcagtgttgctttaattggttctgttttcttatactcatgcccatctaatgatgaaatccttgttatatttaataacctatgcttattattcaattaattgtttcctgactatccgttgctgggctttgtatctgcattataaagcatctaatcaagtagctcatgtccattgtgggaactgccggacaacactcatgtatccttatggagctccctcagtcaaatgtgctctttgtcactttattactaatgtcagtgtaagtttttattgatagaactatgttatctgagcattgaatatttaggctaaaaatttgttatgggtcagtgtatgttgtgtgtaggtaattatataacctgtgttttctaataggaaaggcttttatatatagataatttatatttttattagctattctggtattagtcttattaccttctgtgtcctgtttattctttacaagcatgaccacttgagtaatctcatgctggctaatagagattgggatccagcctaaaagattggagcctataatttgtcaaaacccacttatatgccctacctcttgactaacttactaggatgtcctttaacattagatgcatctgtaaaggttatgatatactgaatatataattatgagattgtcaggagttataaggttgacttggtggttgggaagggggtttaaggttgaagggagaagagggggaggggggagaggttgtatgcttgtatccctccactaaaattctaacaaatactaacaactaacatttgctgataaaagaaattatgagattgtcattctcaacttctattttttgtgaatatgaatgtatctatttggtatgtttaatttttctgagttgatttttatactgtttacttgcttttgctcccctttcctgtcttgtagacaaacaatggaaggcttccgatccctgtccatagacccaatgggacaaccaatgctggaacactacctactacttcaacagtatgcttttattttaattttaattttttgtgattattcatagtaaggatgtattagcggttttctgttctgattatattattctatttcactacctgcagtcaatgccccaatctcaaagtcaaacagtagtggtagaaaatccaatgtctgttgattcaagtgggaaattggtaattgttattgcttttcatttttattttggacttgtattttctttcttcatatatgattcccctgagcatagcaagttttccttaaaataaatttgacatgttacaggtgagcaatgttgttgttggcgttacaacagataagaaataacgtcctcacatataaaaggtacagttcatgccatgacgccttaccacagttgctgtcacaggaagatattgtttgtgtatatgaatatatatgatattgcagcctgcaattgttgaattgaaatcgatatttttccaatataagagctggacaaatatcatgcacgtatgtatgaatgtatatgaggcggacaagccgtgaaaagggcataaaacctgttttgtgtgattgccagagcctactttgttgtttccttgctagccatacccaaagcaattggttcattctgattatatgttgacttacaagtcctagactagtaaatgctactatttctttcatgacttgtgaagcttgtgcttttcttggtgatctgttagttacatatgttgtaatatttgatgatcttgtgcaagcattgcttgataaaaatgactgatatcatagatttttaccagtcatttgaaaatttggacaagacccaggctgctttagaaatttgatttatacaaattctcatttgacttaggtaaacaaataatgttgaaaaacatttccaggaaaataatgaacatttgcaattacttgtgctcaaatgctacctgttggccagcatttctttcttaaaaatgtttttttaattacctgaaaatagaaataaaataaaatggagaaatcttttggtagaatcacgttaatgttatttcacacatcgtgagttttcattggaattgtgtatcaaacacatcgttgcttgtgtggttgaatatctaagataactttgtggctctttgcccccgttattacataaaataaaaatctactgtttgttaagttaaattattttttaggattaattacattttaccctcttataatttctcatttttttacatcactaaatttttcctaaagcttggtttaaaacaaaaccatcaaatttcgttaactctgcttaattaactaattgtagccttctgtaaaaaaagaaaacctaattatagccttgttagtaacggtttaaaccatagttatgatatttttcagttaaatattttttttgttcacattttagcctaaagcgtttatttgattttttttcttgggggggaaggatggaaaaacttttcattcgtttatctgttaaaaaaacttgagtgctaaaaagtgttggatatcattaccttaactaagaatttttatatttaagatattgattattcaaaaatggatttttttcatgagatgatgctcaagtagcacttttatgctcccaatttaggctcagatttcaagtaacaaactgaaattggctcaaggacccattaaacagaaaacagatcttccgaaaatgtactccaaatgtatagtttagatatcaaagtacagtttttttatatatatataaaaaaaaaaaaactatatatcaaagtacagttaattatacctttactnntcaacaatgttagatatcaccctaacaaaaactattagatatcaaagtctaagcaagtgtatagtttttattttgctctccaaatgtatagtttagacaaaagataaatgggtgctttctaatcatgaacatgaaagaagtaaatcagcagagtaccagatttgaaggaaaaacaatttcaaaattggatattatacgagataataaggaaaatgttaaggtaccaggcacctgcctcattgacgtagctgcctttaagatttctttatatatagaaaattaattttaacttaaattattaggtgagtacttttaatatattatttataattaattcattagtaacattttggaatctaaaaatatatatcgttaaagagtatttaataagccttatcacttatttaaaaaaatataagaaaatttatttaaaaaaaaaatggcattgacatgaatatagagctaaaacttcattaaaaaaataatatgatctatggaaacagaccattttgatgaaaaagacagtggttagttctcttattgagagctaatttgaacaaactttagaatatgaaatcacttttgtcttttttatctgaatcccaacaattaattttttaaaagatggaaaattaaaaaataataaatattaatatgaaacaattttgagttatagtgagcattaattttatattgattttatttttctaaaattaaagatactgaatgaaatactaataagcattttattagaagtattaaattatattaaaaaaatatctccttgaaaatgaatgtaatgtttataaaatatcatcaacaatacttgttattattgtcattgttaaaggatgtttttcaaatttaaagttaatttttaaaaaattctatttacaataacaatgttataacctagtaatagatcaatgaattaccatattcgtgagagattgaaattaattttattacaaacatttaattaataattacattagttatttattagcatcacttaagtatgtaatgataatacaaataagtattaatggatttgagttttgtgaataaaaaaatatggttgagatgaaaaattcactaaaagtgattagttaaaattttcgggtaaaaattagttaaataaaaattagtggatactcgacattattgtcgtagtgataaaaaaaataatataaaaagtgctgtattattacacacttaagtgatttcatctgttgattctttcaattaagaaaaagagtagccactaattggtatattatgttttcggggtggggatgtattcaatggcgccgtgctgtatttttggggcatattccatatgctgttgttaggaaacttgctgggaaatgcaataggggctatgcttgtacacgtacgattgtcccatattaataatatttctttggtgcttaaaagaatctactgattctttggtgtgggctgattttgatgtgtggtttttactttgttcgctttttgattttattgtagttgtagcagccataacagtgttgttgaggaagagagagaaaaggaggagatacaggggcagtgttgtcacggggttgagggagatggagggataaatttggaaactttgagaaaaggagaagaagaaaaaatcccagacggtggatacagaaaactcataaatctaacggacaatatttctttcccacaacggtggatatatgttgttcagactgaaagttacatttcgcagtttaaacatttgctttgaggtccgcagtttacaactacaacaagtgagtgatatggattcttctgatcactcttactcatcaaacaaccagcaggtatgtaacttgtttccaaatgatgcagcaaatatatgattttttttctacttagaatgaaaaatgaagcattattttgtggaaacaatagctaaaaaagtgaacttggaatataatcataatcataactcgtttgatgtgtttcacacacacacacacacacacacaacacatagaggtttctctagtttgggctccaacctttgcttcaaactgaacatgtgatctgtatatttggacatatattatgacaactatgtttgtttttctaatttgcacatatttaatcataatcataactcgtttgatgtgtttcacacacacacaacacatagaggtttctctattttgggctccaacctttgcttcaaactgaatatgtgatctgtatatttggacatatattatgacaactatgtttgtttttctaatttgcacatattattggtctgtgtttgatgatgttcagtcagactcttggtgggagggcactccttctgccaaaaacaaaaagtgtttgattccagattccactagaatttgtgggattcgtgcgaggttgagatcatcatgcaaggttatgggaactagaagaaacatctgtgaagacttactaccagatttcagattcagaatgttctctaatagaagtagaatcccttccaacacgtacaagttgatcatccttctacctttgagccagaaatcacatatgaagcatctgaaaatacatttcccatcttcttagcaaatcgaactagtgtgccaaactgtttccagtcaaacctatcgaatcggttgatccggttcttaaaacactgcaaataggtatgatttcaaatggcatttcgcactcacaattgtggccgtaatgtcaaagtattttaactcacaacaacgcaatcgtaattaaaatcctatcagctgtattttctcatgtaatcgcgaccgcaattaggtcaataggtaaaaaagcaagagtgcaagagaccgaacctgcgacgggaatttccacggcgaactaggtagcagaacaccgagaacaaggcggagacgctggaaacgacgtaggagagcacgacggcgggtccgaccaccgtccttgcctcgaggccggtgaggacgaatatgccggaacctatgacagcgccgattacgaaccacatgaggtcccaccagttcagcatcttcatctcgtggctgctccgtgccttcatctccaccaccgtttcttatgttttgctcctctcacttccgaactgaaaactgaaaagtggttattatggatccaaagtaagaagagtcatgaggagaataatggatatttatttatagtggagacttatagcaactttagtgcaagattttaagtaaggatcttgagctcaagatctgatcttcactagatcttccaataaaggaggtagagagatctctaacatggagaatgagttcttatagaagaacctttaagatctgcacattgttcaaaagagaataaattttttttctctttctctctccctaagatctcaaaataaaatctaccattaaagaacaaaataggagggatcttgagagatcttcaatcctacatggcactatgaggtctaccaaaaaatggtctaagattccaatttgagatctatcactgcttaatttgcatggtatacaattccaaaatcattgactaaatataataatataattttaattaattagataaaattgagtaattaattactcgtgtgtaaggttgcacgcattaaaaaatcgaatttaaattattgcaggaacgggacatggaaaataatcagggagagaaataggtacgatgtttggaaaaacaaaaaaaatactgctgctgtattaaggactttatttcgcattattgtattcacttttagctgccatgacatgttcccaccattttaggaatagataaaattgtctatatatttttattatgatattggcataaaatatttattaattttgataataattaatttttatcaaagaatctaactaataaattttaataaaatctctattttgaaacacattttttcatttgcttaatttcgaaaacttagataaaaaataaaattcatgatcactcgaataatgatttgttggtaaaaatattatctatttatttattctataaatgacatctccatgtgcacaattaatacacatgcgatgtgcttagcccccttattttccggtaatatatatatatttttttgtaataatgtgcttagcccttgttatgaaataattaacaaaaaacaaagctgtctaaaaaattaacaaaaaaacaaatgttgacggaatgaagtaagtgggtgatagtttagtgaaaaaaagtcagtcggaaacgaaaagagaatcatgtggagacatcaaggagacagtagtcaaaggatgaaaaaaaaagttcttatacttccacatttgaccttataataataaatttaaaaatttagtttaaactataatatccttcacctgagccgacatagagaattttaaacaattaaatttgtggaatttgaatttccctctaaaagtgagaaattgaaattctctttttttttagaagttctaaatgcacaactttttattccgtctcaatcatagacatacttcgacctccactgctctcaagataatattcaccttaagtatttttccgtgaatgaggttcaaaattttaaaaatgaagaaattcaatttctttatccaaatacaaaattttgaaaataaaaaatttttaattgatgtattttaatttccctgaattttaaatttcctaaaattttaaaatatttcgttcaaacatactctaaagaaatacattctaaatttttcaactagaggggtacatatcaaaatggaccaaattttccataaaaacaaaacaaaagaacaatatatacgtcaaattaaattaataaggaacctggacatattaatttatagtaaatcaagttgtataccccgtactgttaaaaatacaataatatatgaccctaaagtagtgcgaggcttttcttgttaattactaatttaggcacacacattcatcatgaattgttatatactgctatttattgcatatataaattaaagcgcaacccctcagggtctccaccaggtgcaccccctctactcttgaaacgctttctttctctcacgcaccagatgatcgctgttttctccactttcacttccttaattcattccattaattagattttgcatgttcccctccataattgtctgtaagtactattttgcttagtagtttcctctctatatatatttgctttttgagaatatgtaagcattgagaagaagacaccttgtgcgtgtgtgtattagcgtgtttatttctacattaatttcacatgtgattttcacgtctgagatatgatcttcagagattaataattatatatactatatctcaaacatgattcagaaattcagacatgttgtatatatatgcgtgcatctagctataatattgctctcttaggcttggattctagcttattagttataagtaacacgtacaagaacatcatgcatgcatgtatgtcatgacataagaagaaaagaaagacaagacaaaatgctaattcaggttttgtttggtacttcctgcgtaaactatattaattaataattatatactgaaccattaattacgtaacgcgcatgcatatattttgatttatacagagagaggaacagaatggaaatggaagaaggtgggagcaggggtgcaaggagaaggggatgcacgtttcagaaaaacgatttcttcccggaggaatcgtttaagagttggggtaactatggaaaagcgttgagggagacgccgtggaggtttaaggatcgggttacgacccgatccaaggacgagacggaggtggtggagatgaaggggaggagcagcaacgagatgaagaagacgctcaactcgtgggatctcatatggttcggcatcggcgccgtcatcggctccggcatatttgttattaccggcctcgaggctcgtgaggctgctggtccagctgtcgtcttgtcctacgttgtttccggcatgtccgccttgctctccgtcttctgctacaccgaattcgccgtcgaaattcccgtcgcaggtttttgccctactttattattaagacaagacaaagcttactttcagtttggtgttttttcggagatactgtgaaatggtcaactaggacttcattgtcctaatcaatgtccacaaattacgtagttgagtaattacatgttagtgggagattgacaaagacttgtagattcgatcatagtgattatttctattaatcttttggtgtatcgattatttcttttcttatatattatagagatgaaaactttcataagaacacaatgtcaaaaatactttaagaaatagtaaaaatcgttgacacagattatttgatatttagatatcttaatcaaggtctttgatgggggttttggtctttttaaagtactgagatgaagttttaattttatctacataaaatcttccaacttttaacttaagattttgtttttgaaaattaaaagcaaaatggcgctacataccagagaaaaagaaacctataataagtaatatcattggaggaaattttctgttacttaattctattggattcgaatagaattattttaaaaaaataagaattaatagatatgtatcataataaatgcctaatgtataatcactgttttacttaagaatgtgaaagcaatgatatatatacgatagtttttgtggtgtgtgtttttcaggtgggtcatttgcatacttaagagtggaactgggagacttcgtggccttcatggccgccggaaacatcctcctggagtacgtaataggcggcgccgccatatcgcggtcatggacctcctacttcgccaccctatgcaaccaccacccagacgagttccgcataatagtccccaacatgaaccccgactacggccacctggaccccatagccgtggtggtcctcatcgccatagccaccctcgcaatgtgcagcaccaaagcctcctccatcttcaacaacatcgccaccatcctccactgcctcgtcatcgtcttcatcatcgtcgccggattaatcaacgccaatccacaaaacctaactcccttcgcacccttcggagcccgcggcgtcttcaaggcctcggcggttctcttctttgcctacctcggcttcgacgcggtggcgacaatggcagaggaaaccaagaaccctgctagagacattcccattggacttgtcgggtccatgacgataacaacgttggtgtattgcttattgtctttatcactatgtcttgtgcagtcctacaaggatattgacgtggatgcaccgttttctgttgcttttaacgctgttgggtgggattgggcaaagtacatcgttgcattgggtgcgttaaagggaatgaccactgttttgcttgtgactatagttggtgagtctcgttacttgacacacatttcacgtactcacatgatgccaccttggtttggccacgtggatgacaagaccgggacgccggtgaatgctacaatagcaatgctcacagcaacctcagtggttgctttcttcacaaactttcgtgttctctctaacctcttgtccatttccactctctttattttcatgcttgtggccgtggcgcttctagttaggcgatattactcaagtggggtaacaacaaaggagaatcaagtgaagtttgttctgtgccttgtgctaatatttgggtcttcgtgtggcgtttcggcttattgggcaaacagtgatgggattattgggtacgtgatttgtgtgccgttatgggttttagggaccggagggctttggcttggtgttccaatggccaaaaaacccaaagtttggggggtgcctttggttccgtggctgcctgctttgtctatttatatcaatattttccttcttggctctatcgacgtggactcgtatattaggtttggggtgtggacggtgttgctcttggtttactatgctcttgttgggttgcatgcttcttatgacacggcaaaggagtctgagagtgaaagtaatattactactaatcaggttcatgaccaagagttgaaccatgttgaacagggactgcaaagcgaaaagactacataggttcaaaaaagttgttttacttgtgtattacatcataaatcgtatcatatttatattttttttctctttcactagatattgaataatatcatgccattatggatgttaatccaacatttttcctaaacgtaatgtgcatatacatataatatatatatatatatatataatattaagtgatgatttatgagtatccatatgttttaattaaacacttattctttctctatctctttttttatgtatatttttcccacttttaactctcttattaggtgttgattgatatattggatgttcaagtataatttttgtatgatattagattagattagagatcaaccacaaaaaaataaatagtctcacgtgcttattatgtgtgagaatatatatgcaaagtaatatttattgtaagaaaatacatatggggtctgtttggatgtaactttatctcaaaatatttttagaagaaaaaaaaatgaaataagtttttctataaattaaaataagttttttattagttaatttgtagatatcatctcatcttttagagaaattatattggtgaacttctaaaaattagctaatgaaaaacttatttttatttttgaaaaaattcattttatttttttccttcttatttttttctttaaaagtacttatagaaaaatttacatccaaaccgagcttatgtaaacattgaaagagcaaaataccaaaaaagatcaaatagaacattaaattatgtgtaatataaaaaacaaaacttcagatacatcgatatatcaatgtaatttattctatttaattaaattttgaaattattgggggcagtacaaagagagcaaatggacagcatagtttacaaaagttgaagcataatatgagcttctatcggaacagtggtcaaaataccacactttctaaaattatttgtcaatctgccacaccaacaaaacaaattatgcatatgccacgtgggctaattcgcaggaccattaggcgaattaggtgcattagctggtgacccttttttgccacgtggcaatccacaattggttacctaattcgctagacaggttagcgaattaggtgctgaccgggcaatgtctgattggacagggtaggacacgtggcaattggacacgtaatttgtcatggcttgaagcgaattaggtaatatttgataaaaattttactgaataaaaataaattttaannnnnnnnnntttgtcggtcacatgattatattttttttttattgtcgctaactagtgtcttaaaaaattaaaaggaaattttttttaatatgaaaattatagataagcagaaaaaaatcataaagagtacaatttcatacatcctaataaaaaaatcatgggttagcatttgtcttgagcgctatttgtttggtgattattaaaaagaaagaaaaaatattaatttaaataatgttaaactatgtaagtgtaattaagaggatttagttcaattaaggatgataaatgaatgttataaatctcttcatnnnnnnnnnnnnnnnnnnnnnnnnnnnnnnnnnnnnnnnnnnnnnnnnnnnnnnnnnnatactttaccattttgtaaatttaattaaaataaatctctttatattatcttcgatttgattcttatagataaaaaaaaaatgtaaacttaaagaataaataaagtagagatttttaggggggaatgcttatggttggaacaaatccattttcttatgacgttacagttgcatttgtcctagaccagctaatttatctgagcagactgagccttctgccatttctactgaagcaactgggttgaaaggttcagttgctgatctcataagattattgacttgagtaatttgtacgtattattgtttcattgatttggttttcaagggttgtagtagtgtgatgtgaagaaatatagttgtctttgagaggtcatacttattatgataattagctcataaacatgtgattatatttgttataattttgctttatttgtagtcccaggatattggtttctagctttagttttagatctgattttgtgtcgagtaatgccttcctagtggtaggagaatatttctcactttgtttaaattgtcataaatccaaattttacatatgcagagcatttcttgaagcaaagtgtggatttctgataactcaagtgcaaagggcacctttttgtgttagttatgctatctgtaatcagtttatattaagttccattggctttttggtattgcaagaaattctagttttattcgtggttatcaacaaggatatgtttaccagcagaagtttagtttggtgaacataaagttgaaatgggtgaaagataggacattggatgttgttgttgctggtcagagggatcttaaggcagctgggatccttgtctccgtcatttattcttcttctgaatactgccttccaatataccatctttctcgccacagtggacaaatcagtcttccgagtgacctcaaactctccacctttatcagaagatatcccaatatatttattgagtcctcttttcttgatagtggaggctctcctgttctgtgtttcagtttgagtcctgaagccttggagctccatcacgaggaaatgaacatccttcagcaaaatcagttggaactccgggataggctgtgcaaattgcttatgctcacaagtgataggatccttccactacaaaccattgaccagttaaagtgggacttggttttaccatatgattaccagcattcttttgttccaaatcaccctgaaaggttctcatatgttcgccttcctgatgattgtgttggcttgaaattgttgttttgggatgacaatcttgtcatcagttacagaagaatacttctctacaacaaaaggcagaagacataaaaaatggatccttagcatttccatttagtttcacaaggggttttggtttgaaaagaaaatgcatggagtggttgaaagagtggcagaaactcccctatacttcaccttacatcaatgcctctcacaaaaagaaaaagaatagttagggtcttccatgagctccttcacctcacacttcataagcaaactgagcgcaagaacgttagcaacttgtgtaaacccttggctctacctcataagtttattaaggctttgtttgggagttaggagaggaagggaaggaaagagattaaaggggaagggagggaaaggaaagggaagaaaatgagggaagttccttcctccttatttggaagttaaaaatataataagagagggaatgaagagttaataagatatttttacaattttgctcttgaattgtgattcagtgctttatattttggtgttttattaacactgactggagtaagatagtaattttattaacactgactggggtaggatagtaattattatttttccttctaaaaactctcaaattggtagaacaacaatttttagactttgaagaatttcaaatgagttttaaaaattctcaaatcatttttctcaaaaattaaaactttcaaacaaggagatgtcaccacctaaacctttatcttacctcgcttctcctctacaatccctctcccaaacaaagcctaaagtatttgagtgtcatcctggtattttttatatttccaagaagagtgatacccaaacagttgttcttagggaggcctataatggtcaggaacctttgctgaatcatccccttctacaaattagagaggaattctcaagcctgctgaagaaagggctaccggataggagtaggggtgtatacaaaaaaaacatagacattaatttggtggagggtctggagaggaggtttgcattgctaaaaaaactaaccagcttagttctgaggacgaatcagattccatgttttctgaatatgattcagatggccctctacaaaacccttgctgatatatgtgaatgtgatatttctctttagccattatgttaatgtggtttgacttagtgacaattttgaaatctgtcctagatgggagggatgtttgcatattactacttttaacccgcttttgcctcttgtgaagatctgtcaatgaccaaatatatcagcaatgctatcttagcaagggagagcattttctgattagatgtaatattatggaataaggtttacagctcaatattatttgaagattagatagacacaggtatagctacaattcattttactaaaagaaattttgggtatctcagaatctttatggtagttgaaaatgtaatttaaaaacaatgactagatgcttatagttctagagcatctttttttctggggttatgggaggtgtttgacaaaaatcacaatatttttaaaaacaaattcgcatgaatttgttcattatgcccatgaggaagttttgctgaactaattaaagtatctttatcctgtaattagagaaagagttgcataattttttctctcttcaaattcacacacgataaaaataagctgatacatgcctttaagccctatttttgtaataataaaataaaaactagttcttgaaaggtagcctgttaattaattcataaaggggaattcatactcaggaacggttggtattcttactctggcatttgtcctcgcgtcccaaaagttaaattttgtcgtgtaagatattaaatgcatgccatttatattattctgaatataaacttgatgccactcgtgctattgagactttcaacttttttctccatttgaaagtgacaaaactgtacagtttaagcgcttcatgatcacaattcacaactgacttatcagtttttcatattccaattttgtagatgaccagtccaaaaccaattttttacggacaaaatttaaataatgtcccttttaatcctcttaattcttaaataaatcatgtactttgaataatattcaaatattattgatcgatgtaataaaatacttaaatctaaattttgccatttcaattttatcaatttgatctaccatttcagcttattttcataacattgatctttttttaaaataacttatttttgccatcaatgaattttccaaataacttttttttcttaaaagattattacataaacagatcaacttaacacttacatatgttgaaattaaaataattaaaagactactactgcttggtgaaatcaaagtgacagtcctccaatgactgaaaatcaacttgatttaccattttttcaaggaccaaatttatgtctcaaaaatcattcgaattaccttttttttaatgttcaactaaaacttttgaacaatgttaaaatacatcttgatattggacgtcaaatctgaccagattttctatgcgtgtttcgcttgttaacatgacacttgacagaactgcaacgtataactaacttgaaagcaaatattaggaaaatgatagcgtgtccaaaagtgaaagcactatcatgccttagaacatgacattcatatcatacactatgtgatctccatgtattgtgaaatgcaaacagaagttaaaagcggggggaaaaatacaaacatatatgttattttaacccccacccaacctctcaaaaagaacaaagttaaatgagaaaaaaaaaaaaaaacaaaacaacgaaactacaaaactacaaaactacaaaacaatataaaatcagtgcaaccttgtcaactcttctactctcttgcataactcctctactgaaacgtccaatgccttggaaatttcatccatcttactgcggttaagatcaagaaatgattcgatcaaatctccatctaaaaagtttctggcttcaacagttttcttctcgttgttaaatgatctccattgctcatggctgagccctccaacgcctttaattaccttcctcaaatttgactgaagtttctccaagaaaacatattgctcatgtggaagagaagcaattactccaataacaccattaatggtgccaaagataacagttgggatctggcccacatcagaatctggcaagcgcataacaagggagccatgccggaaccgattgacaaattctccaaggtgatactcaccaaccacttcaagacgacctcgctcttcatcagtggcaccttcactatttttccgaacagtgaacagattaaaactgttttctgcacctagatatatgtcatcatcaacgatttcaacggcagacatccaatttgcgttgtagtcacgagctctttcctcaatagcaccttcttcatgctatcaataaggaaaaatttatcattccaaaagaacatggtatactcattatatatacaaaaatcagttattcatccaaaacgataagcagcacaacagttgaaatttaacaaaaccagacagaaaatagtgtcacaacagtttaaaatttaccttgtagattaacaaggaaattgacttcatcagatcaccaactacaataaaatctcctctagtttgcacataaagtgctaggatgtgcccatgatgtccacattcagactgcaattcatgggtaccatcatcccggagcacccacttatacagctgaattttttgattaatagcagcaagcaatttaccattaaatgcattcaagcaataaacagctcctttagtctctttctcggcaattagctgtagttttccatcttcaacagcaaaaacaagaattcttccctacatgttttaaaatggccataggaagcaggatatcagaagctttgactagaacaaagccgaaaaaatacaaatttctcaacttactttggttggttcattctcctctggatgtacatatgcagttccaacacagtaatacacattattgtcatctgagaaggagcagctaattatgaagcaaccgtactcataagtgtcaagagaataagttgatatgaactcaaaagtctggtcgtccagcaaacggacaaagtgcatttcagattcttcaccacttgctgggttgtatttcaaactacaaatagcaaaagtcctagattgctcctggtggcagatacgtcgtgcatgctcccccagtggaatagagcgaatatgaagtttttgtatatcatcaatggtgccaatagtaagctcaccttcttttgcaattgccaaactgtttaagttattaaaagtagatgagtaccattaccagtaaattattttacattaaattgaacaagatccaagaacagcacaaggggatatgtcaataactctagtaagtcaaactaacaaagaccaagatacctgtctggaaaagcagcagaattgaaaggacacatgtgactcacttccttcagattcacattactataaagtaactttttgttactactgtaaatcacagttggccgatcagatgcagcaaacacatgagtagtatttttggaggagaacgtccgtagtgtaataggttgtgtccctagagatacctttttcctatctgttaattcaccagtacttgtattcaacataaagtttaagagatggccatcacctagagcacatagcaagtacgatatctggaggataaattgacaaggcaacacactttaataggatatttttaaggaaactaccataaaacttgtgacattgaaagctaagcaatgcctcaatttaacatgagcataagagtaaaaagatattaatgttgctgatcttcgtatattcctcacaactgccacacatgtaaaaatccaaaatctctacctcaaattgaacttacaagaaataaaataagaaagcagaatgctagaatcaaaaaaacaaaaccaagtacaaaaaataactcaacgaaagcctaccccttcaaaggcacaaagaagaacagaacgaggtatgatctcccctcctaattgttcctttgtgatgagactcagatcaggaagagaaaaaattctaacacttatgtctgtccacattccaactgctgctagatgactgtgattggggttttcaccaatgggatttatgtccaggcatgaaatctcatactccagctgggcatgttttacttcctgtaatatgccatctccaatttcaaggtaaaccaaatgccctcctcctgtggccaacaaaacctgtgtccaagtgtaacaataattaccaatttaattgcaaactcaatatgtattgtcataataaaatccaacaatggaaatgtgcagtgtaaaagtaatgaaatagattgaagcaaattctcttaaatggtaactttagtagagcttggttggataccataccaaaactactcgtagagatccagaaataatatcaaaggccaagttttgaagttgcaaccaagcagaacatttatttggccagcagcaaaatactgttacttctggtcaaaattaattctagtatttctttacaaattaaacaaaatcatgtttggctgaacagtcttatattatataaaacttattccaaggagcttgattggataccataccaaaactactcgtggagatacatcaaaggccaagttttgaagttgctgcaaagcacaacatttgtttgaccagtagcaaaaatactgatacttctggtcaaaattaattctagtatttctataccaattaaacaaaatcatgtttggctcaacggtcttatgttatataaaacttattccaaggaatttgccacaaattatattactttgtagattgtctgtagctttaagatatcagaatctggagttctctaccctttggaggagtcttgcagtgatgcaaaatcctttcaactttaaggaattaaaataagtaaaatatacactgccactgagtcattaacttgttttagctttaactttccactgttattggattattgttttatattattaaaaaacataggacaaaataaatattacacaatctgaattaaaatatcaaaacagacaacaaacaaatttatcagtataaaagacattcttattcatgtagaataacttattattggagcttcactgaacaccaaaaacaatccatggagaatcaaagaacatgattctttaagtaaatgaaatgatggaagcaggcatttaaaaactacagccttcgcacctaactaacatttactgcaccttcaggaaatatctttcatgcttagagcttcactgaacaccaaaaaacaatccttgaagaatcaaagaacatgattctctaagtaaatgaaaaattggaagcaggcattaaaaaactagagccctcacacctaacatagactgaaaaggaaatattcgtctttcatacttacagaagtcataaagtcatttacttaaaaaatattccataaaccaatgacaaatatgtcacaattactaattcaacatgccttcagctgtcttcctccttttatctttaagaattaacccaaggtagcatttattagcattacattctacttcaatgatcctatagctttctaaacacaataatttcacccaaataactctagcagctaatagcaaaacaggggctcaagtcatattaaagttaatgataaggagcttctcatgtcactacttccatcgtcctgacagctaatgtacatcaaaattatttccatcggaacaagtgggagggggaatgtgtcagactctgatctgcctctactcagataagccacattgacgagggaaccaattggaatttaaaaaaccactaaacaaatatcgcctataatttttaaacataacattttttgtaaagcaaccaaatcacacctgggtagcgtttgctgtagctacatttactgaatagcctgatggtgcatgccattcattccgaagctctctagttgtggagctgaccagtctgacagagctcgatgtgacctgtaatttcgatttattagctaatggcaggtgtctgccataaaacaaaataaaataaacaaaaaaagcatagaagtgtacagcagaatagcattaattaatttatggaatcaatttatgaaaattattcaaattaactacaaaggagcatgcagaacttaagcttacaaaagaagtttcaagattattaacacattatgtaagtttaaatctttatttctttaaagttccaacgtattataattcttattgtttgattccgattttgacctacccacagctttgtattatccaaaaactctaaataaatttcttattaatttttcacaaaatgggcaatcttttttaaaacaaagaaaccaaaaagaagctgacacaaatattttgtattttgaagaaacctgttgaaaacatacatcatagtaggtactaagatatcagtcctgtcttctgtctcgtgtagtcacagagaaaaaaaattctttgacaagaaatcaaaatttgtcaaaattcaaaacataaaaatatacacaaacacattatacacacatctatactgatatcttgatatcaggtaatttttatatgcagaagataaaacatgccactaattattttagaaaaatagaaaactaaaataaaaggttttattataccaaaaagggtatatatttatagtgatcaatattgggttggttgagaaacagtttgaaaattaaaggaaagcaatcctgtaagaaaacataataaatagacagcctaacagtaaaatttgatagcaaatccataagcaaatgacaaaagaactctgcagctataaatagttttcttaaccaccacttctcttaaatttagtcagagagatgtaggtgttaaatcaagataaacagaaaatcaatatggtaagaaaataaggtaagaacctacttgaacaagttgattatgaactgcatcatggcaaaataatgtctgcacttgagaacagaatccctcaatctcagtttcttccagctcatcctcaagattcattgctaagattcttgtttcacttataaaactcacaaccagaaaagtgtcaaagggatcatctgttgaggatctaagtgaccacattcctttgataccttgaagttctactgatgcctagaccaaatacatgcataaaaaaattaatattttgtaaggtgtttgtcattgatataaagatttatttttcccaatttccattccttttgaaagtgtcttgggtgcaaatgttccacactgtggtggaggaaggggagctgacctgttcattaatccctattccattacgaacgacgcgaagagaaccatccttgtaagctccagagcaagttacaacctgaccttggccctgcctttcgaggtctaccacacagaagtcaacaataggccccaaattgacatacctttccagtacttctacataagaaccttttgcatcaggctgtagatttagttttattagctgcattttaacatcagagattgtcaatatgttatgtctgaatatgtaagcataagtattcagcaatggatatgccatactacacttccaaagactttaaagcaacatgaatagaaaaggcaatgaagaaaacacttcacatattgcaaaagcttcctgatacagatatgttctttcccttccttgttatcttatattagagtaaaaaaattagaagaaaagaaaatatcctaagaaaaacacttgattgttttggtgatgcaggtcccttttgtacttatgttcttactgtactatttcatttactttgttatggagttggaatgtcagaatatttattatatattataggcttaattactgttttagtccctgaatttgggggtgtgctttttttagtccctgaaatttaaaaatgctttttttagtccctgaatttcgaaaattgctcgttttagtccctgacataataaattgatactttgtggcagtttttaagcactttatggcaggtttttttagcactttgtgacagtttttaaatgcaaattcaagtggctaaaaaataaaaattaatttaagacagctaaaaaccgtcacaaagtgtaaatttattatatcagggactaaaaaatgcaattttcaaaatttagggactaaaaatagcatttttaaatttgagggatttaaaaaaaaaaaacataccccaaattcagggactaaaacagtatttaagcctatattatatatgggagaggatccacttgctccaagagtaactcttttagagttactcttcatcctcaccgttcattttcttaagatctaatggttgtaataagtaactgatcttaaccattagatctcaagaaaatgaatggtgaggatgaggagaattactcttgaagtaagtcgatcccctcccattatatattatatatatgctgttaaattatgtttggggttccacaatagattttaagtaatatttcaaaagtctcaagtttacaactcaagtttgacagccttgctatttactatataaataaagttatgctctctaagctatatttaaacaagtacattcaagagtcataaattctcaaatctgaatacaattaataagtaatcaacccaacataagctacagattccatttcacattaaaataatgaaacaagtcaaagcttccataatagttcaaaactagtgcttggggagacggaaatttggaaataattaactttcacgttatgttctcacaaaacgaaaatttataaagtaattttccagttcattaacccacctgtgaatctccataacttgaaccaatgtagacgaatgcattatcaaggtatgatactgtagatgcaatggaagtctccccaaggggctcaattttaagtccagtaaccctataaaataaatgtaaatgacaaaccataagattcaacagttaaaatagtggtctattgtttttttataaaaatacagattgtttattcaatcaatatactgatgccgagaatgagagatcacatacttttctttctcatgggttattacaagtaggctaagcaaccctgtatggtcaccaagtaaatatctagaaccatcaggatcaactcttccataggcttttgtaattgactgaaaagcacaaaaggtacaattaagatggaagggaagtccaataactcgtattgtacaaatgcacttgtttcaaaaaatcacagatgatttaaatggaagtacaaaaaataatttttaacatacaggtctgatcgggatagccttgaaagcattagcactgcagtacactatgttttcttccccaataataagcacaccacaaagaggtgggggaactggtatcaataaatcagccccattatcaagattgttctggtaccatggaccttcaagaaaatctttatccttcagtgcaacctcatatgttttaacatgacgagcatctttattatcctgtcattgatgaaaacagtaacaaatccatcaaaatcaaaattgtttatgctaaacaccatttttccaacaaatagtattgcataaaggaaatgcaagaaaaaaattaaaatatgcagcagacatattcatagatgatcaaatcatagcaacattgaatacacaaattatgcaagaatatgaatatgcccacccataaactgaaactaaaacaagacaattataacatatgggttacaaaccctcttcagtcttcagcactctttaaatttgtctcaaaccttgtgtaaacaattctaatacaagttcatgtgaatgatgtgatacttactcttctctgacacttctaaaacacaaattatgtgaagaactttcctgtatttttttcttcttctgtgtctcaaatgtatattaaattagaaattgaaaagaattattttgaaaaagcagagaaagagcatggtattataatgattccatgctgactgtataaacaatcattaggccaaatggaggtaagactccatcaggaaaaaattgtgaagcacaagcataattccctcataacaaattttggggcaacaatacacccttaaaggtgtaagcgttctgctccaactacacatgccaaaggacagcttaaactgcatgcagccacacaaatttagcctcctgttatagagcactagatttctaaatgcatttagcgtggacccaaagacaaaaataaaagagcagagtaaagaaaagaagcaaaacaaaatgacaataggtagaataaaattagaaacctggtaaagaaccacaatagttggctttgaacaaccataaagaaatttgatatccaaaacttggagctcctcaagcctgaaaacaaatgcatcataattctaataaactatatcagaactagaaacaaaaaagaggaaaaagaaaaagtagggaagaaaattacaaaaaataaattataaataaaaacattttcaatttaaaaaatgccaacagtatttgcttttcttttaaatttcaaataaggtttcaagaagagttaggtagtaacaatcaagatcaaaataatctgatctgattctcccttattttctccatatcttatcctaatgtttattccataatcagggtggttaggatctctccttgtcagctctgcctttataaatcatgtaaattcaaatcaatcaataatacagaatatctttttcttctcctaaaattatatagtatcaaagcttcagccctgatcttgtatctgcacaccatgtcttgtgttgacacgccacaacaaaatggagtgactgaaacaaaaaataagcatatactagaagttgctcaggcattgtttcaaaatgtagcaccaaaatatctttggggtgaaagcaatcttaattggaacttatttgatcaaaaacaagtatagcaaagttttgagcttcaaaactctttgatgttctcacaaggtttttttccaaataatagactctcattcactttacctctaagaatatttgggtgtactctgtactgtttttgtgcatacgcatgaaccaaatgaaagtaaacttgatcctagagcaaaagtatactgctatgctcccaaccaaaaaagatacaaataacttacacccatattttatgaatgttctcttaggtaacataacatttaaaactgaaagcaaacaaactagcaagccactatgagatcagcaaagcacactatgagatcagcaaagcataaacaaagctagggttgttttcccagcacagccattgtccatagtcacagcggatataacatgaaaaaaagatacaaagaaactaaactgtacagacacccatttacatccatgacttagctccaccatgacatccacaattttgctcaatgtttataaaactggaccgatcatcgaaccaattaaggcattagtttaaccatggtcgaaccagtattatttttattattattatataatttttaactgtctgtacaggagaaagtttggattttaaaaccatctcaattaaacacatagattaaaccaactaataaatgtatattcatacttcattttgttctttcaaagaaagctatatctaagttcactattgacccattgatgcatgagatgcagaatcgacttttttcaatcttatgtaaagacaccaacaatatccaacttgacataggttcgcatttcattcttacacaaccagggctttggtaactggtaatccttaatcaaggtcataggctcatagttactagcactacatttaggcatacctagcaaaggtcaaattgtaaaagaaaaaatatttatcagcaaaaataattatattaataaaagatagtagtagcagtgcaagtagtaatgctatgaatacaccctaccaagaacaaagcagaacagacactaatatggttaccttatattaaaggtcaaattgtaaatagaatccatgtgtagaaaaccaagataataatatggttaccttatattaaatgcttccttgagctgtcccttattgtcgaagggaataacctggaagatcaatgaacagtgaatcattcaaatactttaacgtgacactaaacagaaacatattgtcattctaatcttctaatatttttacagaatagtgaatgagaagcagttacatactttaaacaaaccatcatacaagtggagtccaatcagtctacaatcaggatcaataatgccaatctgcagaaagaaaatggaataacagctgaaatgcactgaacaactttcaactgatcctagactagataaagcataaatgttaaaaatatcaaaactgaaagaatactataactacccaagttttatcagtagatataagtaaaacaattcaaatacctgaccgttatctgtgggacgtcctatccggtcagaaacatcccccattgccctggattacaataacaaagagaattaaacaaataaatgagccaaccattcatgcccttacaaggaatttcaatttataatatataatatacagaaattggacagcctaactgtttctttgagctactttggctcactatttgttttcattttttaggaggatttcctctcctgtctcctgccccatatgtacattctctcaaacttacatgaactcacacatttaagttagggatttggggttttattcttattttgacttacaattcccagcttaactccaactccaaagtcctgttagggtcctaaatgaccccgacaagacctattcaattaacataaggtaatgtcaagaccccgacaacatttcaatcttaatttttcacagaaattcctagcttgtatgctcaagacactactcaaagtacaaagttatcaaccaataatcccactcaaaagaaagtaaaagaggcagcctaatgcacaagactccgtctagggaagtcagatgcatgcaatttacccaacaactaaatgtttccctcccaagttctaagggatactaatttccttcttcataagttctaacacatcagaaagaggttatacaaaatatcaccagagccaccatttgctgccgccggccaaatatccggcgaacccaaggtttgatgcgccttagtgagcgtgacctaacccagcaagtcacacagccaaaaaggcctccacacgccacttgtacagagccttttgtttggcgtgtgaagtctacgcgccgccctctactggtcggaaacttgccacaacagtacagaacaactcgcaaatctccctagacctagatctggtcctggatcttcattatctctcattagtagtgttgggttctcaagttggaacctttcttgaaggttctgtctgtgcgagtttggcatcttggtttgcacaactcctccttgttataagatgcctctacaacctcttctacaacttcttctgttagtcccacaatttctttctcgaggacacctgtcataacctcagagaagctgggtgatagtaacaattatttgtcccggtctatatttgtggaactctgttccttggccaagggcatcacaatcacttggagaaagagttcactgaagtactagcaaaaagttaggaacaatggaaagacttgacttccagctttttaccttgttgtggcagtctgtggagcaaaatatcttaggaaccttgaggtccttcaaaacttgttgctctttttgggaaaaggcccaaaagatctatgccaatgacattcagagattgtatgatgcagctgcctagttgacatcttataagcaaacagatcatcatatgaccttgtttgttgctcaaatccaatctgcagttgaaggactaaatatgctcttagatgttgagtcaatgaaggaaatgaaaaggaagcatgacaatctgtatatggtgctggccttacgtgccatgaatccagattttgatcatattcgtgatcaaattctgactagtcaagaagttccttcaatggatcgcctcatgacacgccttcttcatgttcccagaccccaaggaatattggaaactcatttgagcattttgaatcttcaacaatggtgctactagaggaagaggggatcatgggaatcgtggaggacatggtggtggtagaaacatgaattcaaacctttgatgctcacattgtaagaagcgaggccacacccaagacatgctactacataattggctggactgataaaacaacaaatgtcaccaatcagaaacacttgatcctaagttttttgaagaggagtatcaagaataccttcgactgaagtccaacagtcaagctcaatcatcttcaagcccgagtacttcaacaacttgcatttctcagtttgtggatagtcaaggtccatttgcaattgattcaggtgtttctaatcatattttcggtaatgactctttattcacctctatgtctcctccaaaatttcctcatctgatcaccctagcaaatggcaccaatgtcgcctctaaaggagttggcaaagtctccattgcttctttaaacttggatccagttctttttgttcctaattgtccctcaacttagtttctcttagtcaactgacaaaatcattaaattgttctgtagcatttgatgttgactcctttgttatacaggaacttggaacgaatcggttcatcggcgtaggacatgaattcagaggtctctactatcttgaagccaacacatctatgtcttgttttgcatctttgtctcctaaacttttgcatgatcacttgggtcatccacatttgtcagagatgaagaaaatggttccgaatctcagcaagcgtcaggtcttagagtgtcaatcatgtcaattaggaaaacatgttaggtcccgaaagagaactaaaaacaagatgtaactcttctttttccacttttcactctgatatttggggtccaagtcgtgccacatcttttggtttcagatagtttgttacctttattgatgaatactctagatctacttgggcttatttaatgaaagattgatttgaacttttacctatattcatgtctttcttaatgaaatcaagacccggttttgaaataagacaatgataatcaacatcaacaacacctttaacccaagttaattgggatcgatggtggacgaacccaataataaatcggaaataagacaaagaatgagaaagggtgaggggaagaaaaagtggaaaaaagacaaaacaaaggaaaaataaacaaaaataaaagaagggtgcaaggaggagaaaagaagaggaaaagaactaaaaaagggaacgactggaacatgaaactactaattcgtttaaccctccaccaaacttatagtttttctctgctccgtcctaagacatatcgtccgtcaatctatgtcccactccattaggtcttgtttaactaccttttcctaggtaagtttcggtcgacctctacctctctttatgttaagctcttggtaacaaactcttgttcttacgggaacatccagtgatcgtctcatgacgtgtccaaaccatatcaatctatgtcccctcatccagtgaccgtctcaagaatgatcatgccaaagaatatttctcctctaatctctcttcgtttttaaccacaaggcattttacatcagtccacatgtcctaacacaccatagcaaaatgctatagcagaaagaaaaatggtatatcattggggtgatgccatccttactgcctgttttttaattaatagaatgtcatcttcatctcctgagaataaaattccttactcaattctctttccaaatgaaccattatttcatgtctctcctcgtttttttggttgtacttgttttgttcacaatgtttctccaggtcgggacaagctatttgcaagggccattaaatgcgttttcttggctactcccgtctacaaaaggggtaccgttgctacttaccaaacactagatgatactacatgtcagtaaatgtcaacttctttgaagaaactcgctttttctcttcttcaatgcaagatttcaatttagtccaacaagttttacctgtcccatcacttgatccactattgtctccaattcattaaatccctattatggacacaaatcaagccacctctccaaccagcctttcttcatcacctcacactactcactagtatgagacacaaatagagtaatctagtcctgtgtcacatggagagtcctttgcttcatgttggtcaccttcagctatttgtacaacggttccaactgaggatgactctgggtgcccaattgctcttaagaaaggtattcgatctaccagaaattcccatcctatttataactgtttgagttatcaccgattagtcaatttatgcaggctcctcacattgataattgaaatgctgtaattcgcattcttagttacattaaaagggctctgggacaggaattgttgtatgaagacaggggaaatacccatgttactgggtattgtgataggctctcctacagacagacactctactactggatattgtgtattcataggaggaaatctgatttcttggaagagcaagaaacataattttttttctggcttcagccacttgtgaactaacgtgggtcaaacaactcctccaagaacttaaattttgtgaagttcagcagatgcaactatattgtgataatcaggcagcacctcatattgcttctaatccagtattccatgaaaaccaaacacatagaaattggctgccactttgttcgagagaatttgttggctgaggaaattagaactgaaaaaattagctctgataatcaaattgcagatattttgactaagtcattgaggggacctaggattcagtttttatgtcctaagcttggtgcatatgatttatatgctccaacttgagggggaatgttagaaaataggttattatatccccattgtactaggctactgttctttttgactttttgtatctgctctgttctgagtttcctgtaaaagcttcctttgtaagctaagtttgatatataagagaagctgagtgttgagaaaacacttagcatttcatccaaaaatatctctcattatactcaagcatatcaatctggactttctggtcatacagaaagaatgtgctatgttaagtgcaagcaaatacaaaatacatgtcagaaacatattttctccccattccttcatctggcagcaccagaaagcttagcagtaataactaatgaagtagttagtcaattaacaaagatactatgcttcaaagttatgaaactctcttttacacactgcatacaaagtaccctattctaaactaactggattattgcataacaaaattcacattgagatagttaataccccagctaacagcttatacaacccctacatcataattgcttaaaattaaaaacaatgttgatttcaatctatacaaaaacaagctgaacaaaaggaagtccactccaaaggaaagaattgatgcttcctcacacataccgtgtaacaagctcagaagtttcagaatcccattgaagaacacagaatttgtatctttcagttgcaataaaaagataatcctgtgtttcaccctgtttgaaaccaaaacaaacaaacaaaaaaaatacattatggaagaataaaactacaacattagacaataactcaaaaaacacgtatgcttttaattttctcacatgagggcggaagagttcaagtgttgcaattcttccatatatcggcacatccaacataggctgcaaagagaggtttccgttgaaaacagaagacaacaaaatccaaaaaaagaatgcatattcaaataaaaatgattaaaacaagaagcctgtgaaatggaatagaggaagaacctgcaagccctgaggagaaagcaagtgaatctcgatgcgcgtgcatttcctggaagaaaaaacgaagtgaaagggtaaataaacggtgacgaaattgaaagagaagaaatgaaaccctaggaaaacgaaagggaatatgaatagatacgcgataatgagattgaggtcttgaggactggtgaaattgccgacgcaggagtgagtgacgttggtgggtttgtgagctgtgacgacgtagttccatatactcatcgttctcttctcttacacacacgaaaatacaaactctgattctagtgttctgagattacaaattgaatagggttccgtttcagttcggttcagagtggttaaccgcttccggtcagggcgtgccccacaacaagcacctcactctcactcaaacactttctctcaggccctcccttgggcggcttttgtcttttgccctcgtctcgaagatgcgccaggtaaagtgaagtgaatcagtgttataaaactctgcccgcttattgatttgtagagattatgggtggaaaaaaaaaatcatatccacataataatctatatctaattcaatttaatttattttaaatttatttaaatggattaattttatatttaaatatatttttttagattttaaatctaatccaattaattggatataaagtgaatatggattgaatatttgtttgaatttttaaatctaattttttggcaaaaatatcatgtagattcttttgtcaattttttttgtcaactttgattgagactatttttttggtcgacgtcaactaatgatacttttaaactgtcattgttgagtctattttttcaattaatgttagtaagatttttttagtcaatattgattgagattattttttgtccggcatcagtcgatactattttttttttcgaaatcagctaggtttttctttatcgatgtatgtcgaaattattttttgtcgacatcaagtagatttttcgctcaacgtcgactatgatttttttttgtcaacgccatacgagacaattttttgccgacatcggttaaaaaatatcgatctacatcagccaaaaaacctagttgacgtcagccaaaatatttctccaaattgacaccgatcgaacaaatcctagttgttgccaacaaaaatatagtttcaaccaacatcgacaaaaaaatatagctaacgtcgacaaaaaaaagtcctgacgaatgttggcaaaaaaatatcaatgattgacatcggaaaaaaaaaaaacttatcaatgttagccacaaaatcctaataaatgtcgacaaaaaaatgtactgactaaaaatcctggcgacctcaaccaaaaagtaaccctatctaagatcgaccaaaaacatcattgaccaatgtcgattgaaaatgcactgactaatgtcagcaaaaaaatagtcttagttgatgtcagtctaaaattgtctggaccgatatctgtcgaaattgctttggttgagatatgtcaaaaatacactaaccaatatctataaaaaaaatagtcttaactaaggtccattgaaaatagcttttaaatggacaagtacttagttttcactttttagcatttaataactaaaatttgtaaaaaaaaaaaatcttacaacaattaagtgaatataaattaaatatatccaaatcaatattcatttaaatggattggatcttgagtctgaattattttttaaaaaatatggatatggatttaaaatacaatccatttaaatagatatgaattgaatatggattgaattcttaaaaattcaatcaatgcccacccctaggtgagataataggtcagttgtccaatcgacttaccaataattgattcaattttatttgatctattttaaaaaatttaaaattatattatatatatataattaacattatttgattaaaaaaagttcatccataatttcaaactcaaaaatctaaaataaaaattgaaatattaaagttgataacacaaataaaatgtgttaataatataaaagagtttaaataacaattatctaacttaaaacacaagtctagttttcaataaataaaataagtagaagtccattttaaaaatgcaaaatggaaaccgcataataaaagggatgcacgaatcaatatctagcaaaattaggcccaagtccaactaaaaaacctctaatccctaatatatattcttctcttgttgttggccatcattcttctcttgtgcattctctctccttcctatatcgccttttcgtctgaaaaagagccaccacctttgctccagttccctcctataacaccatagttgccttccatgggttactattcgacgacattctttgctctgcgttaaagaaacccaaagcgtgaagtgacaatttttcgacgacattatttgctctacgtcaaagaaacctaaagcgtgaagcgacaatttatgtcttctctacctttgtcaacgatttctgccttcttgttttgacgacaacgtggtgggctggtgtcaatcaaagcgtgaaggcgacaaaggtgtgaagtgaaagtgaaacctagaccaaatttcaaaaatcgattggatcaccaagtcactctgcaaaatcggtaaggtctggccgggtcatctagggctagatacatggccggtccaataactaaaccagttcgattatgccaccggatactggttggacagatccgatgtactggttccgatcaattttcacaacatcgaagtgagtgcttattttcttccatttttagtcttttccttttattgaaaataacatataatgataagtgtttatattgtatgtttttaaaatttaagcgtacttttaaattataaattcaaaacattttaaataaaaataagtaaaatataagttgttttaatttaaaccgtaaaaatagatattcaaattttagtttttttctatttgtatgtgaaattcgaaaaaatttatttcacacttaagtaataaagattaaagacctcaatttgaaattaaaaattatctataaggcttaaaagttaaaatatagtgaattttaaggattttgtggacataaatttcactttttaaaggaaatttttatcatttagttaacttattagtatatgctaccaaactttgccaataattaattaattatctttagtaaatttttcttttacttagactttttcattcataaagtttaaatataatattttgtttaaggggtttggttttatttccacttgaactaacatcatattggttgttttttccttttcattatatttattataaatattttcttagtttgtcatttatctcagtctttaactttttagtgagataccgcaatctccaattttttaagtaaggtttgattatttgaagtttttcttcttcttgatagcatattatgagcaatattgagattagaccaattattgactcaatcacaatattggtcaataaattattagtaaacctcatgattgatacaattggcataataattacaagaatttaatgtttatgcatgggtaatgtaaaacaattttattttatcattcaatcacaaattattatttaaaatattttaagataattattttaaaagtcaataaatttatcatgcacgatagattgtaaatgaatgacctatataactttttacattataaatgtataacatttttttatgattagaaatgtttttagattatttttttgcataatttaataagcaagtagcataaatggtaccaaacataagggagtaagcaaagtaattggtttaattccttggatgccagacttgcattttcttgaaactaggcttgcatgacaacgtgaaaatacatcgcaatgcatttagtctaactactattatttttgttgacttacaagggcttaaatagctcgaaaaaaataccagaaaaacacatatacaatcctcctattgctgatttctccgccaacaaactagggatagcaaaattatgggtctgcatgaaaaagaaccagcctatgagacaaactgagagcatgtttagcaaaggcatccgttcatgcattatattctttgaaaatgtgcttgaaagacatcatcattggaggctcaatgctgctctttatagctcaacagatctgaaaacagacatcatcttcgttgcacccatcaaggataagatgtatatcttctgttgagtcagattgagatcctacttgcagaatctgtttttctcgatctagcaagttgaatgtcatggaatatgacctataactctgattgaagaactgaactcactcccagattataagcaaagcctgccataaaatcacccacatcatttctaagaagaccatcacacaatataattgcatttgcttgagatctagcaccaacgcaattaagagtgaactaatttccttgggatgaatttcaaatgaaattattaacttgaacattgttggaattatttttgatagttccctcttgattcttggtaacatgattccataccagctccatcttatgtaaccgaatcatgatatcctctttgcttcagttttgatcttgaaacacttcaaaattccttcgctcacaaagtaaatcaattataaagccaattgaatttaggtcaggaacatattgacacaaattttaaaaatttaaaactaagataaatttttgaaaagataactataaaaataatttctcacgataaaattaaacaccaaaaataatttttgagaaaaatcaatatacattttttaaaaatttaaatataaaatactactcatgataaagtaatttattatataaaaaaagaaaaataaaatttatttaaacagcgaaactcagatttacaatatgaataactattcattttttttagaactagctagtccttttaccggtggccttttatattaagtgtaaattatataatagttagtttaattataatttatacttaatggacataaataatacaataaaaggtacaactatcttttgagaataatgtataataaacaactgaattgtaaaaaaaatgttcaattaattttaatattatgaagtagataatattatactgaaaaaatatgtagataataatgaattaaaaaaaattaattgcatagatattacttttactttctatgtttgttattattatttaaaaaatatttttcatagctataataaatgaatacacacattcaaacattcttaattgcaaaaacattatttcattttgacttatattattttcaaaattaaaaatataaatatattctaattatttaaatttatttttaaagtttctgtacactttttaatttatttaaaaacgactgaactatatataaaaagaaataaaacacggaaacaaacgcattctttatcttaaaaattaaaattaaaaactatttttaagaaacaaaaattaaaacaaaaacgtttcttagacttaaaccaaatatatatttaaataggagatagtccctaatggcaacaacaaagaaaagggccacaggggcagtaagcagagaaaaagaacattacacaaagggaaacgaataatgtacaaaactacaaattaagctgcaaaaagagattatttgcacgattagagattcttgtcctgacccaacatgaaagctaagaataccttagcaacaaaaacacaattaaaaaatgctaacaaaggtacattccctaaccttcctctaattcccttttccttttgtcctcggtttggccgaccatagtcacatccaaaagtatgaaagcagtagcaaggcagcaagtttcgaccaaacgaggttttggttatgcttcctcagtgaagctggcgcagaagcaactaaagatctgtcgcataaaaatataatgatataaatgtgagttaataaaatgtatacaaacttctttcaatttaggctatgtagttatgctattaacatcatacatacccagatgtagaatagacacattttccataacctgaagtgaagagaaacatagaagtttagaatgaattctatttcaaaatcaaagtatgaacattctgatgtgaacactccaatggttgagtattaagtaattcatctagcaagactaagatcaaaattccaccaagcaggaataaaatttaggggaagaaactaagctgccactactctgcacttaattttcagaaagcatccaacaaaaatgcgtaatatgtacacttttatgtcatcaggaatataatccaatgtacctacttattatatataccaactcaaaacaattgcttattgaaaagtaaaccttctggtgtcttctaaaagaatatcagtatatcacatcacagcacttcatgttataaaaaccttttgcagttttacaaagaaaactagttaattttaaactttaagaaactagaataatgcaaatgcaaaaagagaaaacactcaaacaaaagtaaactagaattagttgcttaaccacccgtcttttcaacacctcacacccttctcaaacaaaaaagaacgaaagaaaaatgccgaaagttctagaaaactttacaaaatgatattcatcaaccagctgatcaatgtataaacatatttatatttatattcatcaaccagaaagaaattcagtaaggatcacacaacaactaacgctattaataaagcatcactatggtaccaaaagggaaaggatgctacgtagacatcaaaacaaaatagcaaagaggaaaagtactaaagttcccaagatccaagaggcgaaactgtttgttacttgcgatcttcacataatgcatccacatattttatggtggggctatggaatcttcatcccatatttcataacataaaatttcccacagcactaaacaaagatcatatttagataaacttttcaatatcacttacaggtgaataaaataagaagatagaataaattaagcttttgtaagttaaaatcaatttatacactttaatttttatagaagatctctcatttaatttatccaaattctaaaagctccctcatataacttatctaaaaactgattataactcatgtataagttaattttaacttttattttattctatttgagaatttttcgaaaagtttacccaactgggccagaatttgggttacattaatatttaacttactggggttatgctttgtcaaggcagcagttcctccaaaattgcatgcaatatcagaattgccatttatctgatagtagctgttgaaagcaaaggatgcatgagaaactagtgtgtctggttcaaaacatggtccaccattttggatggctgtgcaatctgccattccaagtccacaagcccaatcaagagcattctgcaagtcagcctgggaaacaccagcaagagccacacaccaagtagtgccatcaatgaatgtagtgttgccttcaggtggtgacaatgttgtcactgggattgcagcttctgacttttgttgcaccacaattcctcttgccatggctaaatatttttgccagacatagaaccagtaaaatcattacactaattattaaataaataaagaaaacaccaaaccaatcattcaatagtattgtatttcgtgaagatcatgcgatagcatcaacagttggtccaccataaattaacaacacgagaaaaagaacaagtgaataaaagaaagtggcctcatcactttatagttatacatgtctgatatataaagtatttagattagattatttcgtggggattgtggcatgaagcaaagaatttgaactccatcattcttatccttctatccctccttttcaaactaaaaactaccaaaaaaaattgacagtttcgtatggttcataaataataaactattgggtttagggtttaaagcccacaaaaagaaaattaaggttacaacttacaaataatgactcaaatgggatacagcaaattttttgtcacaactcacagcttcacaatactcagaaatgcaactcaacaaaggattaaaaaaatcatgttatttttttttttcctgtttacaagacaactacaaggtgcaaaggggtcgttgggtaggttttgaggattaatttatttttattttgttctcccccacttgacaagaagagtacaaggaagagcattaaacatgcttcctctgattttttgaagagtcaaaaatcagcataagtcacaacattttttgcctacctggttaacaaaaaccaatgagcccccttccccttccccttcctaaaaagaagctataaaatttaatattgcaatgataaaaatggaagtgaccccaaataaaaaagaaaaaaaaaagatttattgattagttaccaagaggcagagaacactaagatctgctgaattgagtaagttcaaagaaaatgtgatccttttagcaaaaaagaaaaagaatatgtgatcctaaacttgcacactgcatagcaagtaagaagacactcaataactagtaaaaaaaaacacaaaaaccagagaagaaagtgcaaacaagaaggggaaaaaaagagaagcaaaaccgagttatagattgctatgaagagacaaacacaaacaagaccaaactggtactaacaaaggagaaggatgacatacccagatagcattccataaaaaacaggaacaggaaaaggcacattttgtttctcatgtttccagctacaaatgaccaagttgctccaaaggttatatagaacttaatattccaagctttacttagtactctgactcctgaagaaaggtgaaatgcaatcactagtgctataagagtagcagtgtcaatggaatcaccggttacttgaaggaagatttcattttttttttctttttcactttttgttgttttaaaattatttatgatgaaggagaatgcatccttctgaagcaagtactatctttgacagactacagcagaggatacatttgagcaattgagccttttcacgctcacacagctacaaaaggcagtagagtcctgcaagcaatataaagcctatgttattatcaattgattaattgataatgttttatatgccatttatttggaacagtgcaacaaaattcaatttgctataaaaaaaatttaaatagtttcatatgatttgaattaaattaatgtaatttgaattgatctaaaaattaaacattatgtttcaaactcattataaaaattttgatttaattttctttgagaatcactgttataattggaatttatggggaaaaatgaggttttcttttataatattataatttctcctgtcgctaaaataagttataataatacatgagaggtaaaatttaaaagtgtcataaactatctatacatatgtacatacaaaaatatttttaaaaaggaaacttatacgtgactttctcagttctacaaaataaaataaaaaattacacatagtattttcaagataaaatgatttgattgaaatattcacctaaaatattgatatgattatatacatttgattgtatttgaatttgaataattgattattagctaattagacaatcaataacaattgattaaaaaatctataatttgaataactgattatagaaagagaaaattaaaaagtcaaagtcactaggttggcaataaatattggaaaaaaaataaaggtccagacgttttttttattattaaaaagcaaaggctaacacaaggtgagttaaaaccaagctgaaacagttacaataaatcatagaatttcccccctcccccaaaaattcctatgtgaactgaagtttgccccaaccaaaatggagatttttgtaagagcagaaatatatatatttccaaaaattcatcctctaccattacttattaatgaacttctagtctgcacattcaattgatgacttgctccttgccaagcattcatatacgagaatgcttttcatgataaatcagccagtaccaagcataaacacaaaaactcatcacatctgcatactttctatatatcagaacttaatacaaaggataaaatctgacaggaaaacctcaccatcttcacctcgaaaaaccacttctcagtgttgttgattcaaggcatgcatatggattcatcatccatgctgacagtgaataccagaatcccttttaatttctgtgcctttaaccgccatttccaagccattacatttacttaagctgattccagaatttcttggctctgcaccacttcatttctgaaaatcattttcttccttcccatccaaatggccctgatctatgatctatcaataatttagtttataaattataaaattataatgatcgttaggattgatgcacaacaatcagatttttaatagttgcatgcatttttatttaccagattttgatagtttatagtaaattttgcacaggtctaaattaagactaatgtggtgatttttaatatttgatctttcattatgtaacatatttgttaatattgtgcttggatttatttatttatatattagctagaaattaatagagatatgagtggttattgtttgttcaagatatgaatgatttacagattgctcttatttatttattcttttgaaaaaaaaaaatcatgtcattttcggttatgctatatcaacacaaggacaatttatttattgtgtaacatttttaaagtttctactttatatttttctcttaatgattccaatttgcatcatcacattcataagttttaattccccatttccctttttctgaacattttcctttcatttttcatgagtgcttatatgtctatattttgtttttgtgtgattcaatgtgctgcttattggatgttgggtattgctatcgactattctggaaatgttggattttaaaatttcttgggttttattttgtttcagattatttgaccatgtttggaattcacacttattttataatttctttttagaattactattttttttgtttctgattttgaaatttcgtgcctctaatttattttgtacattaacaatagacatcatcaaaagattatcaaacgaattgaaataaaaaactatccttgctaacaaaaaacctggcaatcaaagacaaagataatttgagatacaccaatattaataatggttttgtattgggtgatatgcaagacttctaaattaaatgtatagtaattgcatagccaagatgttgcataagagagaagcatttagcagtaatgagcaaataaactaagtgatcaaatgaaaatgataacaatctaggatctaaatacaaatatgctaatggtaacaacttacttgtctttcaatataaggagtttcatgttctttatttggatttcaacatgatagtcaatctgatatttgttatatgtaaaagacaatctataagtgtatttgtgtgcagagtcgattacaagttcaatacatagatgctcaagggggttaaggcttagtggtttagcttatttactgtattttggttgatgagaattttctttcaatgagtagctgatgtctagattaatctttgatgcttaattatgatacacataattgatacttcctagctttaatttctaaacaatgttatcagaatgtatatacaataattttggaaagagaatagaagaaaacaagcacatatagaagaaatttgccatttcttagtagtgtcatttcccagcatcttaattgagtccgagagaataggaaatgggagtcatgaattgtgccagtttctcttgatgctttactttcattttctatgaatgaaacgccccctctgtggtttcaactctgtcatgttaaattggtttagttgctttgttgtaactcgatttgatcaggtttgctgtaactcagtcatcttatcaattgttgtaactctaaatttgcttgaaggacctttactacatcaatggaattagatccccaagtgaagagcagatttagaggatctctactaggctgaaatagtttggtaccatgaaaagtcataatctttttttgtttcttctatactgttgccaccaccaaaaactgctttacactgttgaaaactgtcactcaacaacttcattttcttctttatggtggtcatcacattttcataattatttttcatcactttcatttttcacctattgcggctctaaaagtcaatttaacccgattcaccttgggtttcaaccttctgcttcatttgcactttgagtttagaacaatcatgttttttttttcttttgagaaattttttattgacctgaaatgtataagaaacatagtctatctctataatatggaattattgtgaacctttcaagttaccaactggaagaagaaatgtgctttattggaaatgaacataagattctatcccccccccaaaaaaaaaaataattgcactgtgatttactgcttttcatttccaaaatgagcaaaacaacaggtgtcgggtgattgtgtagaattttattattttcctttttaaattccaacttggtttggatatttatctgagaatttattctctcaataatttcttattctgtgatataaattacaaactaataatgttgagattcgatttacttgctgattatcatttatattaacttgctgtattttcatttttatcagattcgatttatttccaatcacttcaatccagggtgctacaataaatattgattgtatttgtcatctttttatttgttctatttaatcctttattgctaataagtggaggtatgaatttctacaaatcttagaatgctaataagtgttgcagtgctaatattttcttcataatttatgtgcaagtggggtttcgtaatcctttgaaacaattcatggagtagaattctaatgttttattttaattgtatgattcttttgatttgaagttgtttcagtaaatattaatgtgcttctctatgttccacctttactactcctcacgctgaagttagatgataagttggatatgggtttcaattgttatatatcactcgagctaatttgaaaatctgttattttttcaatttcatttactagactaaaaggccatgaccatccagtgagattctaggtgctttgtcaaggaggaaaaaaaaggacacaaaatatagataagagagaggcttccgatctttgccttagttggctagctgctgctgattgctacaattggagtaagaattctttaaggaatacagttgctttgctcattctccatttggaatgataaaggttgtnnnnnnnnnnntatatatatatatatatatatatatatatatatatatatatattgtgccttaattttgtttcattctattttagtttgaataatgagcatgaaaaaatgataagaagaaatggactcatgggtaattttgcctttaatgggttagatttataatttgttaataaaaactgagagattaatgaaaattgatctcttactttttaattgaatttccatattggagtgcacaaaacaaatcatatttgctgagcttaagtccttaagtcctcacttggttgaaaagcatgttcactgttgcccagtttcatccccaattctttctactgatcaaaacaatgatactaaaggtttagacttttcattcaatgtaaattagaaaatgtggactgttgttctgagtgtagaaaatttgtttctaattggttttatattcaatgtgaatgacttctataatacgatgagaattagatactgagttatactgaaaccagtttcccttttgatttgcttctttagccaaccccattatgatgttagtaacataaaggaacttctacattgctaacattatctttctcatttttctctctctataaatacttatctatctgcatttacaaataatactcttttcttgattttccaccttttattttctatttactttattagagaagggaaatgaaaggggagtgtatgtgtatttaacaaatgtaactggaattgaacagggaagaacttttgaatatgctggaattcaataatttctatgttcagggttattgagatttatatgacagaccatcataactaactgttgattcaacaattatttagaacatagaatgcaaaccaatgatttggctgagaaggaatatctaaggggtgggaaattatatatgttgttgatcccacaataaattactttaatttgtgatttataaattcaggatgatttgcatgtgatttctttgagttctgtttgcctcaaaatatcttttttcctcatcttttttttttcctcttctttctttcactcaattcaaaatttgagcccatccaatatcttattatctttgttttcttttctcaacagattttaacggtgactgtccttggatttgactggagtaatcatcaagaggcagttgagatgggcatcaggggtttattttcttttatctttattcatttttatgatttgtgggggttctctttgacttatgttgtggttgagtttctggtttttgggttgtgagttccttttttaaaatttgtgatttccaaattcaggatgatttgtgtatgactctttaatttttgtttcactattattttggtcctccaaatttttttgctaaacattattctttatgttgtttatttgtattttgtacttactctttaagcttgaagaaaagaaccttgaccctttaaattttttatttcactatgttagcatttagtggtttttttttacctcgtgtaattttctttctccttttctcttctattttctgtgttttttctatttgcaaaggaaattgatgttaccaggatttaaaatatttaaattttattttatattgtatcaagataattttttcctatatcttaaatataaagacaaaataacccttaaaaaattgtatgtatccttatacccgcatatataataactttaaataacagatttattttgttcaaatatcaacttctataaaatcgaattattttgtaaatattccttttctctttagatataattatgtatattatttaattattttaattaattatagattttatagtattgaattatttaatttgtatttttaatttttacttaaattaggaaaaaatgtacacaaaacatgtatcataaatcaataagtagaaaacatgtgtatatactatatataaatggaccattaatatctttatttaattttatttaactttgatttaaaaaaaannnnnnnnnnnnnnnnnnnnnnnnnnnnnnnnnnnnnnnnnnnnnnnnnnnnnnnnnnnnnnnnnnnnnnnnnnnnnnnnnnnnnnnnnnnnnnnnnnnnnnnnnnnnnnnnnnnnnnnnnnnnnnnnnnnnnnnnnnnnnnnnnnnnnnnnnnnnnnnnnnnnnnnnttaatgtgttactggtttattttgtcattttaatttgtatatataatttaatttttaattaaaccacaaaatatgtgaatcaactgcaaatttgattattggtttaacacgtgatctcaactcaaatttaaatcttgctagctaggtaaaagagaattttgatatcgatattaatcctatttggcttgagcaacatcatatcccaaagaggatacacattgtctctattaaaaaatccaattaatccacatctatagtattattatacaaatttaaatataaaataatattatttgatttccatcaaaatgtttggtttcctatcatttttaaaaaataagtagatttttcatgttatttggttatgatataaataattgattctatctaatatattatattatttatttttaaagaaaataattatacacattaattatttttaaacacttatataaacaacaaacttgacccgtgcgcatgcacgcgttaccagttagtttgctaataaataataaattcaatcttcttatttgttgaacctcgatttctttatccacccattggacatgtaataatagaacggtttcaagttccttaagcatataattttgagttaaatcatgataatatatgtatataaaaatatatattactatcaattaagaagagatgaagcctttaacatttgagctgaccatatttttaagtgattgatttttcggccatttatctgataagaagatactcaggaactaaaagcatacatttaatttgtaccatgcatttttatgaactaaagtatgtcactaaagacttatttaaatatgttaaaaagtttttcaatagctaaatggttcaaagagataaggacctatgtgaaacagtttttaactgaaatatgttaaaaagttaaattgcatcctattaatactaccacatgaagagtacatgtgactcaaaatatgtcactaatgaccttcctacattattaaagtaatatagtaaacaaagaagtcgtattaaaaatagatacggcagctaattgactaacatctccaaaatctatgttataaaaacagttaaagcccttaaaaccggttgactcgatctcaatcgatctatcccatttaaaattctttgttgcggaaaatcgtgatttagtattaccttactaatcacatgatttaatttggattctaggcttaatatcatatatcatatggtgggacaaaatctgtagttagatgaacaaccactgatgaaccaatttttatattataaaaccaaagaagacatagaaacaatgtagaagaattcggcaacatacggcgtggacatcatattattatggtaccgaggaggagaaactgagattccacatcaaattttccatgcatttagctaaacattactttaaagccatggtcacagaaggaacaaaaatgaagaaaagtatataatttaactatcatttttaataaaattgtctgtttattatatttttagctatttaataattatcttaaactaattacgttttttgtttttatcactggatttcctaaacattcatacatgaaactataatctaattagacaatgattaaactttcttttgtttataataaatcatagacaagatnattattatggtaccgaggaggagaaactgagattccacatcaaattttccatgcatttagctatataatttaagtatataatttaagtatcatctttaattatcttaagttggtggcatgatgtcatttcttctatacaaagtttaattttacattacatcaagctaggatgagttcctgtctaatgtgacatattttgtctgattgtcggcctatcaatatagcgggaatattggtgggtgttttctttctaccatagacggtgcttccttgtaattgccctttgattcttccacaataatttgctcataatcacaatattctcgaaattttatactattatttagggtgtttctttcccctgcttcctttttcgatcatgattcttataggtttaattgactcttttgataaatattaataaaatttatttatttttgttttaaatatatttacaataatgatacgaaaggaatttatgcaggatttgtttcataagtaagaaaaatttataaacgataagcgattgcgatataaatatttatattagaaatttctttgaagtatatatgagaaggggtatgtgtttgaagtcattttaactaacttattgcctattttattaatttagatacatatattcactgatgtatatattcaaaatacgggtacacaattaagttttatagaaagaaaaagtttggaggatatatcgaactctattcaacaccaaaatagggaaagagagaataaagaaaaaatgtagatatatgctcattttagtaaagaggaaagaagtaggttggatgagaataaaaaaaaatgtgtgaaaataggttaaaatagtacactgaactctactaattttaaaattagttatcctctaaatttctccaccaaaaaaacctaataattttcatctgcttctcttcttccgttttcctatctattaaacagagacataatgggtgatatgatataataataatcataataataataataattaataataataataataataaaatattgatatatagtttttgatatgtagaggtgtcactacaagaagatcataaaaaagagacaatcaaaagtcggcgtaacaactagtctagctcctatcgcaacttttattgttggcaatgggatggtcttgcttgttgtgtcaattcaaatagcaaagattaaaaaaaaaagtagtatttttattgatgacattctattctctcctaaattaccacagctcaagagccaccacttgcaagtaattttcttttttagccacggccacatagaaaccaaaaacaatcattaaaaccaccataaaaaaggtaaaataaaagcaggaagaagaacaaggagaaaacaccattgccaccattaagttaatgtcgcctcacataatttgatttcaactaagtaagacaaagaaatccaaatttgtcacgattttgataataaaaaaatacatgctttgatcaaatataaatatgaatatgatatataactattattcaattttttaaaataagaatgagtacgaggatgaataaataactatatacccttatccatacttgttctaatatgttttttataaatttttgttacatcacacacccatataagattttcttgttataattttatataaaaataattattttaatagataaatggtttaaaattattataataattaactaataaatttaaaactatatatataactaaaacacaattcaattcttaatttttttaattcttttatatatttattatttttatatatcacttgaattaaaatataattaatgacttaatacataattaatttaaaaccttataagtgaactaaaattataaaaaaatgatgggaccggatatccatgagtatttccaaatttgataaaatccgatggaaatgagaataatgagtattaaaatttaataaactcacatcttttatattctatctcaaacatatccggccttctatggagatggggatggatacccatttccaacatgttccattgtcatgccgaaattcaacgtctcaataacattaatttcaaactttgcttactcttctttttcaaaatttcagaaaagaggaaaatgcgaaataaagaggtaatttttttttagttttagagctcaggttatcatagtggatgactaggtcattgcttacatttaaaaaattcaaacctttaaaaatcaacggcaatagcctagctgtcacatactttaaaaaataaaaatagctgttacggtttttattattaatattgacattacctcatatcgtttcactaaagataaacgattcaatacaacttgaaatatcagaaaaaataatggaggaagcataagagatgactgtccttgctaacacatgagttaccatgttgatgaattgcctcgaaataaacttgacttgttttgatgaatagagagaagggttctgcattatttcaggacatcatcacccttctcggaaaggtcctctcttcgaactcagatgtagggaagcaccccatttgagggccagcaggcaaatggctgttcacgttaaaaaatatttacgtatattttaaaataaatttatacttttgctctaattttactaacaattttagtcgttgctatatgcaatagcctcgaggttattgcctttggtccaccgctattatggtaatttactataacgtgtttatatatcaccactcaatattaaaataacacactaactgtatgtactaattgtattccctatgatgcttgcttgtgaagacggcaaataccgcaaaaaagtagaatataatagtatgtttgattgtgaagaaataaaagaaaaagaacgagaaattttcaaaatttagtatgagttttatactttttttttttacttttatttaaatatttcttttaattcttttctaaccaaaccaaccataagggagtttaattggcccacaagtatcttttgagagagattagttagaatttggagctattcaataagtgagttttttttttctatcggcaaaatagtttgatttgttatattctgttttgctaaatcagattttttggtagatatgaccctatccatcagttgataattagtctgctttagagtatggtttgtgccatcgggacaatcaattattggctcctctcgttcgtttaggcagttgcatactagttttctttaaaagcattcatggcacattcttttattgcttcatatttttttttagtaactaagcaatctcttatgaacataattatcaacaaaaagtaagaattaattaaagtgcatggaagggtgtctggttggtacgtcagtaaatgaaatgaaagttagctaggttcattgcgttgagttagtgtagtgtttcaaattttgtcatgaacctcaaaagcaaacaaaataacatcaatagtaatgtgtatttgggtttccctttttgggataacgttggccccccaggcacaacaattccctttgatacactttttgttgttctttcccaaaacaccatccaattcccgtccaaacaatcatgggtcccttatgaacaatttcttctacatctacatcaacaatagtgagaaggtgagcatcaaataatacaaatatcatgtagggattttagggaattattcctttttattgggacccgattatttcccgtcaactgcatgcatggaccgcacttttgcatactttattgtacttgatgtttatttaatgagaataatatatacatgtttttttttatcagcaaaaatgtatattatattaataaggaaagatttaaggtacaagtagtgcctaaaatcaagaaaatataagacgaaaggcccccaatgtatacaggttatatataaatgtttttctaagtgaaatttcatatactgtatcatattgtcattaagattgtttgcgcactaaatcaatttttcacgctgactcatcttgtgtcatatgtgaatttgacctaaacacaataagtaacatataatgatctgtgtaaacgaaacattttcaatgatattattaccccattttgtttttaactagctgctatttttaaaaaaatatttaaaagtttaatacaatatttatttattatatatattttcaactaagattagttgtttcatatatttatcacgaaactaaacagaaatgaaaatataactgataagaaaattaatcaattaattaaagaaaaatacaataagaaattgaataaaaatcttaataaaaataagaatttcagatgtatttttaaatttatgaataattttttactcattgcgtatttaagtgatgactaaattttttaaaatatccttcttaagaaatatgagaccgtttatgcttgagtaaacaaaaagaataaaaaggaaaatttacagataatattattttgtttgattgaaatgaagataaaaaaataaaaaaaaattgttttaaaaataaaatcattttctaagataatttttaaaaaaattataattatttttattttctatttaatttgaaactttctttgctatattttgtgttgcaaaagatgtaggagggtgatcctctgcatttaattgccattattagtcccgctgctccctaccctctagacccaatacgttcacgcagtaccacctttggatatcggttaaataaaatgaacggtgatagttacactacctattatatcattttcatatcacatcaaatgattactctagataagttttgaatgctggtttttaataaggacttgctttgaattattttagttatatttaaaatattttttattttaaaaacttaaaagtgtgcattttcttaaaatctaaattcaaacaggagcgtgttaaaatttaattaatgtgcccgtgagtttaatcatacaaacgaaagtttcacaattattaatatataaaaccacggtatgagattaatttctcgattcagaaaaaaaaaaaagatcagtttcttgaaaattgtttcactttcaacgtcattacaaatatttctgttatctttaaataaataatcacttttaaaattaccacatactttaaattatgtgcacatttctatattttcaaataaaaattcatatgtaattctatttcattttgattatttatgtatttttatagttttaaatacttttgaaataataaatttttaaatttgatataaatttaaaaaattcttaatttttaatgatatcgattatttgtcttttttaatttaaaaatttgttcatttgatataaattcaaataaaaactttgatagttaataacttatataaaaaaatttaatgaacaaagagatcaaagaaaacaagccacgttattagaaaaaaaaaggaacttatgatactgacataaggtacaaataacaacaatattatgttacatggaaaattgggtgtgtgtttgcgtaggagtcacaccaaatgcaattggcactctaggaaaatcttccctcacttgctttggtgttttctgctttagaaagttaaatttttccattgaatgtgatttagatggttttccatatacactcttcaaatctaaatcatgacaattttgttcactaaaacaacgtctttctaaataatttggattttgctcccatgttcttaagaaggtcattcaacattttttttccaccaggtcatcatcatatgctaatgcttcttaaatgaattattcttagatccgtttgtcccaatgatagatttttcacttggataaatgaaatgagaatcttgattgtaatatatagaaatcattataaatataattcttattttcctttgtaagattgtggccgggagaaaaatctaagacttattcgtttaataaactaggaaaaggtataagacactgaacgaatatctcagaaggacacaacctaatttatctaaagatgttgtaatgaaacaacattaatacatttatcattattcaattgttcatgtgcaacctgatgttttcctagtttgcacttaatatcaataacgtgtatattagactagcattatatattgataagactagtgtcgtttattattattattattattattattattattattattattattattatcaactctaaagattttttttttgaaaaatatgactctaacatcattttttgagaataaatatctctaaatacatttgtactactcctgtttaagagtcagtnnnnnnnnnnnnnnnnnnnnnnnnnnnnnnnnnnnnnnnnnnnnnnnnnnnnnnnnnnnnnnnnnnnnnnnnnnnnnnnnnnnnnnnnnnnnnnnnnnnnnnnnnnnnnnnnnnnnnnnnnnnnnnnnnnnnnnnnnnnnnnnnnnnnnaaaaataatgaaatgtttcctttcatcatttacagctcaagattaattagtatattattactttcaaactctaataagttaacacattatatttaatcaatgaatgtcttaataatacatttatccctaagagttcatgtgtactcgaaaatctaatttacaatcattttgtttaaccttttttttcctattcctttcacccctcttttatttttgcttattttttctcttttgtcttatttctactttttccttcctctctccctttctnnnnnnnnnnttattattattattattattattattattattattattattattattatcaactctaaagattttttttttgaaaaatatgactctaacatcattttttgagaataaatatctctaaatacatttgtactactcctgtttaagagtcagtcttacaattatatatgtgttactcccgtttagaagccattgatgttttagtctctctctatttcaaaattattgatatttcataaatttaaagtttcattttttgatcacatataactctatttagaataactagattcaatattcataaaaaaaacactacgcttacaacttatttttttttaaaaaaatcaacaaataatgaaccacatttatattttgtattagtgaaattatattaaattaaatagacgaatattttagacattgaatattttttaatatgtgtacattaaccttaaatattaatattgtagaatagaggtagtaaaagtaaatattcaatagactcactatttagtacttactcattttatacagaattgacaaataaaaatgtataagaaagaattttggctgtacagttgcactgtaatgttagactcaatttccgacacaggctaatctcgcacaagaagattcccatgccatgcagtggcttgaaagggattatagtcagaaaggccacgtcaagacttacactttgttttggtaaaggtaaacgaaagtttgtcaaaacagataaagtaaagataaaaaatattttagtgttaaatgataggagagaaaaaaaatcttattaactaattatcttttcatttctatccatttcagtcaagaaaagagaaaatatgtaaagataagatcatttatcacaaataataaagtatataaatagaaatatttaaataaaaatattttcttccatatgtctatcatcatattaaataagttaatttatttttcacgattttctttctagtcattttctgaaatcatacaaaatatcagggtgagtagtctgtagcaccacttatcccacttctgccgttgacggtgcctgggtgttaggatgtgagtccaaaaacatcgctattagtattattttcagcaaattaattaaaacaacttttttggctgaagaattagaatcaatagacgggcatatttgcgtgaacattatcattcactgtgtctctgcatctacaggcattatattgtcattcatcacctttcttatcatttgacatgactctctttcgtcgccaaaagctagtttgattccaaccccaaatttgtggttcttgataagtcaattattagaaacttttttttttttacattgcttgcagttgaaattcttcacattcattgaatcaaaggattaactttaatcatgttagaaaactctggtttccgtttgttttaaagttaataaagttgattttaaaaaaggttgtagtaaaaacaattgattttttgaatgaaaaattttgattttatacatttattaaacaagctgtaacactttaactaactgaattattgaactctcccataagtgagtttgaatgtacagaagagaatgaaaagaaaaaaaaaaaattaaagtaaagaggtgaaggtgtggaagccgtgtaaatttatgatttttttttctaactaaacaaaaggataaggatatttccgtcattgcaatgaaaaaagcttcccctacctgcaccggcacacgctcattagtaatcgattgctcagtaagttgtgaaagcttaagcaatgctccaaagaaacctctgccacgtgggaactcctcctcttctcaattcgtcatcatcctcacaaacaccaacaccaacacccacccctaccctactagttcccactcctttttctctattagtacttggcacgtgccaaaacttcctctctcacgtgcctccctccttctctgtacgtacgtgttgagcataaatacaacgcaaccacctctcctgtatcgcttcctttctttaacactcctcactctatttctggcccaaactgcgcctctcttattgctctgaaacgcttcgtaccatccaacttttattgttctttcaatttttttgtgctggctaaaccctaacccttcataaagccttcactaacagaaactttcgttcattccacacaaaccactgttgccattccaatttccgagctcctttctcttcttttttgtttcgtacagtgttactaccatgttagggagtggttgtggtggtgaacgtgattctgaggcgactttggagaccgtgaattcttcctcacttggaagctccatgagcagcgagagcatttgcagcaccagtttcagccgtctctccttcgatctcctccctccttcgccggagagtctctccatcaagcctcaccgctcctccgactttgcctactccgccatccgctccgccaccttccgccgcaaggccgctctcactttccgcgacttccacctcctccgccgcatcggcgccggcgacattggcaccgtctacctttgccgcctccgccacgccaacaacaaccaattcaacaagcaggaagaagacgaagaagatgcttcctgtttatacgccatgaaggtggttgacaaagacgcagtggcattgaagaagaagtctcagagagcggaaatggagagaaaaatcctcaagatgctcgaccacccgtttctccctacgctctacgctgagttcgaagcttctcatttctcttgcatcgtcatggagttttgttccggtggagacttgcactccctgcgcttcaagcaccctcacaaccgtttccctctcacctccgcaaggtaaaatttaaaacctttatccaaaacgatgacgttttctctgtttattgaactcacaatgttaattacccagattttatgccgcggaggtgctgctggcgttggaatacctccacatgctgggaatcatctacagagatttaaagcctgagaacgtgttggttagatcagacggtcatatcatgctttctgatttcgatctttctctttgctcagatgcaatcccagccgttgaatcctcagcagattccttatcattacctatcgcttacactcgctcgcattcttttatgactccattctcctgcttctcgaaccggctttccgggtcgcgcgaggttcgtgctattgaacccaaccggctttttgttgctgaaccggtttcggctcggtcctgttcctttgttgggacccacgagtatgtctcgccggaggttgcttctggccgttcgcacgggaacgccgtggactggtggtcgttcggcgtctttatctacgagctcatatacggtagcacgccgtatgcgggtccatcgaaggaggccacgctgcggaacatcgtaaagaaacccctggcgttccccacggccacaccaacgagcaatctcgaactacacgcgcgggatttgatatccggcttgctgaacaaggatccggcgcgccggctcggttcgaagcgcggcgccgctgacgtcaagaagcattccttcttcaaagggctcaacttggcgctgattcgcatgcagacgccgcccgaagtgcctggctcgagaaggacaaaaacgacgtcgttgtaccccgtgaagggtaactgcaacaacaaccataaacaacaacaacaactacagacgacgtcgtttgatttttactaatacgttgaaagttttgtgccacgtcttcagtgacgtactgtatattggagccgtccttttttatttttatatgaaataaaataattcttatttgattaaaatatattttaatctttcaatctagtgcatttttagtttttcgatcattcaaaattattattttttaattattgtaaattatgtttattttattttttatcttaaagtattttagataatatttttattatctaaatcatgataaagataaaaaaaacaaaataagtataatttcaaagattaaaaataaaaaaaaaaattaaaaggattaaaaatattaaataataagaactaaaaaaatatttaagtttttttatattatgtcgacgaaaacaagaaataaaattagtttgaagaaaagggagggggaagtgggttcgtgttgttgttccttttaggttgcttgtcctatgaacggaatcatcatagataggtgcctttaaaagctgaacttcgttctctatttcctcttatagaaaagcttacaggacactgggttggacaattctaaatgaagaagattccttgcttaatatcttttcctccttcgcatacacattagagcagtcaaaagaaaggttattaattccaacataaattttgatttgtttatgcatcatacggacatcaagtcaatattctgcctaaatcgaaattcgttaacttagaccatccatgatagatgattgtggagaaaaatcttaaagttaaaaatttattattccaagattaagttactagaaacaccttcaagatctttatgtttaaggtttaatttttgtaagagaatccttataattaccatgtatttttaataaaaaaaatcaatttttattatctttctaactaattgattataaaagaagaaaggaagaaaaacatatcaacaatagaattaagtccaaatgcaacaaatacataacaatataattttaaaacaaataataaaaaataaaataattacataacaatccaaacaccatcacaatcgaccaatgacgaccatcggagcaccatgagaacatagatgggaggggtgggtgggggaagaagagaaggtgggagggggaagaagagggggtgggtgaggggagaaaagagaagaaaaaagaaagaaaggaaaaagagaaattgaaggggcgaagaagatggtaagaagctatagcacactaacaaattttcccctttttttagactattactatagttttttcaatttttatgtaaatttaaattatattgataaataaatattttaattattaataaattttgtatatttgttataattttttgaaattaaaaatatataataaattatttaattattttaaaataaatattagaaggtaaatcttttgttaagtttaaaaaaatgatttaagatcttaaaataaaatttattattagagtaaaaaatttatgagatgtgatatgacactaagaaatctataaaaaggtgattaaattttcaaaataaatattaaatatnagaaccatgtaaggtggtagtagggtgtgattaccgtcatttatttggaaaacgtataaaaaaatatcaaggattttttttatacctaaacagggaacatttttgaaacggcaaactgagaaaaaaaaggtcaagtttacaactcatcattgacctaattaaagagtagtacgtaattagactctagttttttttacttgcttctgcctgaagacagggaacaaaggaaaaacagcataaagaaaccagcatataaatatactatatagataaagaaatgtgcgtgactttcttgcattaatcaatattcaattatttttctcctctcgtggatgtaatacacaatatataaaggatgtcaatagcgtcaatatttctcatttaatgggtatgatgaaaattcctaactagtactatataaatgtcatataaacgcttctgtagatttgtttttggaaaggctgtggattatattttaaatgtcatattgttgtttttctttattggcaatatgtgcatgtaatttaatagaaagaatgttgaccataatgtgcaactcacgtaaagaattgcaagactttaataggatatgttaaaacatgtcgcagcatgcaatgtataaatataaatagttacaacttgttcacgatgtgtgcctcaagatttttatgagcatgaactcatttaagaatcgatctcccagctcattaaaattctgttttctgctttatattgctactttcagcctttacagatatgttcattccatcaaatactgtcatgtcaaatatcatccatagagcgttaaaattctctcttctctttgccacgctttagaatgtccgaaactcttttctatccttgtattccagacaggtgagttcaccattttatcacttgcctttctaagaatcctttttgtccactgatgtagaaagcctatggttgaaattcaccgacataaattgtagaattaattaaaacatgtaattgtcttattcgattaatttttccagttgaaagctaggtcaaaatagtttttgtttttggtctagaaagttggttcaaatagttaaatcgatgagttggtaactcagtattgggtgtaatattttttttatcacatcaatgttaattattaatttctgttataatattaataaaaaaatcaaactcaccatctttttttttttgtttcttcaaccgttaaatctccttctcaatcacaagccaaccttataattgcattggatataatgttataacttttctcatcacatgctcccactttcaattaaacaggaggaatattagagaggatgatgattaaatattaaattaactgtaacatttgaaaagttgcatatcttaaaagattggggggattaaaattacagaatttaaaattgatggaacaaaattacaaaaattatagaagaaccagagtacagtttaacttaaattttattacaagtaaaatatttttaaaagtataaatttgtcaatacttaaacatattgtcaacgactctatccttattaaaactcacttacataatgatttggcaatgcatgattaaacgctagtgttaagaaaacaaacatgttcgctgctaatagtatagttcaataattgtttaaacttagaaaataaagattgttttatcaagaattctctctctctctctcaannnnnnnnnnnnnnnnnnnnnnnnnnnnnnnnnnnnnnnnnnnnnnnnnnnnnnnnnnnnnnnnnnnnnnnnnnnnnnnnnnnnnnnnnnnnnnnnnnnnnnnnnnnnnnnnnnnnnnnnnnnnnnnnnnnnnnnnnnnnnnnnnnnnnnnnnnnnnnnnnnnnnnnnnnnnnnnnnnnnnnnnnnnnnnnnnnnnnnnnnnnnnnnnnnnnnnnnnnnnnnnnnnnnnnnnnnnnnnnnnnnnnnnnnnnnnnnnnnnnnnnnnnnnnnnnnnnnnnnnnnnnnnnnnnnnnnnnnnnnnnnnnnnnnnnnnnnnnnnnnnnnnnnnnnnnnnnnnnnnnnnnnnnnnnnnnnnnnnnnnnnnnnnnnnnnnnnnnnnnnnnnnnnnnnnnnnnnnnnnnnnnnnnnnnnnnnnnnnnnnnnnnnnnnnnnnnnnnnnnnnnnnnnnnnnnnnnnnnnnnnnnnnnnnnnnnnnnnnnnnnnnnnnnnnnnnnnnnnnnnnnnnnnnnnnnnnnnnnnnnnnnnnnnnnnnnnnnnnnnnnnnnnnnnnnnnnnnnnnnnnnnnnnnnnnnnnnnnnnnnnnnnnnnnnnnnnnnnnnnnnnnnnnnnnnnnnnnnnnnnnnnnnnnnnnnnnnnnnnnnnnnnnnnnnnnnnnnnnnnnnnnnnnnnnnnnnnnnnnnnnnnnnnnnnnnnnnnnnnnnnnnnnnnnnnnnnnnnnnnnnnnnnnnnnnnnnnnnnnnnnnnnnnnnnnnnnnnnnnnnnnnnnnnnnnnnnnnnnnnnnnnnnnnnnnnnnnnnnnnnnnnnnnnnnnnnnnnnnnnnnnnnnnnnnnnnnnnnnnnnnnnnnnnnnnnnnnnnnnnnnnnnnnnnnnnnnnnnnnnnnnnnnnnnnnnnnnnnnnnnnnnnnnnnnnnnnnnnnnnnnnnnnnnnnnnnnnnnnnnnnnnnnnnnnnnnnnnnnnnnnnnnnnnnnnnnnnnnnnnnnnnnnnnnnnnnnnnnnnnnnnnnnnnctactttttccttcctctctccctttctatttctttgttttattttcgatctatcattgagttcatctatcatcgatcccaattaacttgaattaaaggtagtgttgatgttaaaatgtttaagtgcatgactccaaattgacagtgaagggttgtgaacttcttatgcattcagggattgaaataataccgccataagttataagaggttaaaaccaaacagaacatttcaaactatcctaactaaatttaagcttcagaggctagacattgattgctgatatcgttactcatcagaaaattcaagcctcaggtcttatttcaaacagtatcactatttactcaacttaaccaaggaatctgaatagcatatattttggactaaaatatgaatagcatttatgaacaaatgctttctcatagaccgtgtcagctcaacacaatgtttaacagcacttcaagaacctattgtattggcttactatcctgcagaaatttaattttcctacaagtttccatagcaacctattcagaaactacactactatgaaacagtatgttggtgtgccactagaaataccacatatagttataaaaatggaagctaacagttttagtacaggtttaaacaatgattaacataattaactgaaaacatccatgaatacaataacccaataaaccatcctaaaaatgctgccatggagaaagcagagggaggggatgaagatattgcaaaactagagcaagccatccaccagagagcaattaacaaagcgtcccactttagatttagcatttcttatagtttgagctatcctagcagactcatcttgtgttctagctagtgtctccttgcaagaagtctctttatcgtatattctatcaagtaattgttggaactttgcttccagtgccttcttctctacctcacaacattccaattctttcttggcagattccatagcctttctgttcctatctttttcctctttcagcgtgccagactgtttaagaatatgctttgcctcaagtatctcttctagtctcaggtgaagccactcaatgttcactttcatatttttcatttcatttgcattaacaatcatgttatgcagctcatcgtctctgattttaatcagacccttgtcttccaattctgagaggatgtcacctatcacctctaagaacattgatcggaatgtcattgttgataccatagaattctcaaaaatatctccatgcttactgagaatttttcttaacatgggtatgaatttcggcttcacttggtatccttcaactgtgtccttcggtgagcttactccaaaaaaattaacctcatcaccatcattagcccacatattaaccatttcagtaatgttgagactgaaatgtgaggatgtatgtccaaccattgaaatagacttgctattgttcttgtctgctctttccctagagttagaggattcttgaataccctcagcatccaaaggtttaagctcaagaggaaccatagggttctcagcctcactccttcccgccatttcagctacatcaactaaccaattctctggagcaacaaaatctccaaccttttcaatctcttcatgtctgatttctggtgccaatgtgcaaggttgaacaacttgtcttggaagggattctggttctgctacagaacattgtggaagttggtaagcctgcacaaatgttgttctagtttcagtaaacttctttgctgatctcaaagaggcacaacgagcatgaactacagtgtaatctggaacttggttatcctgcacagatgttgtactctcaatattcttctttgccaatctcaaggaggagcgggttttagaaatgacaggggaatcttgaatcaaatgttttttcttagaaggagggcagtcccaagactctgactgaacatttaacacaggccaacaatgtgcaaattagaactaaaccattgataagggtaagagagaaaataaaaaaacaggtcactgcacatccttttattatgttactgaaaaattcatctgcattttgagtaccaaaagtacaagtcttattgatccttcatctctccccaacaaaacataaacttttttagatgtggagatactaaactaaacatttctgttttagtgcaacaatgagtattcacattgctcaactttcaagatggcagaaaagaataacaaactagtatgatggagaaaaatcaacatagtattcatatttctgtatcctacgagccatgcagctgctaatgaaactagtattcggtcctcaactttaataataacagagaaacagatcaaggaaatgacattaaagtaacttttcacgtgtgatggagcaaaatcaacctccacggttccacccttacaaacagcactcaagtttttcaaaatatttagaaacttgctaccacaatcatgtacttagaaacacagcaaacaatatatcagatagagagagatttttgatttgttaataggttccccaacctcacatgggtgaaaatgagaagtagagattatgattatattccaagttcacgtttctgccattttatttctacaaaaatgcttccattggaccattttcattctttgttgaaaacaatcatcgtagccacaaatatgctgcatcatttggaaacaaagtggataatagaattagcatgtgtctgtgttacatacctggctggattctgccgtataagattgagaagaatccatatccccggcttgcttccccttcttttttgttgttgttgttcttcttcctctaggcatatttagtgtcaatgttcttcttactaaacgtcaaagcaagacacttgcacagcacaggtccggaactcaaacccaaagcgcttccttattcaaactctctctctgagaacatattaattcaaacttgtctttaaccaaaaaacgtttatacttagtaccatctttatgaatgtatacacaaaaaaggtaaagagtattaagtgtatgtatatatgtatcgttactctaaaagtaagaaagcaatcgttttttattttctcagtttgtactagagttttcttcctttttgtgtgataaaatgtttttcttatgccatgggaataaaatctgtgttgtattgtatcttggaccaccacacactgggttaaatttgaggagattgattgaatttgagttgtcttaattacagttacacttactactcaactaatggtttcctatatataatataattgaaacaataggtgactaatccaaaaaaaaggaaacaataagtggcatgccttatttgtgctgcttgagaaattaacatgggcttgagaaggatttgactgggttataacttataattcaccttgtcatttgagtaaatttttagcatcaaagcaggttttaaagcttatgctgacattcccatcgctgctatcatagtcttgtttaaaattgttgaaactttatgagcaatttttatgtttgagttatgatataattaatataggttattaattttcactttattcttttttttattaacaaaaatgtaaaattatcaattgaaagttataatatagtaatttcaatgtcttaccatatattaattcatgttcttactattttacagcattgttattttctatagaacattaaaataaagtttaatttttttaagaatggcaatatttacaagtatcgttaatgatatttcataaattattatatccattttaaagaaattatttttaataaatttaatacttctaataaaatattaaatttcttttaattagtatttatttcaggatctttaattctagaataataaaaccaaaactatcaatatcaattttatactcactaaaactcaaaattgtgtcatattaatagaagacttattaaatgctctacaaaatatatatttttaaattacataatgttactaatgaattaattacaaatacattaaatttaattatctgatcatttaacttcaaagaaaaagtaatatatatatatataagtgtgaacacctatttttgttcatctttaatttatttttaaaaaaataatcattctttcaatttactgtgtttgcttaaacagatcccttttttgtgttaattaaaaaaaaatattttgtctatccatttctaaaagaaactaaaataaaatgtttaagaaaaaaggtaagataatagtaataaaacaagagagagatatagaagaatggagcagcatcttaggctggagactattttcagttttaggcaaacgcccttttggcttgtctttgctttattattatttgttttttatccccattttttctcacacattcactgttgtacactcatccactcttcctgctgacatgtcagcaacggcaatacagaacttgtctctgaatacaaacaaaacaaagaccattctaattttaacaaaaaagaggtcaaacaaaatctgaatacaaaaagggtgagaggttggaaatgtgaatgttttacctaatccctgccttttgttttctgtcttattttcaatattgtaatcttgcggatgcccttgatatatgtagcattttattttatgcatgtaataatgtgataactaaagagccacaaagtaatcttagatattcaagcaatgatgcgcttgatagcctaacatatcataaacattcaaattaacgattaacatgccaaatttctaacatgactaacacaacttaaaaacatatcccttattaattgaaacacgattccaaagaaaaatcatcgtaaaatagtacaacgcaaggaaagcacaagcttcagaagccatgagagaaatagttttttttttttttaaaaagggccctttgaaagaaatagtagtgcttgtttaggacttaagtcaacatataatctgaatgaaccaattgatttgggtatggacaccaaggaaacaaccaagttggctctggtaatcacatagaatatgttttatgccctttcatgactagtcctcctcatatacatcatatgaattcaactttatagtggaaaatattaatttcaattaaatctttcaatgctaaaaaactatacttttgaattagaaggtaatgttccagcattagttgtcccattgggtctatggatatggtaaatgagaatgtcaaaaacagattaatcaatcttaattcttaaatttaattagaaagctaagattgagattaaaagagtcagttaaatattgaaaagtactaaagagatttttttatgcacaaatattaattgttattattaacatttttgttaatggaagaaatcatacctactatttttttttcctctcttcattattcttttatgactcaaccaatcttataattctaaaatctaaaagccaatgatactctcataaatattatatactcactctatatcataatcctttaccgatgcattcaatgttgaatgagattctagtaaattaagcaaggggtagggcatataggtgggttcaaacaccttatttatatgctccaatcgtttagattggatctcaatctcatatagcaggcacgaaattacgcaaatggccatgttcatgaagaataaacatgacacagatggtaacagtgaacgggtataagttgtaaaatgtaaatagctacatgtaacatactctgtcgtccgccccatgccattttcttttagtcttttctctatttccctttagatatgtccagtttgagcatgatagagaactgattcaatgcagaaactacccaacaaccaaaaaataggaggtaatctaacagcagatgatgctatactttttaatctcatgcttagattctgaagaccatagtcttctgaaattcttatgctcagagaagtactaacatttgtaatttagccaaaattgaggataattaattttctacttttttgaatttatcttctgcgtgtaaaaaggaaattaatagaaatatttaacattaacttctcccttatctatcatattctgtgcgaattaaaaattaaagatgaccaaaattacaattttaaaaacaataaaaaggcaaatttcatgtcacctactaatttttaacatccaatggaaagaaagtttaaatttaatctctcttcctatcactttcttttccttctcactccatgctcccaacaaattctgagtggttgttggaataaatgatggcacagaagaggaaggtagaagtagaataaatattttgtttctatgattttaacaaagaaagaaataaagttgagtatgaaagacgtcttgaaatatgtttataccaacagtttgacaaagaccaaggtcaaaatttgaaaaatgttaatgttctcctatacaagaaaattcttaatattgatgtattcttggtatcaaaacaccaaaggcatgatcatgatcatgtactgtatatcctattgcttttttgtagaaaaaactagtgaacaacaattgagtaacttctccctcatccccaattaactctaaataagagattatttctggcttctcttctcagttcttagccattcagaggcactgctttctttattaaagtagggttactcttctcagttcttggtggaggtttgctcattcaaccttggatattagttactgaatctgaaatctagtgtacctagagtgtctcaagtttccttatagttttaaagcaagaaagaaaaatgagtttcagaatccgaaataacaaccaacaaactagatttctccgaattttaaaaattttaagtatccccaactggtctcaacatgattttgagtgggaaacccagtggccagaaaaacaaaagattaactatgttttttatacttaatttttttttttttgagttttcacttttaattcttgaaaaaaaaattgatcagttttaatttctaatgttttcatccatccatagttttagtatttaccattaagtttttttaataagtaataatatgaaactatcataatttctggccgtttaaaactgacaaaaagcctgctaaagtgattaaaccatattaagcaatctctgaagggttcaacgcaacgctcctccaccacgtcgccgtcaaaatcgacaaggagagcatcaaccaagggatacaaaaattgaaactcagatctgaaacccaaaactcagatctgtttttggacctcgaaacccaaaaccattatcagatgagtcgtaggaagctttcgcctctgccatccgccgctgcgactcacggtcaaacggcgccgttttgcaaacccgcccctcccctccgccaaacggcgccgaagatgatggcgttccagaggacgacgtttcagtgtgagggagggatttggagaagcgagtgcccgtagaagtgaagctgattttggacctcaaaacccaaacccaatatcagatttgttgaagagactgatccatagcgagaacaaatcaaaacgaatcgaagaaggagaatcaataattgcggaacacataacaatcttggctgccccgtagcgagaacaaatcgagatgattcacaactttgaatcctcatctcattagatgaacaattaaaaaacatgcagagaaagcaaaaacaaaaaatagaatgagtacgaattagctattaggagttgcccacattcaactattctgcatgtcgtatatcccttcctttcaaatccactaaacatcaaactttaaaagattttatgtaaagtagaaactgttgcttaaattaatgaaaattcaattaaaaaaattattatagcaatttgaaaaatataataccaaaatttcaatcaaatgaataattgtattttgagtctgacgatattggcatctcctgaagcaattaagccgccagaaaatagtttgctacattttaagcctttgttaaatgctgatgtagcactaattttattattattttaattacagtttatgacatttaatttttttggcgatttaatggtaacgacggacaaaaacattaaggaataagactggtcaaatttttatttagggactaaaaagatagttaaaaaaaaacaacttaaatacaacaataacatgaccgcaggaagtcacctaaatttggctaaaattaaaaaataatataatttaaatatttaattaggaaaagggtgtaaattttctaatatttagcaaaatggtgcagccaaacacacctagggttaggcgtgtttaaacacgcccagaatggggcgtatttcaccagatggtgacacgtgacaggcatgaagaggggcctaggattttcgcggtgtttttgtaaattacgaaagactataacttttaactgggacgtccgattgataagaaaccggcgcccacacgctcgaaattgagaggagaaggccaatgcaagtccccttgcccaaattttttttccaaacgaagcctctaagtgcctcaaaattacgatttaagtttcggagcctcaaaaatttttttgttttctaatattttatctactcaattagtgaattgcaagctattctttgtttatctaattacttgtcttaatttcgagccttctgacataaaatacgtcatcatcggacattgctacgagaaattccgactgttcaaagttatatgcatcgtcaattttgcagtataattttggataatttttgaaattatttttgcgatcacaacagcatgattttttaggatttatggttttgggttttgggtttaggtttatggttgaggatttagggtttatgctttagggtttagtggtttcgtgtttggggttaattaatccaaagccctaaaccactaaaaatatacagcaataaccttgacgtacattgtttcaacttgtgccaagttcatcatcatatacaacaataaccgtaatccaacacaaagctttaaacaccctagacctcaggttgattctatctgtcatcatgacaggcgtttttccatcctataatccaataattgttcctaaacagacaactattcctactttggttattatttgtctgtgtttttgtttcacctgaccctgaactatagtgtcaaacaaagtttccaccaatacaatatgtttggcaaggcaaaacttgaattggaaaactaattactcaatattagtgaagtgtatgtaacactcattaggttattcactgccataaaccctaaaccggcacccataaaccctaattctatacccacaatccatattagtgaagtgtatgtaacactcattaggttattcactgccataaccctaaaccagaatctgtcatccataggtctataacccaagccatatgcactaatgaaaacattagacttagttcggaagctgtaaaccctaagtcagtaaccgacgacctaaaccctaatcacaacatcagacctaaaccctaaaccgaattccataaacccaacgtatgtaacccaagccctaaaccctcatcacaacatcaaccctaaacctaaaccggaatccatacaccctagctctgtaacccaagacataaatcctaatcagaactaaaacctaaaccctaggtctgttcccagcggcataaatcctaattacaatataaacccctaaccttaactgaaatccatcaaccctaatcaccacatcacacctaaaccataacctggcacacacaaaccctaactctgtaccccaacccataaaccctaatcaccatgtcaaccttaaaccctaaacccgatttacatacaccataatcactacctcagggcctaaactctaatcacaacataagccctaataacaatgtcccacaggcccctttgtccatataaaagctggtgaaaatgaaacaagttgtgattcactaattgagtagataaaatatcagaaaacaaaaatttttttgaggctccgaaacttgaatcgtaattttgaggcacttataggcttcgtttgggaaaaatttttggacgcgtggccgccggtttcgtgtcaatcggacgtcccagtcaaaagttatagccttccgtaatttacgaaaacaccgtgaaaaccctaggcccctgttcatgcctgccacgtgtcaccatctggtgaaatacgtcccattctgggcgtgtttggctgcaccattttgctaaatattggaaaacttgcacccttttactaattaaatatttaaattgtattattttttaattttagcccctaaatttacattagaatatattttgacaagctaaatatatccatagaaacatagttaacaaaaaaaaaaaaccttaaatacaacaataacatgcctgaagggagatttacattaaaatatagagtaacactagtactccatgtgttttactcaaattccatactcctccctttctgcatcctacaaaaaactccttaaatgtttaactcacattatacctagactccctcttttctagacattgtttaataatctaacacaaattagacacatactagtcctaaattctgaaactaattgagagaggataatttggattttacaataaaaatgtaaggacaattttgtttgctcacatattttaattaacgttagttaacgacgttaatagagagggtaaaagtaatgtccaaaaagggagggatatcgggtgaaatttgaacaaaatatgagtgtaatttactctaaaatatattttgacaagctaaatatatccatagatgtgagcattcataaaagattactcattaaacaatcccaaaatcactacattgaaaaagtagtaaaggagaagaaatggcaaaactaaatcaagccatccgccaagagagcaattaacaaagcgcctcactttagatttagcatttatgataatttgagatatcctagcagattcatcctgtgctctagtcagtgtcttcttgcaagttgtctctctattacaaattctatcaactaatgattggaacgattggatctttgcttccagtgacttcttttctgcttcacaacattccaatgctttcttgacaaattcaatgatctttttgttcctatcattttcctcttttagcatgctagattgtttaagaatctgtcttgcctcaagtatctcttccagtctctagagaagccactcaacgttcactttcatacttttcatctcgtttgcaaaagcaatcatgtaatgcagctcatcttctgtgattttatggagaaccttgtcttccagttctgaaatgatgtcacatatcacctccaagaaaattgaccagagtgtcgttgttgatgccatagaattcttaaaaacatctccatgcttattgagaatgtttcttaatatggggatgcattctggcttcttcacttggtatccttcaaccttgtccatccatgatctttgtccaacaaaattaacctcatcgttccccatattaataatttcagtaagattgaggctgaaggatggatctccaaccattgaaatggacttgccattgttcttgtctgaactttccccagagttagatgcttcaatatcctcttccaaatgttcctgctcaaaagggataaatagggcttcaaatgcattgtgttcttccatttgaactgtgtgattagccaccgggttctcatcctcactcacttttttcatttgagctacatcaacagaatctccagccttttcagtctcttcttgtctggtttgtggcataaaggcagaaggaagtgcaacttgtcttggaacggattgtagttctaccacagaacattctgaacctgggcctgcacagatgttcctctagtttcaataagcttctttgctgatctcaaagaggcatggcgggtagaaatgacagtggaatctggaatcaaacgcttcttggtataaggagggcacctagactctgactgaacattgaacacaggcaacaatgtgcaaattagaaataaaccaatgataagggaaagaagaaaaaaaaggtcattgcacatcctttattatgttactgaaatttacaagaatcaaaaatacattgcattttgaataccaaacccttaacaaaacataaaatttttagatggtgagactgaattaaatatctccgtatttttgtgcaacaatgagtattcacatcgcctcaactctcaagatgactgtaatgattttccttaacatcaagatgtgcatctttttgccacagtttccataacttaacgggtagtagcagttggcaaggaatagggatgggtcatatagtcaaaattttcttgaatcaataaaataagggaattataggcaatctagaacctactgaagaggttttgatttgttataaacaagtaaacaaccgaaagagttgcatggaagctagtacactagtaaatgaagaaattttccttttacactttccactttatgttttgggaacttttttctctcttcaactttctcaagagtgcaaaaggagtggtttaacgcatcaacattttgattcatgcgaagtgaggaaaaaagaaatgtgcattaacttgggtacaatgttaaaagtaaataatataaacaaaaaactctcatggccaacaaacataatagaatgagaatggagcttatgacacaggctgataaatcaagagaagttgtagggacattaaaaaccataagtgtcacggagctgcgattatgattctgtttccaagttcatgtttttgccatttatttatacaaaaatgcttccataaaatcattttcattttttatgggataaatcatggtactcacacaaatgctgcaagattcatgcataatcacagcatttggaaacaagagggtggatggataacataccttacctggttcttgggtgaatcagagtgagaagaatccataagctgatcctgcttccctgtgtttttcattgttccttcttcttaggacaagcacttgcaatatgtgctagaggctgttgtgttgtgtatgatatgagtatgagtctagaggctgcagtgcagtgcaatgcactgtgtgctaatgtactattgcctgttagaataaatctttttcatgctattttgaccacgatatatgcaccgcaacagcannnnnnnnnnnnnnnnnnnnnnnnnnnnnnnnnnnnnnnttggaaaaaaaaaaaaaaaaaaaccaccaagtatgcaattgtgtttgattggacttatgtgttaccgatttctattaacttttttttttctttcactcactctatatctaattgtcacattatagtttgactaatttaagttgagttgagagaattcgttaaaagtctatgaattaactctagagtttaacaacaatagttgctagtgggacatactgtaatttagcaattgttgtgccactacatgcaatttttgcattctagaaaataatacatgaaaataaactggtaaaaaaaacacaatacatgaaccaattgtaactgcatagcttgaattggtcttcatgtcatctacacttcctgcccactcactgtcaacatagacatttagcttaacaactcctatctttaaatactagatgccaaaatttgttgtaccttcaacatatttcagcaccctttttgctactcccatgagatgatgagaacattgtttggtgaactcatgaacctggaaagtaaaatagttggaaacatcaaggctactcgttgtcaagtacagtaaactacccatcaagcttctacatgcagagggctcttcaagtttctcaccatcattcatagaatttctctcactttgtgctagtaaagttggtacttctttgcatgattctaacttacacttgagattgttaacaaataacaacatattttatttgtgaaataaatataactgagccacattggaatactttcactccaacgaagtaaataatgatgccaaagatcagacatctcatatatatcttccatttccattttgaacttggccagcaaaggtaaattacttcctatcacaagcatgtcatccacataaagtgacactacaagttacaaaccacaatcatttatatcaaatatagacttgtttgattttcactcctgaatccaagttggattaagtaagagtcaattatgctatactaggcccttggtgctcttcaaatcataggaatctttggtagtctgtaaactgtgttcttggccagcaacgtcagcctccaggttgaaagattccaaatttgatagttttacctttaaacactggaattttatagatgaattactagaagtagacatattttcatccatatgcctgaaaataaatttctcaacctcactagtatttgcactcaacctctttgcccccaaacacaaaggaagccagctctttataccagttaaatatcagatttgaaaaaaaccaaaatactggaactagaaaatattaaaattgaagaaagaataaaatatttcataaatgagaatgcttatttacgggctcacaaccaatttgaaactcgctaaaaaatctaaactgctgtgagattttattgggattgcaatagctaactaaaacagaaaaataaagagcagaaggtgtaacaattgcaaagactaaatctatccaagatttatttaaaattcaaaggcaaactctcgcaactgtaagcctcttgaacatatctgaaggtgggttaggaatctacaacaaaacaaacttttacagatttgtaagaaaatttgtctttctcaataatgctatgtttaattgattaactgaaaaatatcattcacaagaaaaggcaagatcccaaatttcctctaatttccatcacatgaaattacaataatgaagctctatacaatgcttaaatcttcacacatgcttattgtaaatattgccagtttatataagatgcttctagtaactgctgggattgcaataatttcatgttttcaactgatacttcaaccattttcaagctataaaggtgtctaaactattaagtcatttgtatttaccttttatagttaaaattaatattactaggaaggatcatggatacattaagagaaccaaagatgaaacctgcaatcacagagaatctaaaaccatatggcattatggacaagaaaaaatgatgtattaactttctgcatctcataatttacaacaatgcctttggccagatagcattccatgtctcaaatcatctcttataaaaactaaccatacagaacctacattgatcaacaagaaagctttcacctcgtaaagtttgatttcttctattttgggatgaagtagtaaaagaaatagtgaagctgctggagtgatgaattgatataacctactctattgaagatgtatcactataggaaatatatgctgcaggaaagctactcttcgtagaaattagaaagcaacatatgttaaaaatagagattcatgagtaactgcctcccttttcacctcagaaaacgcctcataacaaataaagaagaacgccagctcaaagattaaatgcaaaatttgcaaaaattggccagaatagcaactatctattagaacttaatgcatgcaaatttatctgttcaaaggttctaactggacttccattcttgcagagggctgtaaatctttatctgcagttgttctggttggactcaagagatcaactgaatcatcttcctcaagattaccaagcacccaattgcctcttccagatatctgccgccctattcgctgcctttcatggtattccaaataaataacaatcaatgcaccaattaaaaaccaaattgccatagcccatctgagtccatggacattttccacatcatatctgtctcctagatgcttcatcccagtaaaaagtgctgcaatgccaaaaacaatggcacatctaccaacaattgtgtggaaatattcccaaataaccctcttggaggatgcctgctccccatttgctggttttggaggccttaggaaagcatttactggctgtatacaagccaacaatatagtagcaaatccaaatttaacatgtgttgagctgaaataaaatcccctaagctcagccacagcaaaaagaagggcaagtagaacaattactaaccctgagtattgcaagtaaacatgaatccggtaccatccatcgcccttgagatgttttagatacctggctgccaatatccctccaggaagcaggataccccatgcaacaaacatcataaatccatgcacagccaaaacaggaagtaaatcctgctccgcctctgctgaaccacgcatcaggtgtacaaggatagccctattacttgtactagaatgcatattcctgtcagtaagatgatcattggtccatttagcacccattgcccaaacaactttgagtggagttgtgggatcaacgatatttttacattctaccctcttttcccgcctacaagatgggtccaagggacgagtaaactcaaaagtaatgatgccattttcggttttacatctcacatgtgtcaaattttcctgcgtggcatgtacgcttgaagcatcctttccatcaatccaataagtgttaacatgtcccataccagtatcatcaatccaacccacatacacatagctgttcaccattccacttccaaaccctatggcaatataaccactttttctctcgccacgagctgcaatagatatggaatcctttgacaatgtccaaaagaaagtaacctgttgatcatccaaaatgacactgttattatacatgtccgatagacccccatcaaccacctcgaccttccaacccatcttctggtcgaacaaggaatgatagtagacgtgatcaggagtgttcctgtcaggagcccaaactaattctgtaggactggcttgaactccgtgggcctctggacctccagcataaatagtctcagtcagatttctcgtggtagcatttccaccaagcggatccgaagtaatataaagtgcaacatcgtgcccggcttggatcgaaaacttgaccggcacccctctttccactctcaagacaggagcttcnnnnnnnnnnaatttgtttgagatgaattatgctaatcatgtaaaaatattttttttagttcatttttttcttattttccacttaatttttttttaaaaaagtttattcttaaataaataatgatgtcctgaaatggatctaagaactaaattaaaaaaaagaagaaccaaaataaatttttgaaaagatgaaataaaaactataaataaatcagattgaatttttttaaaaagaaactaggacaaagaacgaaataagtggtcagtattttttttttttttgnnnnnnnnnngaacaaggaatgatagtagacgtgatcaggagtgttcctgtcaggagcccaaactaattctgtaggactggcttgaactccgtgggcctctggacctccagcataaatagtctcagtcagatttctcgtggtagcatttccaccaagcggatccgaagtaatataaagtgcaacatcgtgcccggcttggatcgaaaacttgaccggcacccctctttccactctcaagacaggagcttcctttttgttgatataaagaaccttttcaggatttggagggttggggtaatgcattgccggagcagaagaaaccaccaacggaacatttgcatctgcagtgatgagaccttgatcttctttgtcttcagcatccaagggacctgtacactcattcacatgctccgagacattcaaaaccaaatggccataattcacagccccatgattctgaggaagatagtaaggattaatagaatcaggaggcttgatacgccccaaagcccaaataaccttcatattcgctgaatggttcacaggatgatcatactttccatcgaccttagtcaaatgcctgcggtatctgacaaaggtcaccccatccttcctatggccataaaccaacattgaattgttgactaaacccaccccatcagggccttcataaaaggaatcaggacataccccttgagcaactccatcactatttctcacacactcactatacttagtaatgaaaaaatcatccacaaagggcataccatcttccttaaaccctgcaacgacaacatcagcgccaatcatgagatcagaatcttcagcactggaattagcccacccaaaagccatgtaattggtgatcccagtcgcggcctccaacccaatttcaagagaatcctcggacacgttcaaactccacctcaacctgaaattcttagacaaaaccttgcaattctcgaacaccgtcggaggcggcggcgtcgccgggacgtccttgcggagcacgacgtggccgaaatcggaggcggtggcacgatcccagacggcgaggacgttgatcatgctccaggaaacattgctcaacaaatgcacatccaaggtggagttgttgtaggttccgttcaatccgtcgttggaaacaatgaatccggcggtgaggctatcgaaatcggaagcctgcgcaccccaccagtggacgtcggaaccgggaagcatgtcgaattgggaaaccctaaaggagcaatcgtccctgattttcagggatcctcggagttggtgttgaaccatttcgaactccaactccgaattgacgacggagctgaggcgagtgcaattgggagcgggatccgcatatacgaacaacaacaagaacaacaagtgtaggatgaagatgagggatctgcgaagcatgacgggtgcacttgttgcactgtcacgcaaattctgtggatcagaatccacgatgaccaaaccttcaggatcggatcgtaacaatgttctgtgtgcgtggcggaggggttcagttaaggtagttcacaaggttctgtcagtcttcgggtggagagatgactcaaatctagtcaatggttgttgtattgtatcacactatcagttgatggatcctgacttacacctcaccctggtgagccatctacgtggattcataaatcatgatctatataatctataatttatttatgatttattttacctatttttaacttcatatagttattataaaaaataacaaattaactatacataatttgtgagtagatttacgctgtcatatttcttcatactaataaaaaaaaacacattgtcatgtgtaacattttttttctgaaacattttttaattatattattgattattcatcaattttatttaaaattaaatataatatcattcaaatcaatgatttattgatatttataaaacatatttaatgaaatataagacgaataaatattgattatttgatcaatcatatatattatagatgatcaaattaaaacatatataaagaattttttttataaaaaatatacttttttaaacaatcaatgtaatattaaatcttgattatttatgaagatatttatcataaattaccaatataaaaaatataacgacatgtgattttcttaaggaaatgtattctagatatagcacgcgagttgttcttgatggttactgttttataaattatcaacacattaattggatttacggtaaatatattgaaaactagtaaagcctaaattgtctaaatttaaaatagctaataaaacctaaattttggcttacttgctttatgttatgcagaaagtcgacacattggtgaaaccttaagcaaacaagtttaatgtcatgagagaaaacaccaaaacttatcaacaatcttcattcttccatggctagctttcaaaggtggaatttgattctcttaagtccaagccacttccaaaatggtcttaaaaatatgttctaatggagcatgaacttacttacatccaagaaactcccataagttaactcaataatgaacagttcaccaaagtgaaagcaccaaggtaattggtcttcaccatattgcattttaggagactttttttcaagggaaaaaaaaaatcacatgttgttcctaaatctattgacaatttatctaaggatcatgcaaaatatgcatatcactcattgaacatcctacaccacatcggaccgttttttatgaatagccctactcttggaattgaatactagatcattaatttccacgtgaccacatcaatgtttagcatgtagaactttaacccaatgagctatgtcattatttaatactatatagtccactttgatacatagctcttatttagttgcctaagattacaaaccccttgcaaaccattatacttagattgcacatatgctccaaatcaattaatgacattttttaacaacagtggagcgcctaataaagttttttacagaaggattaaattttggaatatggaaatttacatcacataagtgactaaaaaaagaattaagttaggactgtcctccttagcaaagaaagataataagttttatagtcttgcaaatctttttaactttatcaattaggaaggcattgttctccctggtaacctttcagcaaagaaagaaaatgccaaggtacatacctaaattatagcaaagtgaattgtcattctagatcaaataacttcaagtcatatttggagggtatactctgaaattatgattgtaacattgatcggaacaatcacaaaactattctgacacttgattaacacagtcaacttgaaattcaaccgctggaagaaatggaatctttaatagcatgggacaaatgttatacacagtgcaaaattaattggtaaagtgataatcatattatggacatagagataaattgtgaaaaaaaagtagtgttatatagtttgttattatcatcatttgtatatataaaattcttttaattaatttacacagattaatcaattaaaaagttggtttataagttggtagtgttcaaattgtcaaaattttttattatttttctaaaagcatccttaaaattattgagattcttcgtttcacttttttatttaattatttttatgtagttaattaatgtgtcttaagcctttttcccattcatcaccaaaaagataatgaatttatctcattaatctaatacattcattgtttactagaggaagaaagcacttcgtatttctctaaattttttaataataaaaaatacaaaattcaaaagttaaataaagttaataaaaaaaagagtgtcagagaggaaaaaaactgacaatataaaaatagtgggcaactattcttgtttagaagaacatggaagtttaaggataaatttttctactaaaatatgtacaccaaataaaaatattttctttattattagtattgattaaccacagatgaaaaagtacaaaacaactaaaggtgttttaattaaaaaattaatacaagaannnnnnnnnnnnnnnnnnnnnnnnnnnnnnnnnnnnnnnnnnnnnnnnnnnnnnnnnnnnnnnnnnnnnnnnnnnnnnnnnnnnnnnnnnnnnnnnnnnnnnnnnnnnnnnnnnnnnnnnnnnnnnnnnnnnnnnnnnnnnnnnnnnnnnnnnnnnnnnnnnnnnnnnnnnnnnnnnnnnnnnnnnnnngatgatatgaagatgtacacaactgccatgtattatttttttgattatttaatgtaatttattttcatgtctcaaatgttgcattcataaattggataatttttttccaacaaaacaatctaacttaaaccaagtcaaaccaaattgataatttttttagtaaaccaaattgataactacttttaaaacaatgttaatgacacttttttggtaaccctttatatgtgacaattgaaacttattaaaaattactacctcttattttatatataagaaataattatttaattcaataagatcaataaaataattagatagattaatttatcataaattttaattttattctaagattatctatgatattaaattgtttaagagatgattattttttaagatgaattatcttattttattttgttcaatttgatcttttaatttatttaagatgaattatgctaatcatgtaaaaataatttttttagttcatttttctcttatttcccacttaattttttaaaaaaagtttattcttaaataaataatgatgtcctgaaatggatctaagaactaaattggaaaaaaaagaagaaccaaaatgaatttttgaaaagatgaaataaaaactataaataaataaataaatcagattgaatttttttaaaaagaaattaggacaaagaacgaaataagtggtcagtatttttttgttgcctataagttgaaacaagaatacaaaattacaaatacaaattaggaatccaagtaaaaccctgaataaggacaattgtttcagatctattctatgaactgatagtgatacaacaccatttttactcatgaaaacgaggaaaacgttgctcatttctctaccggaatattaacatctaacacaaacaaacgtgtctgtgacctaccttaaatgaacccctccgccacgcacacagaacattgttacgatccgatcctgaaggtttggtcatcgtggattctgatccacagaatttgcgtgacagtgcaacaattgcacccgtcatgcttcgcagatccctcatcttcatcctacacttgttgttgttgttgtcgttcggatatggggatcccgctcccaattgtactcgcctcagctccgtcgtcaattcggagtcggagttcgaaatggttcaacaccaactccgaggatccctgaaaatcagggacgattgctcctttagggtttcccaattcgacatgcttcccggttccgacgtccactggtggggtgcgcaggcttccgatttcgataacctcaccgccggattcattgtttccaacgacggattgaacggaaccttcaacaactcgaccttcgatgtgcatttgttgagcaatgtttcctggagcatgatcaacgtcctcgccgtctgggatcgtgccaccgcctccgatttcggccacgtcgtgctccgcaaggacgtcccggcgacgccgccgcctccgacggtgttcgagaattgcaaggttttgtcgaagaatttcaggttgaggtggagtttgaacgtgtccgaggattctcttgaaattgggttggaggccgcgactgggatcaccaattacatggcttttgggtgggctaattccagtgctgaagattctgatctcatgattggcgctgatgttgtcgttgcagggtttaaggaagatggtatgccctttgtggatgattttttcattactaagtatagtgagtgtgtgagaaatagtgatggagttgctcaaggggtatgtcctgattccttttatgaaggccctgatggggtgggtttagtcaacaattcaatgttggtttatggccataggaaggatggggtgacctttgtcagataccgcaggcatttgactaaggtcgatggaaagtatgatcatcctgtgaaccattcagcgaatatgacggttatttgggctttggggcgtatcaagcctcctgattctattaatccttactatcttcctcagaatcatggggctgtgaattatggccatttggttttgaatgtctcggagcatgtgaatgagtgtacaggtcccttggatgctgaagacaaagaagatcaaggtctcatcactgcagatgcaaatgttccgttggtggtttcttctgctccggcaatgcattaccccaaccctccaaatcctgaaaaggttctttatatcaacaaaaaggaagctcctgtcttgagagtggaaagaggggtgccggtcaagttttcgatccaagccgggcacgatgttgcactttatattacttcggatccgcttggtggaaatgctaccacgagaaatctgactgagactatttatgctggaggtccagaggcccacggagttcaagccagtcctacagaattagtttgggctcctgacaggaacactcctgatcacgtctactatcattccttgttcgaccagaagatgggttggaaggtcgaggtggttgatgggggtctatcggacatgtataataacagtgtcattttggatgatcaacaggttactttcttttggacattgtcaaaggattccatatctattgcagctcgtggcgagagaaaaagtggttatattgccatagggtttggaagtggaatggtgaacagctatgtgtatgtgggttggattgatgatactggtatgggacatgttaacacttattggattgatggaaaggatgcttcaagcatacatgcaacgcaggaaaatttgacacatgttagatgtaaaacagaaaatggcatcattacctttgagtttactcgtcccttggacccatcttgtaggcgggaaaagagggtagaatgtaaaaatatcgttgatcccacaactccactcaaagctgtttgggcaatgggtgctaaatggaccaatgatcatcttactgacaggaatatgcattctagtacaagtaatagggctatccttgtacacctgatgcgtggttcagcagaggcggagcaggatttacttcctgttttggctgtgcatggatttatgatgtttgttgcatggggtatcctgcttcctggagggttattggcagccaggtatctaaaacatctcaagggcgatggatggtaccggatacatgtttacttgcaatactcagggttagtaattgttctacttgcccttctttttgctgtggctgagcttaggggattttatttcagctcaacacatgttaaatttggatttgctactatattgttggcttgtatacagccagtaaatgctttcctaaggcctccaaaaccagcaaatggggagcaggcatcctccaagagggttatttgggaatatttccacacaattgttggtagatgtgccattgtttttggcattgcagcactttttactgggatgaagcatctaggagacagatatgatgtggaaaatgtccatggactcagatgggctatggcaatttggtttttaattggtgcattgattgttatttatttggaataccatgaaaggcagcgaatagggcggcagatatctggaagaggcaattgggtgcttggtaatcttgaggaagatgattcagttgatcttttgaggccaaccagaacaactgcagataaagagttagagccctctgcaagaatggaagtccagttagaacctttaaacagataaattttgcatgcattaagttctaatagacagttaacccatttttggcaaacttcacggttattttgcaagctggcaggcttctttattggttatgaggtgatgttggaggtgaaaagggaggcacttatcaatctctttttttgacttatgttgctttctagtttctctgtagattagttttgctgcagcatataatgcgtatagttatacatcttcaacagaataggttatatagttactgctactctagctgttactctttgttttttttttacttcttcccaaaatagaagaaaatcaaactttacaaggtgaaagcttttctgttgatcaatttaggttctgaatggtttagtttgatagtatcttagatgatttgagacatggtatttaatctgaccaatggcattgttgtaaattatgagatgcagaaaattaatacaacatcatttttattgtcaataatgctctattgttttagattctatgttattgcatgtttcatctttagttctattagtatgtgtttggttagggagttttgagagtgaaattcaatttttaaagggatttaaaatgccaagtattaaaatatattgtttgtatcaaattcaaagattttttttttttaataatggggactttataagggtttatttttaaagtaaaatgagagaatttcaaataacaccaaaactctgagaatttgtaaatttctctgatcatcaacaccctcactcttgtttgcaactattcaacctcgcatgttcttttcttggctataaattcttaccatcacatgctcctgagtcctgatcactctctcttgcccgagcttctctggctttctcttttttcttctcccttggatctcctgtgattgagctcttctcttctctttggaccacgtaaaatttctttctcactattctccaatctttttcttttcttattttctgaaaatatttgaatctattttgttggtgttcatgtattattctaatttctggactctagatctgattatgattttgatgttattatttgtgtgtgtgatattatttgctgtattgcaacatgattagagtaatattaaaatgcatattatcaccttctgtattctggatcttattcgctctgtgtttattgaaatgaaaaagcatattatcatagccaaattttaaatgggttgattccaatctaggtggtacatgccttgccctgtgtaaaactgcattacaatcaataagttcgtcatgtctgtactgtatcattatggtaaacccaatttaactttctacaagtttgtggcagctaccaaacaagatggaagtgtggatgaatgggcagcacggcttatgtgtgtttgtctgtgtccgtgtgtgtgtttgagcagtgagtttaaaattagaaattttctacaaaccagattaatcttattttttattggaatgttcagaaatcataattaatggtagatgcttttcttttcaacattttgtgtgcaaataaagcttttagagcgagaaggaccagttagaacttgcaagccatagcagtaaagcttagtcaatagtcaagactaggcaaaggtgaatattttatttcatcttgttttgttgtctatttgcaccttaggatttgtcaactgctacttttatgaatgacatacttttttcttctattttcctggtccactttattttaaaggaacatgatactgagttcactgctctataatattaaccactgtgctctaaagaaccttgttaactcttccccctaaaaaaaattggtaactcttctccaactcagttcttgatggctatattggcaagagtttactctacatcatatttgtaccattatttccagctcaacagcatgcttagtagtagatttgtgcaaattatgaataaataagaggttcctttcagtacaattctcaaataaagaattgtcaaaatttgtgtatacccatcctagagatcataacagtaaggttcaacatcactttaaaccatttaacaatgaaacatgaaaactctaacaaaatttaaattttaatagtatctatccagatttcaaatttggaaattactaaatcagagtaatattttcaaagacattttcaagtgcaaaattgaaatatgtaatatatgacattagtcctttaatcagatttttctacgtcagatttttctacgcgagacaatggacaagtttataatatgctaatacttaaaaataggtactggattaaattttgaaatttgtaaaataaaatctaagnnnnnnnnnncatgaccaacaggtcaccaagacacaactttaccgctgtgccagggctcgccctcacaattctcaaataaagaattgtcaaaatttgtgtataacagtaaggttcaacatcactttaaaccatttaacaatgaaacatgaaaactctaacaaatttaaattttaatagtatctatccagatgtcaaatttggaaattactaaatcagagtaatattttcaaagacattttcaagggcaaaattaaaataggtacatatacgacattagtcctttaatcagatttttctacgcgagacacaggacaagtttataatatgctaatacttacaaataggtactgggttaaattttgaaatttgtaaaataaaatctaaggctttagcctacttccatcaagaattttcaagcatacttatgagtaccaataactataaattcaaacttttggaagcaatgctgaatcactgtcatgaatcatgattccatataaaaacgatcgttacaagcccaagtatattttatttgcaaggatttcataaaattatgttgaggagtaattttttttcctaacataactatgtttttctcattttgtaaggtgtgtatttttcactttcatatcaaatggaattaatttaggataaatatttattttagttttaaaaagatgaaaaaaattaaaatttaaatattgaatgtgtaaaaagtaggataaattcatccttcatctaagtcttttttattaactcaaagttcatgtctacatcctacctccggatccaattatcattgaaaaatggttatatgtgttgtttattaggtaaaactaatttgtgagcaaatagtcaatgaattaatttatcagtttcaaaaattgttatttttttaatttaatttctgaagttaataatttattaccattttaatccttaaaattaattatttaatgatatgttggtatctgaacttaaatgtgtattgtcaatttggtctttaaatatacatttgaatttttaattagttatatatttaaagtggtatttactttccttaatttataatgaattttttttactactgtcaatgaaaaataattttcacaaattaatttattgataatttatacaggatgcaagtgaaattagtggattagtggagagaaaggaagggtctttctgaaattatcaagaagtaataccgaaactcgaaagcgcgacacgacatccaaaacttgcaaatttctgtcaaaataagaaacgaatgttggttagtatgaacgtgaattttgaagggtaaaatcccaaatacaaggaaaaagcttctatagtttcactctcgctgtatggctactctctcgctctctctcaattgttggagtatcgtggaacttgttccacatattattttggttactaacaaagtaaaaaatgtatctaaagataactaaatcttcaagccttatcaatttcactaacttattccttttgctctaaaaataagatttttagtgagataataatctagtgaataaaataaacctagaatctttgtaaatagtattgttattggtcgacgtaagaatccaaaaaatcaatcataatatctgtaatgaatttaaaataagattttatatgtatatatactctaataaaaatcagatttaaacactcacaatttataacatcctgaataaataaaatatttaaataaacaataacacttcaatatattcaaataaatataataaacacaaattagtaatttccataatcataagattcaattttttggattctagaactagtgcggatttgatattcttcaaaggatctataaactcatatttcatgcaatgatgttttagtgtcttttccatcataaataaaggtattcaaaatctttttcttatcctagatgaagatatctataaataagtatcattcacaaatgaaagcatctaatattatattctcataatagaaaatacgtcattattcattctcataaggtgattataaattcacaaaattataaaaatatcattctagaaaactaacaaataaactctaattttgtgcatccaataatagtagaccccatactaatgtcatgcatgtaggatttttttattgtttttgctcagcgtcatgcatgtaggattgaatatattttaagatcttttctatttttttctttaatagtatagttattttgaaatcttaaataactttttagtgagtctaacatgaatctcattttttaatatttaaatatttattaaattaaatataatgaattaagtaattaaatttaattaataaaatatggaaggaaaaaatatatgaacactaagaaatgaaataatttaaataatttttatttatgagtaaatgttaaaagaaataaaaaatacataaatttgataatagaaaaagtgtaagagattgttcaaaagaaaaatcaaattttattatttgtggttagtttttttatctccttttagttttttttttctctttatgctgatgccccatttaaaggagagagattttttttttaacactaagtatcttgagggttcttttataagaacttatttttcatgttggagatctatccacctccttttttaggagatctagtgaagaccatatcttgagttcaagatccttctgaagatcttatactaaagatgttctcatatccctatttgctattgaaaacgtggctagattttgctgggtctagcgaggcagccactcagcaggtaactgaatcaaggccatggctctggaaatgtcctttaagattttgtaagcttggtttgccatttaaaacttgaatactatatagtagatcataataagttccgtaaaaaggtagtgcatctgagtagaaatcgttcctacttgagataacttttcttgcaagtctgtgcttttttgtgtttgcgtctgtactctgtatcagtacatggatgctttgctgaactctggaaatattttgctttctgaatcaggtccttagctcacttcagcctttggattatattgttgttgcatttttgcctggtattagtgaggttaaaagaggctactctgcttggcttattttgtctttcttatttatttttcatcatttgactgatatcacatattgtcatcttaaattccaggaactacttttccgaggagcgattcttccacttttgggaatgaactggaatagtattaggattgctgccttgatttttggtgttttacacctagcaatggtcgaaagtattcctttgccatctggtgcatatctttcctatttcccctctctccctctcatttctctctttttccccatttatcgaaaattgttttgctgaatttaattcctacactaaatcacaacttttttccattattgtgttgttagttctgattaaattacaataagattttcgtttgtgttttagggcaacctttgttggtcttgcttatggatatgctacaattttatcctctagtgttgcggttcccatggcttctcatgcagtgaacaacctgattggagggcttttatagcggtacacgtcaaatacaccaaaccagaaattaaatgagtgattgccatcttcatggataagtcaccgcatctctatacatctaaccctccctgccccggatttgatgttgtataaaattgtgatacagaaatcagagttagagaccaatccaagaagtatgtttgcaaatgcagctactaatggcagcactgctctctcctccattgtttaaggaaaaattcaagtttgtatattacaacattatatatagatttctgttgtagttctcttagaaaacattccatgtaatttatttaccataaatcgataactgtactttataaagtggacggggtcacttggcttgcttaccaatttggttttgttagtctcccatttttggaatatggcttcattggcttgggacttaaccttttgaaggaatattcccctaaaaattaaacggaaaataaacagaaaaccaaatcacccgcgttttggacgagtgtggcaagcaggaaggtaagatctcaacaagcttgggttgcgctcctctttctattccttacccctttataaaatgctgcactttcaatactttctctttttccttttttttctttctcatctctttgttgtctgttccttttcccccgaattttgggtaactaccacatatctcacaaagcttcaatcttcatggcttcggtaagaattaagatcctcccaccatgtcatgtaatcatgtgtgttcatttctagccaatgattttaaacaacaacaaaaaaagtcattgattttatcaaaaacaaaatggaaatgaggtttagctatgtaccgaggtttccagcaattctttgttgttaatgatgagcaaaagggtctttttatttttcatcttctatgaataattaatctctgttttgacgtaagcatttatgtttgcatgtggagtatgaacaagatggaaagccactacccaagttcgggaaatgggatgtgaatgatcctgcctcagctgaaggattcactgttatattcaataagctaggccagtgacgagaaaaaaaactggaggaggaggatcagggggcattagatcacagcgaagaaataattcgcgcaaagatgatgataaaccctgctagttacttatcaataatacagagttatgctatttagtacgagaaacaaaagtatagatttctctccattagatgtacatgtgtttcattggtcatttgaaggttaaaaacagaaaatataaacttgtactatttcacagaaatcatgtgaatgtgtttctacgattgtttctttttgcaatgaagttcaatatttaataatattatacatatgattttgggtgcagaaaaagtggttttgctttagaccctagacaaggacaagggtataaggatgtgtttcttgctgcttgggacgtatatcatgattctcttcagtttttcttctgaggtctcatctgtctccagaccacggataagagataaaaagaaaagaaagaaaatagttgcagagccttctcaaaccatcgttgtagcttccagttattaacatgttttcccttctacttgttgtacgcaccggcacaaagtaatatgtaaataggagaatcaataactaactaccttttgcaaaggcattagttaaacagatatgtttttcttgctgttacttcgtgatgttgatgagctcagctaggcaattacttatttttagtttaaaaaaaaaacaaaaaattaagtatcatatattataaaaccatcattgcaatttatgaataataaatttaaacattgaaaatcatttccattaaaaaatctccacacgtctatcaataatttcaaaacttaaaatatttaataactaaaacatgattaaaatatacattaattaaggtgttaaaattaaaattaaaattatatatatatatatatataaatatgtatgtataacaatgttatgtgagagaataaaattgattaatctcaaatatcagtcgttaaattaaaataaaaaattaagattaaaatattttaaattcaaattaaaaatccatttatcttaaaattcttataagatttatcaaataaaaaattaaatattttaaagatttaatttaattaagatcctcaccacaactattatgattaaatgaagttttgatttgaatttaaaatattttaatcttgacattttattttaatctatgattgagattaatcattctcatccgttagattaaaataaaaattcaagattaaaacaatttaaattaaaatctcgtttaatcatacaatctttataagatttattatcatcgtcgttaccaccaacatgatgtcactgccattatcactgtcgctgcttgtgacattaaggctaacaactagtggtggtagtgatgatggcggttgacaattatgatgatagatttaagatattttagaatatcataaatcttacaaaaattttataattagatgagactttaacttaaatttaaaatattttaattttaacattttattataatttaaagaataaaaatgatcattctcatttttacataaaagaattattatcatatgatatatgtcctttatatatatataaacttaaaaaattcaccaatcacatgtataaataaatataattaaataaatataatttaccaatcacatgtataaataaatatatggataaaaaatgtaaaaaattcaactactacttatatatgattatagaaggaagtgtataaaaaaaattaaaataatatttaaaaacttttctagacgcaacctcactgaaacacatgcatcccaaatacttaattaaattatttatttatatattccatattatttaattacgacggggacagcttttattattaaaaagagacgatgtttaattgccaagcatggcaaatctaacttgaaccacttttttatacatcattatcagttatgatttcgctacacatgtagcaaataaatggtggtggtggctgaatgtattttggttttttctatttttacttaatttctaacgttctcaatgaaatccttaattaatatatccttatatatactcactaaattaaagatcatttaaaaattaaataaatttatgaatattaaaagcaactaaaaaattggaataactaaaacttgtcgatcatatatatgtagaaagattacaaatatatttaaacaaaaaattaaccaccaaatgattattctacttaggcaatgttaatcccatgccagcataacagttaactaatcctagaatgatgaaagagtaattaatgaccctagtccaatccagaggtgtaagacaaaacaaaatacaaattaaggtaaagcataaaattcaagcaataaagtttgattcatatgaagaatagcgttagctgtcaagcaaacatgcgaaacagaaaaacaaatcagaaacaaaaagaatatgaggttggacttaaatggcgaccattcctggttgttggaattcacgtgactcctcattgctcagttcaagcaaaacggattaggccattcaataattcaatttagaagaagttaattgaatcattaattcacaactgctagttgcttctactttgccaacttcatttgatcgatatagtaacgaacaagattagtagattatataacccctataatccctcccgctacatttgacgagttttgagtaaatctatctggaactgtaatggttaattaaattgatgcttaaaattaagaaaatagtaaaatattctttaaaaatgctgcaaatgtgtaggaagtctactaagagaagccttcaactatacgccaacacgggcaacaccttcaagggaattgcacatgcatgtctaaaaatttatgaaaacaatcttagccgaagaatgaagcaaattcttgttaattaagaatgcagcaagttgtacgtactccaacttaatagaacatgagaactgttttccttctaaatcaagtagtctttttcctccttacataatgtgataggatgaagaaggtcttaaagagactcaaacatttcctcttctcatacaaaaactgtagaattatctaaaataatttgaaatatatgaagaaacatatttaggcttgtctcctagctaaccatttatcagtccaatgtgatttcttatttgtcttgttaaatcatcaaaaaaccacaaggaaattaaaagtgtaatacactaaatttgaactccatcaatgactactatctcaatatcttacatgatatcatgttatgtaatatacaaactcgcattatatatatttattctaagctaaaggttttcatttattgttattgtactcttactaatcacaaaaaaaaaatatacaatttagacttttgtaaataatatactcaacataaatattgattcctttaacaacaataatcttaataaattaaatatgtattatattatttaattgtctataaaacacacaaaagcaagagtatcgtgttagttaatctaaaaaaatattgattttctgtatctactaattcttcattatttgttcataaaaaattatctaaaatataaaaaacaatcaatctcaacaaacttttttatactaattaataacattattttattaaaatgtataccaacttaagtgttaattaaaatgtgtttccaacatccgaatgcatcactcaattagcttataactaataattttgatctcagtaattcgatttcgatctaaactagaggtatgaacaaattggttcggtaaaaaaaaaattgaaccattttaacaattcagttctcaaattcaaatgtctaaatttttttagagaattggttcaaaacaaattgattttgtcttgaactaattatagaattgaatcagttatcaaacttattttcaaactactttataaaaacacaatttagaagaaaaacaattcactttactaaatttgtttagaaaaaataattcggttcaaatcgaacttattttaaaaattaattcaatttgttttaatgtaacttgcttgacaccaaatcagtttgattcaagctaggtgtaaaatcagtttatctcaaactttttgtttttcttcacaccctagatctaagtgtgtgtttgaattgatcttgataaaattgattttatatataaaattaatattaattaaaattaattttaaaatgatttagtttatgtttaaatgttttataataaaatcaaattaaaaataaaatattcagtataaaattttatatccaacacatattcctcaaagttagttcaactaggaatcaattataaattattttttaaagtaaaaccaaatatatatatatatatatttaaaatcaattataaactccaaattaaaacattcactaaaagatagagctacctcgatcatgaatttattgcaccagcacatcgacctttttcacttccgaagtggattccattccataactcttgacaggtaaaggtgatggtagcatagcagcaatttggtatgctcgggaaatgtttatgtggtttgttaggtgtaggaatgcttatttgtttcacattcattaattgcatccccaacctccgtgcatatgactgttatgtattcacctgtcacaatatttaacgcaacccatttctgccaaactaggaaaacccgcaaaaaactataggcaagaaaaagagacgacaatgccacgtatagttattacatgcagcagtgttgttgatgagtactacctcacagtactcataatctcatgcctcggtttgatcgtcaccctcaactgcctcatctccttcttcgcttggatcttcccaacctgtttccgatccgagaagaatctcgtccgaagctacggttcctgggctctggtcaccggagccaccgacggcatcggaaaagccttcgcagaccagctagcgcagagaggactcaaccttatcctcgtgagtagaagcttccagaagcttgggacagttgccggtgaaataaaagaaaaatacccagacacgcgcgtgaagattgttgagatggacttcgccggcggcgacatgtcggagggtctccggcgcgtggaggaggcgagcgagggtttggatgttggcgttttgatcaacaacgtggggatcacgtacccgagggcgatgttctttcatgaggtggaggagaaggtttggaggaacattgttagagtgaacatcgaaggaaccacgagagtaacgaaaattgttttacgtgggatgttacagaggagaaagggtgcgattgttaacattggatcgggtgcttctgtggtcgtgccttctcatcctctctttacaatctatgctgctacaaaggcgtaagctttcttaattttctttctatctaaaacccttccattttctttctttcttttatctttctaactgaaaaaaatgcttttacaaagtaagtaattaactgaaaacatgattattagcattgttcataagaatgacgtttttttcaggacaaaggtttatcagtttcctaaaaatattggctaaagaacctagttagtaagaatctttttttattatgaaaataagaacgatgaagaagcattaacttgcttcgtgttggctaattaaagtgagctgaatcaatatcccaccactaaaggacaaagctctcaaagtaaacaaggtgtaataatggtaacatcaacaaaaatgatatgtttttacatcgatcctttgtacatatatccatcttgaaaaggatttagatggagaaaaaaagaaaaaatgaataaaattatataaatactatcataagttatgtgatagtgaaatgagagataaaaaatataaaaaaataaatacaaaaagttataacctaatttttctttatcttgttatgatatttttacacttcaaattttatattaatttaaaattttcttctcttcttatttttcttctaaattcttaagtatattcatgcttcaacgagtacttacaaaaatttcagacatattctttagtactttcgtggttattatcactgatatgcgggtgactgtcgaaagttaatgagactgaactctcctttaagagagacagcaattctcacatcgtcactcaactatattttaatgagggcaatgttattcttaaatatattttttttcaaaaaaattcttttaatttaaaaagttacaaaataaaatgattgatgtaataaaaattaaaaaataattataaaaatattgtaagcataatattatattgttttggtatgatagtaatctgacattctgtattattttatatataaaaaattctaagagcttttcttttgtgaataaaaagttctaagagcttttatatatagagagagatgtgaataaacacagctaatattttttttaagaaaatgaaaatgacactattaaaaataatataatttgtaatgttatgtagatctaattaaaactcaacaaacttatttatcatacacatgataatttttttatcaaatgatagtgaagagaaatctttacagtattatttattctaaattaaaaatgttaatttttataataattgttttataagtcaaaatttaaatttaagataatttttaatcgagtaacaatataaatatacagaatatcagaatcaaaccaatattataaacataaaatcataagtcaaataaaataatatgcatatatagtgtctttattaattaacaccccaggcgagtactgaaaactaaagtgaattggacgatggaaaaatgcagttacgtggatcagttatcaagatctctgtacgtggagtatggacaatacgggatacatgtgcaatgtcaggtacttacaaatgtctactttaatttgttagactgtttttgttttttctttgttcttataacgaactgacattttataattaaggctacagactaaaggtaatgtgcaacacatattatcaagccttggatcagctagagaaaactattgtaaacttatctagatgtctaaagcagctacattataaactcgcaggaacagtgttttaacattcatagtatttttatttcatgtttaaagtcttagaaaagaatatcaactattggaaatgagtgatcaagtacagtttgcatgtgcttagtagttaattaataatatgcatgacttctgtattctgatcaatgtatgattaactctcagttttttgggtaaactttagtattcatgattaatatttaatactgatcatgaatgaaggtaccattatacgttgcaaccaatatatataatatcaagggatgagtccagtattgtgatgtaattcgtatgatgaattcatcattttctttttttgggtaaactactccatattatgattaaatatttaattctgatcacgaatgaaggtacccctgtacgttgcaacgaatatggtatcaagggtggcatgtattgagagagattctttgttcgtgccaacagctgaggcttatgcaagagctgcaattggtgaaattgggtacaaaccaaggtgcacaccttattgggctcactcaattcagtggtgttttgcaaacttaatcccagagacactacttgatacttggcgcttgtccatcggtatccgccgcaggaatcaaaagggagactgaatattaactaaggactatcatttctcactttaattttatttgtatgaattgttattataatatgttttaattttattttcaataattatatatagatatgtgatgtcatatactaatcaactgtttaatttttttttcttttactgtaaaacatggcttcgcttgtccctatggatcatgcacttaaatataaattcatgataaataaatatttttaacatacaaattatattttataatattataatacaagattatttttaattattatcagttaaaaaattattgaaattcagtttagaaataaagataaaaatgataatggaaagagataagtagttaaaaaaattaagtggttcaaataaaaataaaaggtaagtggtttgagatagttgagtagacatggcaacgggccggggcgggtgcgggtattgtattccccgtccccgcccccgcctttaaaacccgcctctgcctctgtctctattttccgttgggttttaaaattcagactcatctctgtccccgttgggtcgggttttccccgtcccgcctccgtcccacccctactattaattaaaaaaataatgtggcttttcttttgaaaaaaacggaaaaaagttgactaggtaacaaaaaaattaataacaaatccacattcaaaatatgagatcataatttaaaaattattaaagaaaatcagtcaatttaattaaaaccattatggacctacatatttaatttctcccaaaatataatatcatttaaatatatattgttccaaaattaaaataaaacacaacaaagagtagaggtccattgtagcaacaaagcttccaaaatggaattaattcagaaagttgttggtcaaggttcaacgccgtcgagaatgagaaatgaggggcagggttaggatttcgggattttattcttatatataaggctaaatttgtaatttaattatggcgggggcgggggcgaggcagatatcatcaataccaaacccgcctccgtccccgaatttttgtcgcgggacaggagctagcgggtatcaacaataacaaattcgagtttttcccgttaggtctcgttgccatgcctatagttgagaaataaattcttggagtaattattaaatcaaattaaattaagaaatatattttaaaggaataaagaattaaaaaaacattcaatatataagattaagataagacatgagactcaatcaaaataaatgttcacagataactcgtagaagcacttctatttaagaataacttctaacaatgttttacgacggccttctccttatatgatatataagtgatctataaaaatccattattttaaaaaaatactattatataacatagcttaaaatacacatgctggagaattcagcaaaaaaaaaaaaattacatgctggagttcttgtacaatgctatcaatataacgtattaattctatgctatcatatatccatcgtcccctaagcaaaatacacggtgcaataagcgattttgatcatcacccaccgtaacgatcaccacctctcaaatctcaatcattgagcaacactttaccgagaaaaaaagttcaaaataccccaaaagaaagaaagaaagagagaagaagaaaaacatcttaggagtcgtacgtaggaggagctagtaaccgggtcggattctgaggtcgttggtggtgttgacaccacgaatacgggtgggaagaaagaccagcaggggaattgaggatcaaaataaccggatattcattcaactgtttatcaagtaactgcatccatgatcaactaattcatcattgctttaatacatccccttgaaaacgggatttgtacggcaaatgcttgctccatactcctcatattctgcctttgtatgacaagcctgtacattggaacaaaaattgtaaaacttctctcgttttccattgagacttatcggaaggatttaagaaacattaagaaattatgcatactttcactaggagaacattatagcaagacaacacatcgcaacccacaacgatggcaaaccaaaagaaaaagaaaaaaactctgatgtcatatttttacattgttcaagtttcatatttcaacttaacaaacaataccagatattttgttaacatgtatgcaatcgtagattcgtttaacctggcaaagcatacaaaattcaggttatcaatgtcaaacaaagaggcatagacaaccaactacaaacgtgacattgacatgtaatccatccaccattgctttctcatggacaagaaataatctaaagatttattgtcaacaaataaaggtgcatctaaaagaggcatcgacaaccaattacaaatgtgacattgacatgcaatccatccatcactgctttctcaattctcatgcacaagaaataatctaagatttattgtcaacaaataaaagtacatctcaaacctataaatccaaacataaaaaaaactacgtacctcattgcctaaagatatgcgaagataagagggaaggataccattcaacaaattgtctcagaccaatgtgctcaagatcaaaagagagtttttttttttttttcagggtatggtacttataacttataagtcatagcaaggaagaatgttaatcattgaacaggtacccccaacccccaccccctttccaattacatggaagaacacactattagtacacaaaattagtgattataggatgcacgcattgaacctcataaccccccaaaaaatgctggaaatgcataccgtaaaaaattcaggtgttgatgcaagtactgatcctccaaaccaaactgcaaatctctggattggatggctgagtacatttacctccactggctgtgactgtaggctccaaattaatgaagtaaaaaaagttaatgcaagaccaaagcaataaatatatatagcagtacagcctgccataactatatcaaggggacaattttgttcatgcatgtgttggaccaaaagttaagctgatgttaataggaaacttgaattgtgaagaaacactttgaagtctaaagaattcacgttaagtcaaagcaagaccgagtatatgaaatgtgagttttcattggtaaaagataatgatcaagacttcatgcatctatttggtcaagaggtacccaagaaaaatgtttttagatacttgggatcaaatttgtaaaaaggtggagagaatgatgagaatgtaaatcatagaattagagcagggtggatgaaatgacgaagtgcatctgggttgttgtatgaccacaaaattctccttaagctaaaagaaaaattctatagaacaactataagacctgtaatgttatatagagctgaatgttggtcaatacatagacaacatgagcataaaataggagtagcagaaatgaggatgttaaggtggatatgtgattatacaaagatggataagataagaaatgaagatatttgacaaaaggtagcagtagtaccaatgagtgaaaagatgagagaacatagattgaggtgatttaggcacgtaataagacggcccttgaatgctctaatgagaattaaagtttgttaccaagagtttgacacaaagagaggtagaggtagaccgaaacttacctagggaaaggtagttaaactagacttaatagagtgggatatagattggcggacgatgtgtcttagaacataatagagaaaagttataaacttggtggagagttagacccgttattatctctatgttccagatggttctattttagttatttttctcttcatctcccccttcttctttccctcttctttgcttttaccctttttttttcaacctcctcgtatctatcattgggttcatctatcactgatcccaattaacttgggttaaagatgttgttgatgttgatgtattgagccataaattacataaccaaaccaatcaacaaccagcataacactgttttcaacgtaaaataattatgtgacaaaataatttatgtaattatttaatacaacataatgatgtattgatttttgattggtttaatccatacaacttgtgcaaacagatttacataagaatttctcatccatgtgtgtaagcgagggagagaatgataagtttaaagatggtttaaaggtgcctattaacttacttttatctccccatttaagcgtgcttcagacgaaaggacacgagcatccactatttttttaagatcacgttgcaacctcctgtgaaaatccttgaacatggttgtacctccagacaacacgatattctgaaataaaaaatacaaaataggcaagagataaagagatcaatcattaagaacaagtaaactaaagggcttgaaattcatatgataaaaaataaaatatcgtggctggactgatggactaatataacacttgacactaatgtactccatctgggccaacaagaaaaaacgcctcaagcttaacattgaaccttggaagatccctaattttatgattggaagtgatggttcactcaaatttaaaagcactcctggggattattaatatatacatgtcagtaaagtacttcaccttgtataatgatctccttgtgtcaattggcgcagactgaatgcatttgtctattacaactggcaaaggggtagtaaagtcactgctatatatctcaggattaaagaaagtctgcagaaatcattgggaaaacatacagatatgttaaattggctggtcctattgatataatgaccccaactgaacctatagattagctcaggaattacaccaaggcactactacagtttcatgaattattcaatagttaaaaaactcaagtggattccataatagagaaaatctaaacagtggccatagaacaaacctcagggccaagaaatcgttcataaccaatatcacatgaatatggtgcccccgtctttggtttaatacctctccaatgcttgatgtacttgcctggttctttgtcatgcttattaaattcctgagagaaattgagctaatgttatgtaggaaaactaaaaagtttaaaagatcacttgagttacatcccttgattcacaaaaagagaaaattaaagtatttattgacattagacatgcaaatggcagaggcaacaaaactattggcagaggcgcaccacaaactcctcaaataattctgtcaaagaactgagtattgaaataaagacaaccttcacaatgtcagagcaagtgtagcaatacatttccttcactttccgtgccacttcaaaagagtcttctggtggtacattttctcctctttcctgcacgaagcaatgtcaacacaacagtttgtcaatctagcttagcaaaatgcagtttgacaattggatgtggattattacaatctcagacagttcaacaaaaaaatatatagctaaatacacgaataagtttcataatcaatcatgaaataagtaaacttcacttttttatttattaactattaaaaatgtaacaaaaataccatcataagtgcatcacaccctattcatccagattagcatttacacattggtttcactagctagtgtaaatggtaatttatgatatctttcaacattaaaaagaggtttacaaaaattcacagatattcaaatatgggaacaatacaggcacaataaccttttaattttataccagaaggattacccacccgcataagctgttgaacaaaaagagtaacatcctttccagcaatgggaatcgatttgatgctactcccaataacatagccatctgcaataggtacaacatgagtagccccatctccaacatccactacaactcctgtcatttcacactaagaagaattccagatcatcctaaaaggaaaatattcttaaaataagacagatataacaagaaacaaaatatctccatagctcttatggtattgttattgtaataccccaatagaagcacaccagaatgagaaggattcaaaggttgggtaggtatgagactatacaattgaggatgacttgaaggaattaattggtactatcttaccaacaagatgcatctacttttcggtagtccatcatataggaacttcacaattaagtatgcttgacttggagcaattatgaaatagatgaccttctggaaaatttctcggaaaacgtgtgagaacaaaacacattgaaaagcctcatgttagtttgaggtgttacagttatcaaagtcaagtataattatgcagagtcagcttaacattttatatttaacataatgagaggagctgaagaattgtcctatgcactagtaataatgcaaaaccacctcaacagttcattcatattctacagtacggcttacttttggtttcaagtgaaagtatccaaaagtatcgaattgcaggggctgatgaaacatccagtgcattttgtgtttagatagctaccaaacttgttgctgctgagaccatactaaatatgcacagcattcaagattaatcatccaaatccaattctatattcaacataattgccaatctttttcgggtctaacgattaccaaccttggatgttgtgtatccagctgcaagagcaagcacagaattcacaccaatgtaaagtccaggcacattaaaagtctcaaacatgatctccccagtatactcgcgactctcaggcggagtcaatggactctcgttcaagaggaaatagtgatcctccggatcgcacctcaaataattgaaaatgcactgctgccagaagcgctccatggcatcccaattctcaacctggccatgccgaattgggtagctgagattgtaagtgctactagatcgagacttggtaagtgcttcatccccaatgaagaaatcaagatccgccataactccagcattgtgctgggccacccaattgcctttagaagagcccctcgattgattcagaaacgactcattaactgcaacaactgtcggagcaataaaacaaggctcaacgttaccagcaaaccccatcttcgtatacctgcaaagaaaacatcattttccaaattcagagtaaacccaattcaggtcaatcaacattaaagataattctagttataaaactaacaccagtggggcattcaacaaacacatggtgtccacaccacataagaaaaaaaataccacataaagctaaaagagaaagtgggtgatagaaatggatgaaaagggtacccggagccattatcgatgactacagctggacgagaagtggatgggtccatgagaaaaagcgaattagtagtggtagtgatggtgaacgctgaaggtggatctgcgactgagatccgagagcgagcgtgaggcagaggttcatggcagtaaagagcgctgtgagaagcgcaagaaggaggaggaggaagaggaagaagaaagtggtgtaggtgagagtaaagatgatggtgacgcagactttgatccaaagtgaaagaagatagtaaaagacaaatgggaatggttggtgattgttgttgctaaagccatttgaacacagcgagtggaagtggaagtgcaggtcccatttagtcgatcatcattctgttcgtttctcagagatgctttccttggcaaccaaacaacgactcttctcttctcttctctctctttcttttatttatatttaattaattataactatagtactaatgacggcaactacaattgtcgttgttggcgtgttggtatggtacgaagaaatgggggatgctttatcagactaagccgtttgatttcaagcaccggttgcagagacgcacacaacacagatatttaacttgtttcatttctttcttacacgccaacctttttctttcttgctgcctgccctagaccctagtacgatgaattcatgaacctctgttgaaaaaaactgtcggtagtttttaatttaaataagtataaattatatatatatattaaaagaaaatatttaaattataagagaagtaatagttcattcaaataaataatatatgcaaatttagatatagaattgtgttaaataattaaaaggataattttatagtttataatgattatattttgatttgaataaaattgttttttattagatatatataataaataaatgaggaaactctataaataagaccttaaacattattatatgcattctagagagaagatttatagatttttgtgagatcttttattattattgggattcatttaattatttcatagttattaaatgtgtataatatttggcacgacattataatgaagacgttggtttcccaagttatttgttcgtttccagtttaaatttcaagcctcaagtcatcggttcgaaactagcaacatccaaaatattttaatacaaattatatttaagaatattttgcgtgtaaatatagccaaaattttgctctataactttaggtggtcttcaagtggtaaacacctcttttctcaaacttgccatagtaagttttacaattattttggatatattggttataaatgaatatgttttgacgtagtcttttgaacatcaacaacacctttaatctaagttaattagagttggtggtagatgaattcaaagatagatcgaaaatgaaacaaaaagagaaaaagagaggagaagaaaaaaatagaaataagaaaagaactaacacaaggaaataattgaatatataattaataatggatttaatcatctaccaaacttacaatttttctctatttcgtcctaaaatataccgtctctgtcaatctatatcttactccattaggtcttgtttaactaccttttctcatataagtttagttttacctttatttatctgtatgtcgagctcttgataacaaatttttgtttttactgaagcattcattgagcatctcataacgtgtctaaattatctcaatttttatatagtttgttaattgtattttttattttaaatttttaattagagaattattttgaatttatgtgggaagagatgagggtttttcttaaattaggaattaatattattttaagattttgagtttattagtcactaaattttttttcggatttctgtttttaatccctaatttaaacttcgcatcaactaattgtaattgcatcctctaaagtgttgatttaatcccatgttaatcagtgatatggttttaaatagagcctataaaacttgcatagtcctaatttgaagggtcatttttttaagttgaattaggtctttaaacccaatctgcatttgttacactctagacaagtagtctttgagaaaaagtgttagaatgtcaccttaattgcactcatttctaatccaccttagttgtgacctcttcattaactaccttaattaaaacagtggtttagttccacacagctagaaatatagtttaaagagattgaacttataaaacttggtcgatcttcgtcataaaagttgattttatgaggctgaattaacttctaaattgaaattctaagaattttattcatacttcataatttattatgttcgttctgtatataaattatgatttttgaaaccgaacaaaacaaaactgagtaaaaatggaaaacaagtgaggattagagttaaaaaaaaaaaaacatttctctttctctttcccgttgcaaagcccagcaggtgcaaggcaacaattaatcaacctttcaaaactgcatggagcttatttgtagattcaacaacagaaagaaagtacaaacttgaactcaatcaatcagatctaaaaatcgcaaaagggaaggtacccacaacagttgcaacaaaaaagaaaccactggcttgcttgggaatggaaaataataaaaagaaagcggatatagcattagatacaagttgcatgaaaactattagtatgatgataattgatatcccacagcatttaagccccttcccaattttaaacttcacaaagatcaaatcactgtgatctcatcctgttgagctggttgagagcaggctgcaagatgttgtaaagcacccaagcaatagccggcgtaaccacaaacagaagaagctgtcccctgttgtcgctcgcagcagcagcagcttcagaagccgccgccgatgcatgcggcgcagccaccaacccagccaagccgccaagccccaagccaatgatcacgcctttggtgctgcgcatgcggttcagctggttcagcgccggctgcagaatgttgaacagaacccaccctattgctgggattatgggcagcaacagtgccagtcctcggttgtcgccttctgctatgtcggctatttgttgaacagcgaaagcggcgtcgcaggttccgagggttgtgaataatgcccctgccattgctgtcgcagtggaaagtttagtgctttcgggtgaggctatgaggccctttggaaggttgatctgaagggagggttttgatggtgcgagcttcgtcggattggggaactttaggttgacgcatttggcgttgatcatggccatcgctgatattgttgatgccattggtgagaacagagaagaaggtagtgagtgatggcagtggcagagatggggaacgtggctctgattgtgggaatagcaatttagcgtttggaaaaagccacgttggagaaacgaggtccaatgggattgtggtttctagattcttctcttatgcgaattgggggatatatcagatttcgacctcatatttcttgcgtttcttatcatcacttgcgctgctcaaatgccaatattttcttgtttttgttcgtgacctgtttgtcccaaacacgcgttttacagtgatgcaacgacacgtcgtttataggaaaaatgaaaatgtttgttgtacttttaagatgaaagcatctacaatgagaatgtttttttttttttcgtgttccttagagtatacatatattaagaggaaaggttatactgtaaattcataaattatcaatgcacatcaaactcagggtatccttcacagatttaatatgtgttatcaattaaattgaattcattgagttgacaaatctttatttaattatcaatattaactaggttgcagcgataaaaaaaaaaaaaaaacaagtacagataaaaacaaaaagataaagagtttaaggctatgtttgggagagggagttaggaggggaggggagggaaaggaagggtttagctggagtaatctccttgtttgtgagttataatttttaagggaaaggatttggggatttttaaaattcctccaaaaccctccaatgcttagaaattataatcccccctatttggggggtttttagaaggaaaattaattaaaattactattctacacatcaatgttttgtgatgaataattattagtgagtttgatgctaattaaaatttatttatcatacactttaaaattactattaaaattaattatataaaagtatctcattactctcaatttctctcccttcataaatttttaactcccaaacaaggaggaaggaacttccctcattttccttcctttccttcccctcccttctccttgaatctctttccttcccctcctctcctaactcccaaacatagcctaagagagaagtaaaaaaaaaaattataatactggccaaccaacacgtgacatataagttttaatatatattgagataacttttacttatactaaaaaggatctcttctctcgcctgtaaatttgttctcttccctcctcttttaattttcctgtgtttacaattaaaaagggttttaaatagactttttttgtagcctatattatgcgatgagacgaataagaggagagtgttaaattttattcagcaaacaatttgggatgactaaatgtaacaaaaggaaattgcaactgatgtacttggaatgaggtggtgcccaagtacacgattttaagtacctttcatatgaatcagagtattgttgagaaaatgaaaaattcaatggctaaatatttagtttagttccaaaaaatgggaggttcacattttagtttcttaaaaaaaattatcaaataaccctaccattgagtttagtgtgttaatgttaatgtttttatttatgtgacatattttgttcacatgtaaatgataagtgacagataatagttggtaggtgtcaattgtcatattttaaaaaattgactttttaatttagtctctaaatttaaatatttattatcatttttgtctttaaacttaattagttattgatattttttagtttctgaacttaattactaactctcatttaagtccttaaattttttttcaaattttgatttaactttcatatgaaattatttgcatatatatcaccatatcttctcactttcattctttatccttatggttttcaccttcctcttatgagattcagcaaattatattataactatgaaacttatttatgagcaattacataggaatagttaacagttaaattcaagataccattaacaagattctagaagatttaaaactcaatcttctacccaaaccaagcttctaaaacttatatgccattaaatgtgcagaatgttagaataatcatttttttcgaagcaaaaagaataagttaaataattaatctattttatgaaataacactaatcatgaaaaaaataatttaaaaacttaagaatcatagaagaaagaaaaatgaatgtgttataagtatttcctattttttttcattctttgtgatttttacatcattgttcaagggtctctgatattaggggtgtgtgaacccatgaccctctagtggcatgcaaagcagtgatgatttccattgttttatgacatttgaaaagttgtggaggaaacttttttagcatgagggaggtgtaagttgaaggaaggggtgacacaagatccatgtgattgttagcgaggataatttctaatctttggtagacctcttagtagtagtcgaatctagaaaaaattatgatcatctatcaaagaagaaaaaaggagtaactctgcatcaatggaatctcatcatctatatataatgaattggtgtggtatatgcaaatcacaacatatgaattgtaaaaactagtattttaatcaagactagaactcaaggatgataaccgttaatgttattatcatttaaaataagaattagtttcgatttttatgtgtaaaaatagtagaaaaataaaaaaaaaatattacttattaaaagttaaatatttaaaaattacaaatgaaggaaaaataaaaggattaagcaaagcagaaaatgcaaacaacgaaagttgttagtttgattaactactactgcaagttatatatagacacaaaataatttgaatgtaatagttatttgagagtgttaaagaagatatttgaaaaaaaataattgaataaaatgtaattttttaaagaagctagtcaatgtttttttaaatgtttcaattgaataaatatcaagcttgtcatgcagttgatggaggtgaaagtcaatatgaagtgcgaaaaaaaagttgaaaaatatgagtgataataaatgaaagtagggatatgatgatgattaagttaataacttatannnnnnnnnnnnnnnnnnnnnnnnnnnnnnnnnnnnnnnnnnnnnnnnnnnnnnnnnnnnnnnnnnnnnnnnnnnnnnnnnnnnnnnnnnnnnnnnnnnnnnnnnnnnnnnnnnnnnnnnnnnnnnnnnnnnnnnnnnnnnnnnnnnnnnnnnnnnnnnnnnnnnnnnnnnnnnnnnnnnnnnnnnnnnnnnnnnnnnnnnnnnnnnnnnnnnnnnnnnnnnnnnnnnnnnnnnnnnnnnnnnnnnnnnnnnnnnnnnnnnnnnnnnnnnnnnnnnnnnnnnnnnnnnnnnnnnnnnnnnnnnnnnnnnnnnnnnnnnnnnnnnnnnnnnnnnnnnnnnnnnnnnnnnnnnnnnnnnnnnnnnnnnnnnnnnnnnnnnnnnnnnnnnnnnnnnnnnnnnnnnnnnnnnnnnnnnnnnnnaaataaaataaaaaatttattaaagtttctgtaaaaatttcattgtaaaaaaatatggcagatcaacagagtactttatttcctacaaaggattcttttatgaattacatatatctttgatttcataagaaacaattacattgaagtcaaatagaatcgtatattttcaaaagaatactattaaaaaaagtagaatcattatgaataataattttttaggatttaacttagaaattattaattaaattagaataactttacaaatttatccacacactttcgtatgaatgaaggaaaattctgttatttaatacatggagggaagtaaaattaaattttgtagttattaatccnnnnnnnnnnnnnatagaatattaatttttaaatgaatactgcattattttttattttattagtttttctatttctatttaataatatttaaatatgataattataaaatagtaatatcttaaaaaatgtataatttcgataaaattaatttttcaaattcatattttaacacacctacttatgtcttatataaatttacaatttaatatatatatatatatatatatatatatatataacacgaaaggttgaattgtataatagtaaatgtaatgacccgtatgtatccggctcattaacatttatttatggtcttaagcgcaacaattaattattattaatcaatttggaagcgataaacaaagtgacgtcatcacaataacatttttatattatgtatcaaaataatggcggtaaaaaataaggtatcatataccctatcctctttacatacatcgatctctcagatatacaaaaaacacactaactatgcatcctcccctcaggggtacaaaatacaagcataaccaacagaaaagagtcatcatgttctcaaaatatatgcctaaggtttccacagaaccataccagagctcgctgagcatcacctgtaaaacataatccccacacacggggtgagatgcaaatctcagtaaaatcaggatttttggaggtttttccttcccctagttcacttccatgacacatagtattaaaattgacatatcacacaacaagccatcacgactctcatgaagcatattacatgtatatcacaacacaggtgtaacaatatatatacaaatatataacattgcctaagaaagattattcactgaacgacacattctctcaggaacttttcgcatcattatctgagaaagatcatctacttaagggcacattctctcaggactctgcacacattgcctgaggaagatcatccactgaaggacacattccctcaggacttcataccaatgcctgagaaagatcatccactgaaggacacattctctcatgacttacttggacatgtatgacacttccaagggaagatcatccacttaaggacacatttctaaaggaagtccataagtaatctattctactggtcagagaatctcatcaatcacataacataccatcacagtgtacatcatatacatgttctcaataaaagcagtaacacacaatttcaatacacatgcatcatgacatacaataaccatcactccctcggagtatggtggaacacagtcaataggaaacactcccaagaagaaagaacttacctgctctcagcgctatatcggctctcttggcttcatgatcacaaccaccagtagtatccgtatcacgccctacatgaaggcatacaaacaatcaataacggttctcaaccattagaatgaaaagaaacattattcttttccatttaaacctcttagtcctctaccttaaggttatcagaactaaccacctaaaagtcaactcacataccctaagcaggatctatctcggcctaaccaagtcactagagtctcccaaagactctgcatcaaccaattcagagaattcaacactatacaggccaaaacccaaggattaacaatatggctaaaacggttacttcaacacaactttaccgtttatatagccccttgagcacatattgtacaaacatcagggctcatgcatgtcatacaatcaccaatttaactaacattcttcctacacatacatttctcagagcaaaattctaaagtccataaaatcaatattttaaagttaaatcttcattacaacaacctcctaagcatacttttataaagaactcaagcttaattgcaactctaactccaatgagatactattcacctcaagaacaaattcttaaataattggtagaatttgtgtttcctacctctaaatcgacaaggaaggctagtggacaatttctccactagagaaaatgatatctctgtttgatggtttttaggaaaaagtgatgaaggattctagctcataggatgatttcctacaagtttcatgttgggtgtgaagtgttttggtcaatggttgagtggtctggagcttctcaagctctttaatggaggaaaacgtagtggggaggaagaagataggtttttggtccccaaaaacgcgtgaaatgaccttatatagtggtctagatcgtgccctagcgctgatcgtgctactctggcgctattcacaccaagttccagagaaaaacatgctttctggagtacttctgacggtaaccgtgccaacttccaatatatctgactctaatcacgtcactctggtactaatggtgccagattttttttttttaaactttagttattataataaattaaaaaaaacaagaattaaatatgtttgtataagataagataaaattctgtgtattctatttcctgttatatgataaaatatgtataagataagatgataatagaatcataagataagataaaatatgtattcaatttttcaaattacaatgatcaacttaaaattacaaacttccattaaatcaattttcaaattcatatttcaacaaactacttatgtcttatataaatttcaaatttaatatatatatatatataacgaaaagttaaattgtataacagtaaataaaaaaataagaattaaatatatttgtataagataagataaaattttatgtattttatttactgttataagataaaatatgtataagataagataataatagaattataagataagttaagataaaatatatattcaaattttcaaattacaatgatcaatttaaaattacaaacttcgattaaatcaatttctcaaattcatattttaatacacctatttatgtctcatataaatttaaaatttaatatatatatatatatatatataaccaaaagttgaattgtataacagtaaatagaaaataagaattaaatatgtgtataagataagataaaatatatgtattctatttactgttatatgataaaatatgtaagataagataataattaaattataagataaattaagatataatatgtattcaaattttcaaattacaatgatcaatttaaaatttagaggaaaaaatatatttaatttgagcaattaaaaatatatttaaaataaaaattcaaataataatgtacaatgtggtaggattttcataataataattcgaaccaagtcataataactcccttatttgcaggtggtttggagagggtggttgatgtgttgccaacctaattaaaatttttgcaaccatcttatactcttcctccatgtgtttattgatttaaaaaaaaatcataacagcaaatttgagtttttcagttttcaaattgttttattgttggtttgatcgatttcgatttatttggatctgtttgatagtttaaaagaatttagtttaattgtaagtaatgctatttatcaaagacatacttattaaacttaaaattaaaactaacatttcgaattattttgaatacctgaatacatatcttatctaatatataattataaataatctcttgtcaaatatgaaagagaagagatatcatcctatttgaaaaaaaattattcattcaaccacacactcccaaaagctatataaaactctcaccgctacgtcatttcattatatgcacactttcattaaaataataacttggcaaactctctccaggtaaatactcagtttgaggaatggtggtttgatccctctcatatgtaatcacggcttccacgtgcctgcctatgttttgaggagatcgcaacgaatgccattcaaccaaaactcttttatcatgtcttattttccccttatcctgattcttttttcttttttcaatttttttgctttaccattttttatagttgcgtatccatccaacgtgatctgggaaagtcgaaaaaaggatttttggtttctgtatgaaagagggtattttgtaatttgattcattttgattgggatgatcaacctttggtggtggcgatttcttcaactttgatcaggaaattctttcctttttttttgtgtgtgtgattgtagaatatcccatcatctgggaataatgtacttttaagttttcttctttggattccttcaccttatttccatcctcaattttcttcatatggttcacccttaatcaataaaatgtctgctttagattttttttagtttggtatttatgaaaagtaaaatctttttgcgatgatcctcagtttcatcactaaatatttgcctttgtctttgatttataatgccattgtaaatggatacagaaaatcatgtaattaacctgtgtttaaaaaaaaacaaaaaactatgtcacatattcttgaggtactaacttgtagagtttcagatgctttagttggagaaacagaaattaatttattaatgcagtaatccgtttgcacatattttcataattaccagaagtgctagatcctctcttctgctctgtgtgggcactgtataagattcgcagtgccaatggatgccactaccggtgaaaccccaactatccaatatcataacatccctgatcagccagctactaccattgttgccacccaattgccaacatttcaacggcagcaacgccattgcttcggggattctagtccaggagagtttcccttgtctgcgaacccctccattgtccttcatgtccttacaacatgtaacttgtatcctcaagaccttgctaaacttgaggcaagtgctgtgcttgtatccatttcagctcttaagttgttaattgaaacttgtactaattctaatactgctggtttcatttctgatgtggtgttttgcaggcaacatgctcctttttcaagcagccggcaaactttgttcctgatttcaacttgtccttgtcagagcttgctgcattggacatgtgccagaagaaagccatttttaatccaatgacaacagaacaacggcaacatttgaagcaaagatgtggcggttcttggaaattggttctgaggtttttgcttgctggagaagcatgtggtagaagggagaaatcacaagtaatagcaggccccggtcatagcattgctgtgacatcaaaaggggttgcttattcatttgggtccaatagttcaggacaacttgggcatggcactactgaagatgtatggcaacctcggccaatcaggttggaactttagttaatacattatcatactaatttaagtggaaagtgaactagttgaatttaagttaacataactcaattacgctgcagagctttgcaaggaatccgaattatacaagccactgctgcgactgggaggacaatgttgattagtgattctgggcaggtttatgcctttggaaaacaatcttttggtgaagctgagtatggaaatcaagtatctaaaatagttacaactccacagttagttgaatctatgaaaaatatatttgttgtgcaagctgcaattggaaactatttcacagccgtattgtcaagagaaggaagggtatatacattttcttggggtggtgatggcaaactctgtcaccaaactgatccagatgatttggaaccccatcctttattaggagctctggaacacataccagtagtgcaaatagctgctggattctgttacctgctttgtttggcttgtcaaccaagtggaatgtgagctacaacttaatcttcttatctcaactttttcaattctttttccacaataattgaattgggagttatatcatatgatgcaaattaggcacttttacatacttcatttttttgtatgcatattaatgtttgtagagtgaaaagagaacttttttgtattatgatttattccttgattggcatcatatatatcttccattctgttttcttcaattacctacatgtatttgcatcataagtccacggcttcaagatttatgaaagtttttaagcattgctgattttttattcttaaataaactagtatttacattcgatttcatttttgttgtaataactatctatacgtttattgattacgtgatccttctctgaaatcttaataggtcagtgtactcagttgggtgtggtatgggtgggaagctcggacatggcacaaaaacggatgagaagtatcctcgtttgattgaacaattccagttgttaaaccttcagcccatggtgattgctgctggttcttggcatgcagctgtggtggggcaggatggccgtgtttgcacatggggttggggccgttatggctgcttgggtcatggaaataaagaatgtgaatcagtacctaaggtggtggaagagctgaaaaatgtcaaagcagttcatgttgctacaggagattacactacttttgtagtgtctgatagcggtgatgtgtattcatttggctgtggagaaactggcagacttggccatgaccctgaaaatcctgagcaggtctacttgcttatgcctctccttgtttgatttgtgaattgcttgtttggtttggttcaaaggacacgtccttccgctgattttttaacaattatgatatgatgaactggttattgattactactttacaataattggaactttcagaggagttccaaactgaaccagtttcagaatgaagcttctagttgaagcatagtgaaccatagatgacatttcttgtaaatgccttagagacagggcacaagtagcacaaacctaattttatattggtgactctagtgcattcattctattaaggttaatctttccatgtcaattattagttagatacttttggagacaaaattgttcattcagaaaatcctaataaaaatgaagttaatcaacaatatcatgtatgtacttgtgcaggaagccatgcatacaatgtgtgtgttaactccaaagctagtcacttcgatgaaacagaactatgaacgggtggtacaggttagtacgaccaattccatatggaatgctcatacacttgccctaactgaatcagggaagctatatgcctttggggctggggacaaaggacaactaggtgtagagattgatgctgcctaccacactggaagaggaaagccaaagcgggttgatattgatctttgttaactatgtgccggtgtatgccaattatttacaccatgtcatcctttaatttatgcttaccatgcatagcatttagtgttttaatcctttgttgattatgtaaatagaaccaaagaatgcatcgataaggtccaagcttggcaacatataacaagagcttcactatttgtgcggttgttgatatcaacgtagacttcaaatagatcatcatagttgaaaatggtgaaggttcatatgcagtttagttgtcttgacttttgaatttggttatcctaggatcatttgcttagataaatttggtgaattttacagaattgtcattcactcgatatcaccacggctcgatttagtaaacttttattaaagtcgaagaggagcacttttcctttatttaaaaacaatggagatgtttaaaattgtgcatattaaaagaagaaaaaattacgagtcacattatgaagttgtgaaaaaataggtaattgagcatgattaagaaaagagattagaattgcgaagaatttatttgattttatactaggaactagaaaggtttatgatagaagtcgcttatattttatgggggctgatggaaatgtattaaagcaaagaaagatttgcatataatttttattgatttgaaatatattattaagtgtctaaggaagtattgtgaaagattttaagaaaggtgttattgtgaggtatatatatctaagctacacaagacatgtatatatgatagggttattattaatgtgagaacttttagaggcaagactaaggacttttctagaaggataaaattacattagacctcacaannnnnnnnnnnnnnnnnnnnnnnnnnnnnnnnnnnnnnnnnnnnnnnnnnnnnnnnnnnnnnnnnnnnnnnnnnnnnnnnnnnnnnnnnnnnnnnnnnnnnnnnnnnnnnnnaaaaatgttaatagtagtgaactaaacttaatgatgtgaataatttgatgcattttttttaattttagaaactaaaatatcaaaaatctcattcttttaggaattaaaattaatttatattcaatgaatcatacttattatgctagattttaaaaccatggactgcacaagttcatataaataattattttatatttttattcatcattataaaaataaatgtacataaataaaatttaattcgtaatactatattaaatataatcatatcaaaattaagaaaaccgattgattatatttttaattgaacatatgttgcatactcaaaaataaatttatggtcttgtaaaatgattaattatatttgtaagatagagaatatttattttaattaattatatttaatnnnnnnnnnnaaattagttctaatattttaaggactaatttgtgtagacatatacattgaaaataagtatattatttaaaataattattggaacatttttatttaaatcaccaaatataaagaaaatatgaacatcaaatttattacaatttttttccaaatgtgttcatataattatgctaataaagaaaactaaatttttttaacttatttaaaattaatttaaaaaatattgatgaatcgtcgttatttgaaagaatttcaaataataccgaataaagttatcattgtgcaggatttatttgtagatattaagcaaaaaaaagtttttttaatattaatatcagagtttggagacgatactaagttttttgagtgtgtgattggaaaaaggtaattttaaattaaaaattaattaataannnnnnnnnnaacatattatatctataaatattttttgattcaaatcattcatttctataatattattttcatcttaaaaagaatttaatcagaatgaacaaataatataactattttttcagagttatttaattataaattattttatatagtaaggatgtttgactttttatattttattcatttacaaggtaaaaagtcttttcattttcatgttgaaagtgtattgaaattaaattctttttaaaatcttatctctttaattaattaatcctcgtcgtctaacaacaaaataaaaatattgattatttttatttgtagaattgacttaaaattcaaaagatatttatacaccccagaaaaaaaaacatgctaatttatgaacggccagcaaggatcgatgtcccctataatattctttgccattgttgcaacttgcaatgtcacttgaaagggaataaagatttatttggcacaccataaatatagaacaaccttaacaaacaaacaaatccaacaacgttgttgtgttgtttccctcttccatgcagagatcgatcatcacattcccatatatagtatatatattccttaccttaaatagcaaaaaaccgtaaccaacggcttccctcacacattaatagcaaacgtaccctataatatatgaaccctctccttacgacctttccgcaaccacaatatattccttgcattgcagagtttctctaatatttccccttccttagagaaaatctgcaaaacaaatcaacaaattaattaattatttttcttaaaatatggcacgtgcacgccgttttgtggttcttgccgtggtgatgttcgccatcattggcttggcctgtgctaagaatccagcaccagcaccagaggcctctgccgatgactatgaggacgatgattactccatcggagccctatccagtgaagcggcttctgctcccaacagcgtcgtggctgcacccattggtgggcccgtgcctcccggtgctttcgacaatgctaagggtggttctccttccagcgccgctgcctcttcctccctcggtcacctctccgccgtcgccggagctgcctctgctgctcttgccggcttcttctacttctgagttctcatcatcgccgctccgaaggttgcatgcaatcatgcaaagatagtgcatgcaaatatataagtgtatttaagtatattgtaattcaatatacagaagagttaatattaaaatgttatttcaccgaggtggcaagcacgcaagatgtgagattatttcaacttataaattgaaacttttcaatttaaatattaactattcaattacattaaatatttgaaaagaattttttcagtcatacacgggcttatctagcttgaaaaggatcaactaaaagtctaaaatatatgtgatgtaaaaaaatatattaaaatgttatcgaaagatttataattatttcttttgataaagaagacccgggaaataacctagattagttatgccaacctatcactgtatacttgatttgttatatatcacttatcagttattaattattgaagttcacctgtaatgaatgtttaaactttattataaagcttcataggcaagataaacaaaattgtctaaaattgagatagtttagggtttagagttattttatgaattataataacacgtgattattttatgactttcaataagatttagggtttagagttatttctcaattattaaaatgttatccaaaggtttagttaatttttcaaatgcatctcagattattaacaaaaagggcatctctattttttctcaaaataaaagaatatgtataaatataatgttataaaatgaaaattttattgcgttgtaaagagacattgaggctccctgacagatttctagaaaatattatcatgaagtatttgatttaactgattttgataaataatttagtggtcttttgaggaaaacaaattcaaaatgattattttttttataatattctcatcgatgagaaagaactatacgaacaacttcaaacttctttttattttagatatcattgtacacacatgaattaaatattccaaggagaagaacacaccttacatatcaagacatttgaggtcaatttctattaaaatcatagattcgtatgaaaaagttagatgaatttttaaaaaaatgcatgataattttgattaatttgttttaatcatctattattattataaatacctattaattaagatatttattcgatactgacaaggaattattattgctgtaaaaaaaagaattattatttgaattgaaatgggaatcatttttaccggcaacaaaaagggtaaaagaatagcaaattcaaatggctaggccttcagccactttcaccaacgggtcaatgtgctaccagaaagaaaaatagctattattatattataaatgttgggagaatgatttcaaattccaatgtggcaaaagaattatttctggctttgataataagtaaacaaaatacaattatacattatgtaaccaaaaatgcaaaaatatatgaatcacgatttagcgtaaacgtaaatctaacctgcactgctgcttattacaattcaatcaaaatgaatttaacttactgcctagaaaagtacttcatggtattatcagtcccatcaatgaacgacaaaaaatgcagaacttcatcaaactctaagctgaacctcaaaagtagcaattcagctcaaccagctttgtcaaagatcaaattctatcaaaccattaagtaccgtctggatctgctggcaactgtattaaccttgtgaaactgacggccaagtgatggaataaaaacaaacgcatattttcacttaatacacatattttacactcacttctgccaccctgaatataggtgggaagaaagcccaggaagtgaattgaggataacgataaccagctgtttcattcaacagtcttaccaaataactgcatcgataatcaactaatatgttgttgatttaatacattcccttgaaaacaggatttgtccggcaaatgcttgctccatactcctcatattctgcctttgtatgacaagcctgcacgttggaccagaaattgtaaaacttgcatcgagatttattggaaggattaaaagaagcattcagaaattatcgacactcccaaggagaatgacattatcacaagaaaacacattgcagtccacagggatgaaaaaataaaaaaactcggtcatattttgcactggtcaagttctatatttctaaacttggcaaacaataccatttattcaatcataccgtaaaaaattcaggtgttgacgcaagcactgatcctccaaaccaaactgcaaatctctggattggattgctgagtacatttacctccactggctgcgactgtaggttccaaacataaaaaagtaaataccaggccaaagcaataaatatatagcagtctgaccttccaaaatacaattaacaaccaacacatcgctaatttcaatggaaaataattacatgacaaggatttatgtaattatttaatacaacataatgatgtattggttgttgattggtttagtccatacaactagtgcaagcaaggtttatataaattataaagaatttagtatctgtctgtgtgtgagaggaagagaatcatctatgtaaatatgatctaaaggtatctattaactcttacttttatctccccattcaaacgtgcttcagataaaaggacacgagcatccactattttttttagatcacgttgcaacctcctgtgaaaatccttgaacatggttgaacctccagacaacactacattctgaagtaaaaaagacaaaataggaaagaggtgaagaattcaatcattaagaacatgtaaactaaaggacttgaaatttatatgatcagaaattaaatatcatggctgggattgtggacttataaatataacatttgacactattgtattccatctggccaacaacaaaaaatgccccaagcttaacattgagcctaagaaaatcactaattttatattaaaaattggttaactaaaatttaaaagcactcttggagcttatttatatacacatcaataagtaaaggtacttcaccttgtataatgacctccttgtgtcaattggcgcagactgaatgcacttgtctattacaactggcaaaggggtggtaaagtcactgccatatatctcgggattaaagaaaatctgcagaaatcatagggaaagcatacagatatattaatatgactgatcctgttaatataatgacccaaactgaacccatggattagctccacaattagaccaaggcactactgtattttcattaattcttcagtagtttagggaacaagctcaagtggaaccaatagctatacatagataagcgctatgaagactcttagagatggagactacttgatcagttcatcccagattcaaaccccaaccagtctacaatgcttgtacttaagcctcccttgccccttcccacgctagttcttcggcctcttttatttttttaccacttttctgtataacccccctctgttaagctggatattaatgataggaaatcaggatctaatcgagtatatatttaattaattcattagttcatgagataggttcaggtactcacaaaggaaaaatcatactaaaaataggtataaaacaagtagccatagaacaatctggaggccccctaagagagattcagctatccataatagagaaaatataaagagcagccatagaacaaacctcagggccaagaaatcgttcatagccaatatcacaggaatacggtgcccccgtctttggtttaatgcctctccagtgcttgatatacttggctggctctttgtcatgcttattaaattcctgagagaaaatgagtcattgttatgtaggaaaactaacaagttcaaaagataactttatttacatcccttgattcaaaaaaaagaaaagcaaattaaagtagtgagaatttattgacactcgacatgctaatggcagaggcaacaaaactattggcagagaaattcgacaaactcctcaaatgattctgtcaaagaattaaagtattgaactaaagaccaccttcacaatgtcagagcaggtgtagcaatacatttccttcactttccgtgccacttcaaaagagtcttctggtggtacattctctcctctttcctgcacaaagcgatgtcaacacaagacagttcatgaatctgactttagcaaaatgcagattgacaattggatatggattattacaatctcagtcagttcaacaaaaatttatagccgaagacacaaataagtttcatactcaatcatgaaattaaataagtaaatttcacttctatttattaactacaaaaaatgtaacaataatactatcatttttttttttgatcggcacaataatactatcataagtgcatcacacactgttcatccatgattagcatttatacatgattgatttcactagctatgtaaatggtagtttgtgagatccttcaacattaacaagaagaggtttacagaaattttacagatattcaaatatgagaacaataacagcacaataaacttttaaatttataccacaaggatttcctacccgcataagctgctgcacaaaaagagtaatatcctttccagaaataggaatcgacttgatgctactaccaataacatagccgtctgcaacgggtacaacatgagcagccccatctccaacatccactacaactcctgtcatctcgcactacgaagaatttcagatcagccataaatgaaaatattcttaaaataaaaatagatataataagaaacaaatatcttgatagctcctatggtactgttatcaagttcaagtaaaattatgcataaccaacttcatattctagattttatattcaacataatcgggggagctgataaattatcatatgcgcatgtaataatgcaaaacaaccacaactgttcatattctacagtattgttcactcttggtttcaagtgaaatcatccaaatgtgtcaaattgcaggggctgatgaaacatcctgtgcattttgtgtttagataactaccaaatgtgttgctgctgagatcgtattaaatatgtaaagcactcaagataatcatccaaatccaattctatattcaacataattcccaaaatcaaatttcgagtgtagctgtgtaccaattaccaaccttagatgttgtgtaaccagctgcaagagcaagcacagaattcacaccaatgtaaagtccaggtacgttaaaagtctcaaacatgatttccccagtatactcgcgactctcaggcgaagtcaatggactctccgtcaagagaaaatagtgatcctctggatcacacctcaaatagttgaatatgcactgctgccagaagcgctccatggcatcccaattctcaacctggccatgctgaattgggtagctgagattataagtgctgctagatcgagatttggagagtgcctcatccccaatgaagaaatcaagatctgccattacgccagcattgtgctgggcaacccaattgcctttagaggagtttctcgattgattaagaaaagactcgttaattgcaaccactgtcggaacattaaaacatggctcaacattaccagcaaaccccattttagtatacctgcaaaaaaaaaaaaaaaaaatcatttccaaattcaggaattcgggtcaatgaatattacagacaattctagtcctaaaactaagaaaactgcattggagcatttcaacaaacacatggtgtccacatattgacagaaaaaatagcataatgcatagaagggagattgggtgatagaaatggaggaaaatggtacccagagccattatcgatgactacagctggacgagaagtagagggatccatgagaaagattgaaaaggtggtgaacgttgaaggtggatctgcgactgagatccgagagtgagcgtgaagcagaggatcatggtcgtgaaaagcggaacaaggaagaaggtgtaagtgatggtgacagaggctttgctcccaagtgaaagaaggaaatagacaaattgaaatggttggtgattgctacatccatctcaactgaaaggtgcaggtcccattaactcgatcatcattctgttcgtttccaaaacatgctttaaacaactactttccttctctctctcctagactctcttgttttcttttcagctagatgatattttggtataatcacaatttagttctttcaaaaaaaaaaaaatcaattattaaatgtgtataaattatgataattacataatgtgtaatgataaattaatatttaatatttaattagttttaaaatatatattttattattaaattaatacttacatattataataatataataaaataatctcataaatttaataatagaatataattatcttattatttacggattcataatttttattttttaaaaaactaaattatgactgatttatcatttatatattcagcaataaaaatgatgaatcagtatttcttttctgttttttttatttttatcattttaaattttaattcattaatttttgggttgcctctgaaatccaacaataatatggatgcattgcacggcatgacggcaaattcatttttcgttgggaccaacaaatggggttacttgatcgatttgaaggacttgttgcgggggcccacctaaaacaaatattctaagtgctttgtaactttttttttgtttcctggtactttgacacgaacctccatcaagaaaaaaaaaaaaccgtcggtagtttttaatttaaataaactttcaaaaatataaattaaaagaaaatatcttaatcttaaaatttttattcctgttatcgaaaataaaagttttattcctgtcctatattataaatttaaatatttgctttaaaaaatgagactactgttcttttttttttcctgtcatttaattcacttttatattttcttttatcattatatagtagtgaatgttttagttttttaataaataatatatccattgacaattttcttcattatcatctaaagacaaatcattctattcactattaaaataattatcttaaaagttatattaaaaattatttctaatttatttacattttttaaaagaattacactaaaaattatttaacgtacataaaattttattgcaagatttaataacttttgtttatttttctatcatcatcatctttattattattattattattaaagtaaattacactctattccctttgttttgtccaaatttcactcgaaagtcctcctttttttgcaacttataaaatcccccttaatttttttagctcacattccattcagaccctccgtcctaaacaccatttaataatttaacagaaattagacacatattggtcatataacttttaataaaattttatgtctaaaatactctcatattcttcctcttaacctcaaaatattttaagacttttgcttctttttgttttctctgtaattgacaacattgcatatatcacttggttcgtctggttggttcgtaaagtgaatcgaaatatccacattgcctaattcaggacctatgtatttagttcatccattgtgttccgttgatctcaaacatcagcactattttaatcaacaataagaaacaaatgtttttccgttcattcattgtatttcataacatcaacactattttaattaacaataataaacatatgattttaaaaatcataagtggtctcaaattggtctcccattgaaactccattcagaaataggtaataataaacactttaagtacctagcaattattctcctgatcgattactacaatttaagactttaagtacctagcaagggaagcaataataattacaaccagagtattttatatgccctaagtgtgatatagacctagtgcagcgaacaagtgtcagggtatcacactatcaccaccacaataaaatatttcacttgtgcagcgaaagagtatacaagtgtttagagtatcacactgtcaataggtaattgcaatatacaatgaaacaaacaagtgttggagtatcacactatcactaccacaataaaatatttcacttgtgcagcgaaagagtaaacattctcagcactaaaatacacatgcaatatagacatcagacatccattatattccacctttgcactaggtagttgccatacactagacaacgagagaagagtatcgcctctatcactgatcgctagtaaagggaaagagagaaatattctatggcaaaatgctaatagaacctgtccatagaaatcaacctatcgtcttatttttacttgtaccacagaaactaggaatatccataacaaatacatgattccatccaataggtaaaatctacataaaaaaaattacttactgcatacgtgatttaaatgtagttaccttatcataacattaaccatcgacagaaaagcagacgactcaattagctcatgactacatataccacagagaggaagttggtgtctctattctagaagttcttatgtacgagtaacaattcagtccaattaaattatagcctgtagcgtacataacaatacaggtgttggattgaatttcaaatattatttaacaaaacctgaatttggaaagtactacttcagtgttttttttgtaatagatagaatgcaaacaattatgccacacagttcacacataaatactcaaattatatataaaaattaaaaaaactcaaaattaaacacatattcatcattagtccgtagcctaaacacacaatcatcataaatgtaatgcataactaataactaagcagtagcaagagtcatcaacttttactatgcacacttccgtaaaaagtactaggaatgacagaatagcctgcaaagtgtgtaaacagaggcaggccagaacagagaagagaatgcaaacggaagtgctgaccttggccagaaaatagaagggtcgaagattgatgaagatgagcaactgggtttagtcaaaagtcaacataaaactaacagggttttgaagaagagaatgtgaatcataaaagtaaccctaaaagtggattatggatccgaagagaaggtggaacaatcatatttttgccacttattggtacagctgtgctgtctactgcaattcagccactatccacccaaagctaggagttccctgaagtgtctggcagccacaatgcgcagccatagcacaatagtggcaccccagtattcactattctgtttaaaatcttctatcatagactgcaaaagctaacaagaacatctacttgtattccaagcacttgcctatgattgcaataaagtcaacaccttagcaagagttaaacatgtaaaacatcattttgatacttgcttattccagttggtattgccacttcttcataattcctcaatggctcaatttaacctcaaaaatcctgtaggacaagtatgagaaagaggttgatgaaagactgcggacaatggtttgatactgattctccactcttcaatttacttttaaacaggccaatttgtccagttatacttgtatatctgaataaaccacaaacaatgagggaattgtagagcaagtaagactatattcattattcaggagaagcaacagcagcaaatgagttatgcaccacagtcagatcaactaactagagattttagagacttttactccagtcacttcaacacatgatccgatggttgaattccaaatctcacactttcaatgaaaaataaaaggttcaagtatgactgcaacaattcatcaaaacgcttaaaatctggttcataaatcataacctgagtgaagtgttccaacaattactgacacatagcagtttatgaaacaagtgcatgtgtagaggaacacaatagaaatccacgcaattaaatatgaagtgctcgggagtaccagaatttattcgagcacaagaccattgcattggaaaaataaaagcaaggaaaattacaaagcaaaaggcagcaaaattacaacattcgaattcaagaaagagaatccttctgactggcctgctgctgcaataattcttctctaacccttctgatctccgcttccttctccaacctctctttctgagacagattaccatacagaaagagggtaaaaaaaagtacaaaacaaatagcattcgtacttagagatacaggcatacagcacagatagatcaaataacacgaaccattgctgaaaggttcaaaataatgtatctacgaaatggaatcctaaaatagagttaaattgagttaggtaggaaattataataatcatatgttagaagatatctcgggtttttttcattggaggagagtgaaattgagagaaaggaatgaaccttttcgtcttgacggagagcgatccagacatggagcttgtccatggactgccagaacacgaaggctcccagcgtcatcgcgaagtacatcgccactttcaccatctttctttcttcttctctgcttcgatttgcttttagtctcagaatctcctttcttttccccttgtaatcaaaatctctgttttcccctcttttgcgtattaagatggaacgagaacgagaatgtgacgtcgggatccgcagtttgcttggcctcgtccttactgtgtggcccaaatcccatgcgaagcccggcccattattttcagtaacatgcatctgtctcatgttgcaatcgggactcgggaggatccttcataaattgatcgagaaatcaattcataattttatcattttatgtttcttctattcaatattagtaagtaatacaagcatgattaaatgcaattttggattcttcattttttatattcgtttaattattttttaattgaacaattttagttcataaattttatcattaaatttaaaaattaaaaccctctcttagtctcataacaccgtaattgatttgtgagtgcatttcattttttacataaaaacgcagttaaatattacaaggaaataaatgtaatcaggaattagtgtttagtcaaaccagtgagcgtaggaagatagtaatcaaatgttctgatctttttgaagatatatttcttgaatgaaaagtgctagtaatttataatgacagaataatagattataaaatatattgtttgtgaggtgttttacgtctggaccgatgtgagcctgtttgcttaacgtcaaaataaaggtcatcctcttatccaagtaaattaaatatatctgcgtgatgaaatcatgaaaagttttctaataatttggaggcttgtgcctgttttaatatcacgtttggggactcccattggcggagtgtccggtcttttgtctcgactgtatctacaagactgcgagtgtgcgaagtgtaaaatatggccaacttgcgctttgagatggtagctactcatcaatttttcttatgaggtgacattgcatagaataattcaaaaagagcgagcttcccagccaatagaagaagaaagaaacaaaaagaaaaggaatcaattgttttggcgttttcccattgatgctccggcaccacccacagtaaatgctccatctgtctcaatacacacttcaaaatgcaatttaaaaatcgttgatcgttccctcctcttacccttttttctcttgttcgtgtcaccatttccacccgcttaagcaaacttttccttttctcctctttgtgattctcatctttattttgcagtgcctctctaaccacgttatctaaaacagaatcatgcggatccaatggtggctaaagacatgctcctccgccaactgcgccaccgccacccaccactcaacaatctcatcactccccaaacaaaagcaacatgcatgtgatgattctatcagccactcctccatttcagaagcaccatcttcaacaacctccaacaacagcacttcctccctcgaaagcaacctctccatacaaaccctcccatccgttccctctctccaaaacctctctccacaaaccttcaccttctctgtctcccaccattgcgtcaccaccctcacgccacacccttctcaccccgtcacctccctcgccgtcaacaacaacctcctatacgccgccaccgaccacgaaatcaacgtctacgaccgccacacgtgcaccaccctccacgccttcaacacccaacccacctccaactccaccaaaaccatcaccttcaacaataacaacactgtcatcaccacccaccaagactgcaagatccgcgtgtggcaaaaccacaagaaccaccaccacagcatggtagccactctcccaaccgtcaacgaccgtctgcgccgtttcctcctcccgaagaactacgtcgcaatccgccgtcacgataagcggctctggattgagcatgcggacgcggtcacggggctcgccgtcagtaacggctctatctactccgtttcgtgggacaggactctcaagatatggcggctctctgattttcgctgcgtggagtcactgaaggcgcacgaggacgcggtcaatgcggtcgcagtgtccaacgatggaaccgtctacactggatccgcggacaggcgcatacgcgtgtgggcgaggcccgagggagagaagcggcacgtgctggttgccacgttggagaagcacaagtccgcggtgaatgctttggcgttaaacgacgacgcttcggtgctgttttcgggtgcgtgtgaccgttccatattggtgtgggagagggaggacagtgcgaaccatatggtggtgagtggggctctgagggggcaccagaaggcgatactgtgtttggtccacgtctctgatttgcttctgagtgggtcggctgatcggacggttaggatttggaagcgcgcttatgatggacggtttggatgtcttgctgtgctcgacggtcaccggaaaccggtgaaatccttggcggcgattccggaggagtactgtcatcaaacttcacctaaatttagcgtctcggttttcagtggctctcttgatggacagataaaggtttggcaggtttctatcaccagtcagtcatgataatgatcgataattgatttcctagaaaattgatgatagcagaatagggaaaaagtagagaacaatgaagaaaaaagtactgagtaagaaaatatgtataagaatatgacatttctgtcatgatttttgtgatctttatgatagcagctataaaaacacaaaccaattcttttacaacacttttttttttgttgtctttccattatttcttttattgtaaatttcattgaataaaggcaaaatttctctttttgtaaattttggaagttatgttagatcaattataccttttttttaaaacctattttaatattgacaatgtaaaatatgatggagaattgaattcctagattgcttttgtcgacgttaaaaatttagggaagggaatgatgtaccaatttaggacaagaaaagtcttcaaactcaaaaaaatgtttaaaatttgtgatttttttttcttacttcactcaattactcttgagactaaattcctataaaaaaattagtgatagatgaaaggaaaaataatgaaaaaaatattgtgtcgagataggggtgaaaataggtcagaccatatttgattagaccgtgatttaaaaatataaagattgatataacctattcaaaagtttggtttgaattatggagcctattaaaaaacttattttataataaatgttatatataaataaaatttaatgattatacatttaaaactttgaaaatttgcatagtactttttaaaatttaatataaataaagacgcatacttttcttttaatttgtgtatgaaaaataataagttaaaattaattcgagcacttttaagtattcaataaaatattataaataaaataagcaagttaaataaaataccataagttttatttaataatctagtcttaatgtcaaatactaaaataaataagaaataagaaccaaggtaagttgaagaacattttttaggaaaattaattttacaaaacagtttaaatcaatttatgaaagttaatgaaacaaattttaaatagaaaatatctcaacttcctacttatattttcaaataagtaataatcattttataagattttcaaggtgattttttgaagtggttcatcattcactttcataataaagaaannnnnnnnnnnnnnnnnnnnnnnnnnnnnnnnnnnnnnnnnnnnnnnnnnnnnnnnnnnnnnnnnnnnnnnnnnnnnnnnnnnnnnnnnnnnnnnnnnnnnnnnnnnnnnnnnnnnnnnnnnnnnnnnnnnnnnnnnnnnnnnnnnnnnnnnnnnnnnnnnnnnnnnnnnnnnnnnnnnnnnnnnnnnnnnnnnnnnnnnnnnnnnnnnnnnnnnnnnnnnnnnnnnnnnnnnnnnnnnnnnnnnnnnnnnnnnnnnnnnnnnnnnnnnnnnnnnnnnnnnnnnnnnnnnnnnnnnnnnnnnnnnnnnnnnnnnnnnnnnnnnnnnnnnnnnnnnnnnnnnnnnnnnnnnnnnnnnnnnnnnnnnnnnnnnnnnnnnnnnnnnnnnnnnnnnnnnnnnnnnnnnnnnnnnnnnnnnnnnnnnnnnnnnnnnnnnnnnnnnnnnnnnnnnnnnnnnnnnnnnnnnnnnnnnnnnnnnnnnnnnnnnnnnnnnnnnnnnnnnnnnnnnnnnnnnnnnnnnnnnnnnnnnnnnnnnnnnnnnnnnnnnnnnnnnnnnnnnnnnnnnnnnnnnnnnnnnnnnnnnnnnnnnnnnnnnnnnnnnnnnnnnnnnnnnnnnnnnnnnnnnnnnnnnnnnnnnnnnnnnnnnnnnnnnnnnnnnnnnnnnnnnnnnnnnnnnnnnnnnnnnnnnnnnnnnnnnnnnnnnnnnnnnnnnnnnnnnnnnnnnnnnnnnnnnnnnnnnnnnnnnnnnnnnnnnnnnnnnnnnnnnnnnnnnnnnnnnnnnnnnnnnnnnnnnnnnnnnnnnnnnnnnnnnnnnnnnnnnnnnnnnnnnnnnnnnnnnnnnnnnnnnnnnnnnnnntatatgttaagattgattttcaatgtgaatttataacttgaatttaaaaaataatactaaaaagtatagttataagttagtggaaaactatttaaaattataaaatcatgtcactaattggagcatgaaataatttatgaaatctttgacatattttatcattcaattatcataattttgtaaatttatcactgaagttatcttttatgaattttatcacctattttttttcgcattttaccattatagttttcaattcaagcacattttattattttgttggtgacaaaacaacatcatttcttgctttcttgctttctcctttaatttttatgtcatcatatcctattccagttgtagttattgtgagagtagactcaccatgtacaagtttaagtcgagacacaatgtattcaatttctgatccatgttgatttagttgatatactttgacttgccaaacaacaactttgcttatggtgattggattaacaaaagcttgtgatcgggatggagaaactaagaccacaagaggatgagctagtaagctctcatggctgtggtagagggcatgagatgatgaagagagagggcacaagaacactaacgtggccctcgattgcctcattttcatccatcacatcacctaccatgacagcttcctccttcaaatctgaaatttccaaatcaacgattttcatatctaaggaatttttgcaacttggatgtttgttgttcaatgttttgggtttgttgggagttaagtttaaggggttttgaaatacgtgttgacttattgagaaatacgaagaacttatttggtgattaagtttcagtgtctactttgttgttggatgtttaattgtcattttgttattttgggagtgttggtattggaaggggtttaatgacatgcttgtgaaatatgtcgtatctaacgtgtttttcttcttctttcatttaatggtttttaactatcataaattataagttaaaattataaataaataggatagttgatgagttgtagaagattgtattttaaaatttttaaccgacacagttaatttacaacataaatttaaaagaaaactttttttattacgactcaatgcaaacaaaaaattatagaagacctgaaataaaattcattttttataaaatattccggacattatttaccttatttcttgattctgacacttactattttcatatgctatttttatacttctttttcatgcaatgtgtatgttaggacttctcacaattatttaatggtgatacttttattgttgttggttggttgagcaaaggcaatgtcatgtctcgaacttgggatcaattgtgacattgtaattagcaaaccattaaattggaccatagatagacatcttgatacttttattggaagcctataattaggtaatttgtctttatcacaacaatcttatggactttaaagttttttcccctgatcaattaagttttgaaaaaataaataaatagttttgtcttttaaaaaagatgttttttcatgcacaatgaaaacaaatataaacaatttagttaatattgtttctattaataaaataacatcacttacatttttagtataacaggaaagatgatttttgtgaatgaaatgtaaaaaaatgaaataaattatatggggatgacagggtaagttgaaattgccgagtcaacttgcttaagtaaaaaaaaaaataaaaaataatagaacattttagacgtttcaacccactaacttatctaacctaatgtgttgaaggcaggtggagagacagactaaccctatattcaagtcaaaattaaaagaatccaaacaaaaacaaccttatgttataagttccaaacaactatttaagtcacctctttgacatctattgacacctttcttcctccagcactatctcttctagtcattttgtcttggttaataatcttatgaactggtttttctttggatggtgcctgttcctttttgttttcaattccttttcatcagtcgattatttttagcaacgtttctcagttcctctctccaacattgttcttcttgggtgttccttctccagcgaggacaagtatgattatctttccattctcctcttttgcctccgcgttcagacattttggttttgggttgattcacattcacatgcaaatgttaaaaaatgatttagtaaaaaataaatagattttcacatctctaacataagaaaaaaatatttctataaataaatgaaatgtattattatattggatacagtagataaataatgaaaagcatatgaaaaaaatagattaaagaataatgaagatgggatttaaaaagcagggtttaaaaattattgaaaacgaggtgaaaaatagagtgtacattgttttttttaatgaatgaataatttattgataatgagattttgtattttttttatataaaaatgcatttttgacgaacaaattaaaagaaaatataaggaggtattttcgtaataggaaggtgtaaataacaacagcctggaacccaaaattaagttgattttttcttatttaaaaaatccattcggttaccaattttttggatctcaacggggcctaggcccaatttggctaccactagtttagatcgtaggcttggttctgttttttctttataaaagcagaggcagaaccccctattttcttcaattaagggataaaccctaacgccgcgaggccaagggaacactcatccgaatttctgcatcaaacattgcttgaactttttgaagtatgttctcttctctagggtttactcgtttctcatttcttcctgaactagttcttctgctattgtcgcttttgataggcgttgcgttctttgtcagtttctatcgccgaaggacgtgtcaacgaaagcgtatacgaattgcaatgttgacctcttttgtcacttttgtgacttgaacagctacgcactatttcattcgtagtctgttccatggtctcgttgtgccattcctttaattcaattatttatttatttatttattaacggttgcttcttatggtgaactctccctgattattccatgggggttgttctagtttccgaagcatatataaattaattcgtcttgaataaccagttttaaacagcgtggtgtaatcttctctaagctacactatgctacctgtcttctggtacatacaattcattactatatattcattttccacaattaagagcagtgtcaatgacgttctaatgaaactaatttttagatttcagaatctgaaaatgagaatttgaaagattagagtaaagtaataaacactgacgcttggctattaaaattgtagaaatggaaacgcctaatgtaacgatacctaaagttggacctaaaccgtcgaggaaagtgaagcttccgacgccgaaggagctgatatcacactatgaatctcagggtatggactcgcaagatgcgtcgttgaaggtcattgaggatcttcagaaggctctgtttggagtcatatcctctggcaaaggtaagcacgacaagctattgactgaatcttctaggaagattgattcaattagcaatagactcactgttattgacatgaagctcgattccaagcctggttatgttgagacttttgcaattgggcttgcctcaggagctgccctcaaaggtattggtgcagttgtgcctcatattattgcccctcttgctcagatatggaactctgtttccactgccattaaatcttccccccaatgatatattagtttgtaattattagttagtttgtagaaatattttttaatgaaatgactatgctaccattttttatgtcattataattcgtgtttccaaaaggcaacatagaggatcttacagaatctaatgaagaaatgacttgaacaagttttgcattaccattacaagcctttacaatcaaaccataaatatgcagatgtcatgctgtctgaattgaaaacctagattaagcaacacttggaattcatacaggaattcaacacacttatgcagtcagtgaattgaaattgttggatgaagatttgctggttcaagtattgaatttattttaagtctaatttactagttagtgtataagtgatatcttcatccaatagtttcaattggcatcaatgtgttaggttccctgttaacacacaacttattaattgaaattgttggatggagatttgctggttaaagtattgaatttattttaagtctaatttactagttagcgtataagtggtatcttcatccaatagtttcaattagcatcaatgtgctaggttccctgttaacacactacttattacacattatacattaggtgatgtgtgtgatgttaggagtttactcgttgcagcagtgatacatgtagaacttttccattgtttggccacattcagcacaggccactttgtctggtatcctaaactggttcctgggagtatcaagcaattgcagtggtgaggggtttggagttcttttatataatcatgcattgctggcaaaagccctttatcttttgctgcatccctccattgctcatgttcgtttaggcactttagaaatgcttctcctttgccctgtgccatctttcctgttccttgactaatcacagcccatcctgggtcaccactatcgtaggttaggattctcattacttcatgcattatatggtggttctgtactgttttactctgctgtgatttagagtgccacatgctctctagcctaacccaaaagaaccaaattatggctaggtcaggaagtatgttgctcaatttttctgcttgtatggcattgttgatttcttgaactttcttccctggattgcttttccccacataaatcatctctagtggtagttgcagagctcttgccagttaatatgcagtgcttgtgaatttagggatccactctatatcatccccttcatacgagcatatatatttgcctttgatatctaaaccaagtatatgcattagatcattgtacattcatcatggttcaaggagtattgatttctgtaagagttctaattgttgctttttatgtgatcttatcatagacttttcattgctcaactttgaatatgttatactagagtgctagttttgcataaacatattattcacaagaaagaaaataatgtaaagattactaacccattccaaaagcgatggatcaattgaatctgccaatagtccaagttcccatgtttcctcattccacagtgcttcctcccttgagctagagaaaggataagccaagcttccccaaatccacatcatgggtattgcattaagattcacaaccttccctagcggatccaactctacaagaataggcttcgttttgaacagccatacctctttaatgtacctgatggttgcgggctccaatagagaagggtcataaagtgagtaacatgacatcattggttgcagcttctcaaactttggtttcacgttagtccatgggattgctttgtccacaactggaatccaaacgagttcgtattgactctctaacctggttgaatcctgacgtgactcttagtacatttgttcaaaaatcacaagctcttgatcagggacattatgtaggtctgttatgtagagtagcacaattttcctcctcaacacctcaatgctaacatgaagacaaactacctagaaggttggaacaggacagctttccccttattgggtcatttgccaaaagttttgattcatgtttggattcaccttaaattatccaaaatcacaacatgtttgatcccaaaggagttaattctaagtaaaattgattgagttaaaacaaccattaagtaacttttgtgtttgataaacaaacttatcctgaattttattatagattttcttttagaataaaaaaatctaaacacaaatcccttcaaattcaattttaaagaaaattaattttgcaagtcattcatcaaaacaatcataaccataatattcgaatttattgggggttgaaaaaacaaagtcaaatagtcttcctgacaatatccatactcgagtttatttgtattacgtcacaagtaactctttaaatatagtataaaaaatgttctgctcctgtatcttccaaaaggaataaagatctctgagagctatttcctggatccaagcgagagtgccctttctgacacggctgcgtcctcacgaatgccaaacttcgtaggcatctaaagccaatccattacaagtgaaatcttgcccaactccaactacaaagaaaggggtgaggtgctcattatgtataaatgggatctcttggcgccaaataattgaaatttaatttcttgatctttatcctcaatttttggaaacttaaaaagcccttctggtaagcccgctgaatagaaacattaaactaaaagcccatacaaaatgtgcacccaagaaaaaaagaccatatgcagataatggcttacctaaatgctgatgacaaatggtgagtgcattggaaggtgagtatttatgttatcaagcttatgggccaataaagttaaaaataatgataacaaaacagacatgttcaatcaagagtttgattaaagttcttttggtaaaaaaaaagagaaattaatcggagttactaagataaagttgtgatgattataatatgacattaacaatggaggcatacccttgacccaagccagttatgcctaaaacatgcggtgcacaggatacaatactccgaatggtccaatagacagcaccgggaataagattggaagcagtcaacatctctgggacctcagggtcaatgtactgagagtgaagctcaaggaattggacaacgttattggttacatcgaacattgccttgagaaggttgttgattgtttgaaactttggtcccaaatcatccacttgttgcagtgtttcatggatgtgcttcaactttgcaacagacttagcaagacgattggtggcataaagctgagccaccagccaaaatgccccgaagtttgctgcaaatgctgctaacgctatcaccactttggcatcccatgaatagcttgagagcatgcccagtattcccatgattgtggcatgtacatctccaccgctcgaacgcttgtaacatctattacacaagcatgagaacatgaataagttaaaccacacaatagataaaatagtactctctccggttctttttcttataaaaagaaccggaggtagtattgttgttgtaggcgtttaaatagttgtggctattatcaatatttatacagagggagatttagaattgtaagaaaagatttattgttaggaataagaaaacctcgcagaaaattttgttgattgcgtggtacgaaatatctagcacattagctaaatcagattggtatgcactgctcttcatggcatccatctgcccttgttttccctgtgtaaaatttcaaaaacaaccacactcagaaaccaagttaaccaagaaccaaaatgcaaagtgagggaggagagaaattattgtatgttccacgacaactgtatatggtttccattattctccacttaatacagctaagtttcattcactctttctaataaattgaaattttgactatgtactaaatcacgtaaagattaattgagatcatacaataatttctggagagagagagagggatgagagaggctgcacggtgaaaaatgtcttcaacaacttgaaaaagaggtctaacgtcaatgtgtccatcaacgggagcatgagtgtgtttggtcattgtagtgtcatctgatgctgaataaatatggcgcctaggccccgattgcatctcccgtggcaccattaccataacggaaattaaggatgcaagaaaggaagaagatcaaaatagataatgtttaggatcgatgaatttgggcttggttattgctagactgctagttagtgccagtggcttcttatatagctattgatgccaaattttggtgaatctttaccttacttgtatttggtttcaaatcacaaagtaagaaaggaaattggaatatcagataaaggatttgtcgaatttataccttcatcatcggttatggctttcttattttattatcttgtgtcagataaaaatgaaatcacactagtgctgtaaactttttaggttattttattcgtaactttcatatattcattatattggcaacctgttagtctatcagtagttttttcacatgcacttttaacctaacacgtttcaaaaattaccaacacacaaaagtataataaattcacaaagacgaatcacaagctacgagttattgcaagaaaggtataaatctttcgtaacttctatgatgcgaaagaatcattgctatttattaaagtgtgaaaatagtttgcaaggatatacttgctgtcactttaggatgacattgacagttcgaaacttgcagggtttaactggaactaaagctctgttcaataacttaattattggcagcatgtaaaggatttgcgaaaataaactttgttcagttttataagataaagttttaggttgggtccacaacgtaagttgccaccatattaatatttgtgttattgaattcatgaaaatttcgttcacatagatcattttatccaagtctttatcacctcctaaaacaagattctccgcaacacattattgattttggtgttgggcaacattcaagctccttaagccaaaaatcctcgttaacattaataaatttatacattttcactattattatactatgtactgaatattcacacggatatgcttatttactgcatcatgttcatgcaattaaaacgtaagcaagggatacctttgatgagtacaacatatcgacccaaattcttaaaagcaacttatattgagctcaatgatttccacaaaaggtccggtgaattcagcatggataatgtcgaggttgtcgagattgacctccttccactgtcgataagtttgaaccattggcttccagggtcacatgtgttatctttgctcaagcatttacaagcattggtcacaatgatgttgttatcatctacatctagacataaaatagaaccgtcgcttaggttagatgaaaggtgcatgttcgaatctgatatcatttcccatttagagttaggatctgagcatgtcatgctaagtgttgcaggctttctttcatcctctgcatgtatgcagaaatccgtgttgtttaccaatagggtcttttgagatgtgtatgtccaggcatcagaagaagagcaagcacccaacgttagtgatgttagctgtgatttacttatgacacagagacctgtcaaagggtggaatatcagtttgtgtggattgccttctatgatgcctggtcctgcacaatgtcaaacaattaagtgacaaattagtaataatggtattttctaaccaactaatagtgcacagtttggaaaagaataattgcgcaaattttgtgaagtatgtgcaaaattggattattcaaaaatagctttaacagaaaagggcgagtacaaaagcaaaaggcacaagagaaaatgttaggaatgttataatacacttttttgaacatattcttttaaaaacattcttttttattagttaaatttattagaaattacaaaattttatgagtcttatatcttatttaatgaattttatctcttttttttttttaaggttaatgaatgtgtttcttgattttgtaattttcaataagttttaaccaataaaaaatatgttaaaagaagtgtataaaagagtgcattgcttatactacaaaaacatgaattaaggaagtacaaaaaagtcctaattagtggttatggtcgcagcgttacctcgaaatggaatttggagggcagagattctgtttaagaaactggtactcctaacctgattccaatcccaagtgagaaggccataaaactcttcctttcctataaccccttctcttaagtagtaactaccaacaagtgtccaataggcccaatccaagtcaagctcagctaccagtgccagaaaacagttaaggtatcggttgtcattcacattggtacctctcaagtccccaccaaactcactcacaaacaatggccatccatggtccactaagaagccagatgttttctttatattcgctgtcacttttccacatacttggtttgggttctcatcagcccaagctccaccatcagtgaagccatacctgtgcacctcaaatactagtttccctttgaatgtcaggctcactggtcgatcccgaaggaatgacaagtctgtgtcaaaatttaggccagatagaatgactagaacatctggatttgctgcatgagcagcttctgctcctttcaccatataccttcaattcagaataacaacttaattatcatctacacaggaattttctttcttcttttttttttttttttttttttttaaaactattcnnnnnnnnnnnnnnnnnnnnnnnnnnnnnnnnnntttggtgttgcaaatcatctacatagccataaatcttaccaaaactatgtaggaaattgattccgtgttgtaaaacaagccagcgaacaatgaaggaattgtaatgtttggaaattgttttctgatgacaaattttgtatgcttaaatatatttttcatatctataatataatttattttaattttactaccataatttcaattttattagatattttagtaattatgatcagtcaagacctattaggtaataatctgacatatttcattagtttatcacattatcattttaggtccatttcaagatgaggttgtagttgttagcagttacttacttgtaccaatcattaacattctgtctagatcctcggagctcattcctcaagcttatgcccacaactgctgtaactcccttgaaaagggtggtcatcttggtgaggcccaatatccactgatttgggtcaaaaaatttgtcaccgaagaagccattgccgtccgtgttaccgcagcaccatcctggctgggtcacgtggttgtccaaaatcaccatcacatcgttgtccccgagactcttcaccactgcctggacacatcacacaatattgcaccacactcaactcatggccatacaaatattcagaataattttgggtccaaagttaaggattaatttctaaaactatgattcatttcgaggattgatcccttttaacataatttttatattcaccacatagagattaaactctatactatatacttaaaacacattattatctcttaactatgtcacaccataatctctttagtttcattatagtttaattacattttaaatctctttagtttgaattatgtgagattttagttcctcacatgtgctttgaattaatttactaattaagtatctttagttttaaaatctttgaaaatttaatgattataaatattcttttactcaaaactcactcactaaaatatcaaattttgtccgaaataaaaaaatcaatttcttaattttctctttaaccttaatcattatccttttattttaaatttttcactaaatcatcaacctctcaaacatttgaataaaaaacaacaattaaaaaaattcaagtagaagaaaatcaatagaagaataaatttatttaattttaaaaacagaaatcaaattagctcaaaccaaattatacatatttcaaataaaacgatcaacaaatgtaattaagtcaaaaaaacatttttacagagcaaatattttgtattgttgaaaattcaataaaacaaaaaaaaattagcaatttaattatgcatgcatgacgtaataagaagctaacggaagaaaaaaaaaaataggttagcccactgttcacgtcaacaatgatgaatttaataaggatattgcgacatttacatggcaagctggcccatagcaaattagttgattgaagcactcaattatcaaaaaccacaataagtcaatcgctatcggataagcgtcaccgatcgataacatcaatgatcaagtgcaagatttaataactaaaaatacacgtacgatgaggtagttaaaattagtcaacgaattggtaaggttgatttatgaatgaactgagttgggtaagaaatagaagtaattaacttaaacttacctgaaaagcttggatgagagaaagatcgatgatggaggggttgttggtttggacaccagcaatggattcaaggaggccaaggctctgaaaagatcgtctaacggtgagagaagcaagagagtcattggtgaccaaaagtgtgggccaagtgagcctgacacagttgaagcccatggactttattccctttgaaatcacatccacgggctttttgctgagcccttctgccaccgcaacttccaaatgggatacccaattgacacaggctagtttcaccctttggccatcttggttgaggatccatcgggaatccgtgtgaagaagacccgtcacaggcactgtgtgatcatcggaggagagtaatgctattattagtattgatgcagagagaacagcgaaaaccaacgtgctcgaccaccacttacccatttccatttcatatgatatttgatattccacgcgagctaatgagacaccaatatgttgtttattgaagacataggaataggatgtctatatatacatgtggggaatttgtgtttctgtctactgttcttttgtcattgtctttcttaaagtattccctttccgagctatatatcttgttatgtaccttccaaatctttctcatatgagtaactcctttgtttcacatgattttttcacattcagaaatcacataccaaaatatattgtactaaaaaatgtttaaataaacttctgaagaaaaaaattaaaataattaaactttttatatatatataatttattttatacttaaattaatttgtaaaaattttattatttaatttctctaaaaaatcattttaatttatacatataagttatctaggggtgtaaaaaaaattgattcaaacaaaacatgattataattgaattgaaactgaagcgatctttatccaaaattattttgatttttatttgaaaaaaatcagttcagtgcgaaataagtttgattcttataattagtttaaaatcaatttggttcataaacggtttttaaaaccaattctaattctgaaccgattttctaaattaatttgactatttaaatgtaaaattaaaccgattcaaacaatttgaaaccacttcagattagtttttttttttaccaaatcgattttttcacacccctgaagttatctgagcttatggataaactttatttcgttttcatttataaatgttaatgaaagaaagtctaactcgctattaagaaagtaaatgtaccaagtagctcagtagattgattcccctaaagtatatgcaaccatgacgaaaagaaaaagtgtagtagttattaagtgaatataattctttctctacatatacaattcatcttatacaaataaaggtgaataactcttctttattagctttggaaggttgtgcaaaatcaaggactaaaatctttttgtcaaggcggcgtataggtagtaaagaaacacgcatgtaagaagttttcaacttcgtactaattgatagttttaaaatgagtatttaaaatttattaagtaaaattaattaatattttttacaacaatcttttaggaaggttgtcttgatttttttataatatttatttctatataattacattgaatttttttaatgagaatgtttttaagaatacttattgaataaaagtatttttaggagatattatttaatgataacctttttcaggagttattttcattgtcattgagtcacgtgttatctcaatcttatatattaacatttatttatttttaattatcctcttcaaatatatttcttaattttattttattgattacataattgaccatccctgctttgatcacaatcctgaaataatattctctatggcacaatgtactatgttgactttggtgtcgtttagcaatggtgccctggtcttgagccaaaaatcctagccaacgttagtaaattctgtacatattttaatagtgaaataatatgtattgaattcaatagtcatatatatggacatgtttaatgcatcacttccctgccattaaaacataagtacatggttagagaaatttacggtaatattcttaaaacaacttatgctgagcttaatggtttccataaaggtctgatgaatttagcatggatgatgttgaggttgtcaacattgatctccttccgctgtcaataagtttgaaccattggctactagggtcacatgtacgatctctgctcaagcatttgcaagcattggtcacaatgttgttgttatcgtctacatctaagcatacattagaaccatcgctgagtttagatgagaggtgcaacttcgaatctgagatcatttcccatctagagttaggatctgagcatattatcccaagttttgcaggcatcccttcattctctgcttgtatgcagaagtaagttccttttattgatagaattttctggggtgtgtatttccagccatcagataaatagcaaggacccaatgtcaatgggtctagtaatgactttcttatgacacacaaaccggtcaaaggatggaaaatcaatttgtatggattgcctcttgttatgcctggacctgcatgttgtcaacagagagaaatgtagttcaagtttccatgaagtgctaaattggcaatttattttttgttgaacaacatatacatcaatggtagcaaactcaatactttttttagtaacatgaacatttttatatgatatctctatcaatgtgtaatatggttaacagataattgatccttaagtatataattaagaattcgatctccagatatgtgcgtacacagaaacatattttgggaaagttaatattttttaaatagatctcaatatctttaagtgattagtcgttaactttggattaggattaaaaaaaaatcatagctttatcaaagtttccctaaagtagtaaattggtagtgatatttttcaaccaactaatagtgtagagttaggaaaagaatatttgcacaaattatgtactacatacctcgaaatggaagttggagggcagagattctgtttaagaaattggtatctctaacttgggtccagtcccaactaagaatcccataaaactcttccattcctataactccttgtctaaagtagtagctaccaacaagtgtccacaaggcccaatccaagtcaagctcagctgccactgccaagaagcagttaaggtagcggttgtcattcacgttggtacctctcaagtctccaccaaactcactaataaacaatggccacccttggttcactaaaaagcctgaggttctcatcatatttcctgccacttgtccacatacttggtttggattcccattaacccaagcttgaccatcagtgaaggcataccagtgtgcctcatatactaatttccccttaaatgtgaggctcactggccgtttttgaatgaaagacaagtctttatcaaaattcaggccggataaaataacaagaacatccggatttgctgcatgaatcgcttctgctcctttcaccatgtaccttttgttcagaacaacatattagtcacatgaggattctctctcttttatttttctttctttctaattttaaataaaccatggttttatccctcatacagttacaagtaacttaaaattgtatttactctagcaccagccaccagctaattttgaaaaaagagagggagagaggatgttttttttactgcaagtaacttatattatttcattcagaataatgacatcaatacaacaaaatattgaacataaaatctagatgctctagcaaatattaggggtgacaaaatggattggtcttatcatgtctacttattttggctttttttaaggtcaagttggaattttaaactcattccatttttgtcagtcaaaaaacgagctgagagaaaatcaggtggatcaatccaccaaccgttttttattaaaagatattatttattttgatattttgtacatatattattaatttttaattattttttaaaataaattattatttaaaattgaagataataaatttaattttttaataagtatttattatttaatatttataaaaaataaaattaattaaaatcaattaaaatatatttattattattttaatatttagttttggcggactattttactttaattttgataattgcatactgttcgacccacaattacaatattaatatgattccttttagattatagaaatagagaaagtattatacaaactttgacttttcttaaaaaaaaaagacactttgactgtgagcacttacttgtaccaatcgttgatattctgtttgggccctcggagctcattcctcaagctcatgcccaccacattagtgactccattgaagagggtggccatcttggtgaggcccaatatccactggtttgggtcaaaaaatttgtcaccgaagaatccattgccgtcggagttactgcagcaccaccctggctgggttatgtggttgtccaatatcaccatcacatcgttgtccccgagacttttcaccactgcctgtagtcatcacaaaatgttgcccacactcaactcaaacttgaacaaactcatactatacggaagttagttgagagtgtggttcggactcttaaaaaatatcacccttaaaaatacccaccaagaaactgtccaatataaacataataattttataaaaaaaataagagaaaaatgaatttagttaataaaattattttataataaaataaagagtttaatgtctacaatataaaatattttttagtatcattcaatcacaattgtgtaaatataaattttaaaataattatcataaaagtcaatcaatttattataatgatgagagatataagattagttaagtagttaagaaggaagaaattggagaaaacgtgtgggtttgtatagacattaaactcataaatatgattatttaaaattaaaaaaattaaattactaattatttttaatgctcaatgttgattggaattagaaagtataaaacgagagtttgtttgtaaattaagacaaataacaaaaacatattctactcactatatgcaacataaatggcaattaataaggaagtaggttggagctgttttcaataaccaccaaaaggcaatcgccatcaaatatgcgccaacacatcatgatgataagattaatagcaaagaagataaggaagatgaggtgattcaaattagtcaacaaactggttaattaggcaaagaaaataattgaattgaatatgataacaaaaacaatttacctgaaaagcgtggatgaggggaagatcgataatggaggggttgttggtttggacaccagcaatggattcaaggaggccaaggttctgaaaggagcttctaacggtgagagaagcaagagagtcattagtgaccaaaagtataggccaagtgagcctaacacagttgaagcccatggactttattccctttgaaatcacatccacgggctttttgctgagcccttcggccaccacagcttccaaatgggacacccaattcacacatgccagcttcacccgctgcccatcttcgttcacgatccatcgtgaatccgtgtgaagtggaagacccttaacttcaactatgggtccggagagcaatattattgttattagtgcagagacaaaattgaagaccaaagtgcatgaccaccttcccatttcgtgtttcttcagtagtatcatctgttgtttgcctatgccatcatattccgcacctgtgagattctctgcacgcctgaacaagcccaatatataacttgaggatgtgggattgtacatgtggcaacaaaattattttttaagtttaagcaacttgtttatttaatgtcattttgtcgtttatttttaaagtaatactttacaaaatatttatcatcttaaagttattttatatttattaaaaataataataaataaataaaaacaaataattttataaaattaatattttattaccattaattcatttttagattttataatttattattattcatatataaaagatacaagtaaaaaataataattaatattatattaaaattaaaattattttaagataatttttttcttacctaacaattataatataacagagaagtatatctttatccgttcctttcattaaattattccttataacatatatggatcctacaatctatcatgatagattgcataagttctagttgataaataaaaaattgtgtcaatttttctctctttctgatgtacataattatatcatgttactcaataatataagagaattcaatttctatgtctcaccaggtgaacaaggtgactagtttaaggtgagggctacttgcatatttattaattttcatgataatgaattatatatatgtgtgtgtgtgactaagtttaatatctatatattattgtgagtcagtgtaaatagtgagatccagtgtttgaaagtttctgaattttatttcactcctaaaaaatacactggtgaagacaaaagggcattttaattttaattttaagttcaagcgaaaaaaagaactatatataagttaccacacatttcatcctacaagtcatgcaatgttaatttaaaaataagtaaaggtaaaaaaatatgtggtcatttgattattgagatatgatgtaacctgcacgactaatcagattttttaacgcatataaatacaaacaaattgattctcggatccttcaccaattatatgtgttgaactggtccatttgaaaatcctgactccgtaaatatgattttctcttattttcctttctttgacggttaatcagcctcgattagggttcataaaatgggtttgatttaggtctaaaaaagaaaattaaacaaattaaattaaaatatattagtttaatttttaattttttaataaattaaatccaaactatttatcaagaatgggttggtatgttttagtttattagattatattagatttgttatatatattatattatttttaaaattagagaaaaaatttatattacttgattccgatcctaattattcttttgaaccaaaatggcattgtattatgcatataaataaaaataaataaattaataaggaaatttgagtggttggttaaggaactcaattgatattttttcttttttatgaatacctctaacttcaaaaaacaactttcacttcacatcttcattaaacaaggcatgaaacacacaagtgaatttaatgtcagaccttcaactaaaattcttatggcattatgtgtgagtctttgttcatattagtgactccaacaattaatatgacactgcttttcctcccataaactttatgtttaacatcctactaacttttatagtaaaacaatgttgttgattgcttcttcttcttcttgtatactttcttttttcctctaagaagagatgataaagtgtacccgaatcataccccgtatccattaaactatttacaagcgaaacggacaatgatccacaatattgaaactctatactggcggatgtatatttacaaacatacgcaattaaaacattaactttaataatcaatatgttagatgattatctttataattttatttatttataactaaagtttagatgtatcaatattatatttatttatttttaatattatgtgtgtatgtattttaatgttatgtttgaattatttaagaatgaatttttattataattatagtaattattttaattatttttattgatttattattattaaccttgtagataaggaaattgtggatcacatatacatacataaatatataagtatccaatgaatagaaagatgaggattaaaattattacttacttaaatatgaagttagatatggatattatttttaaacagaaatatacgaacgaatattatactatcttatctggaaaccacacattatcatcccattctctaagtgttgttttgcattattagcatcgtaaatgcaggaaaaatgtatacccacacttcattttggggtcgattgagacaaggaaggataggaagataaaaaaaaaatgatagatataataagggatgtaataaaaaagttggaaaaaaaagagataaaaaatgtagttttatatccgaaatgcattatgtgattgcattgtaatagtaacgtagacgtaccgtgactccatctagttcgctagtttgaagtttaataaacacttgaacttaaacgtagtgctacgtaataattgggtaggtgatatatatcacgcaacctttggcaacagtctttctttctgcattttctacagaaaattatgacttattaatttgtatatatcgtgcgtgcactcaatagtttcgcttcgagataaaaagaaaataacggctaacaaagttcatacctgaattgcggggaacactgcaacacttgcaatgcaaggcagtggaataaactgcccattgcttcttattttggtatggctattggttactacaatctgtgctgtgctcgattttgttatacaattataccgtgtctttgtatgattgcgcatctctttcttcgtagcttttttttcttcttgttgttggtgtttgaaattttaaaaattaaaaataatttgatttagattttagaaatccacttttgtgtttcaaatttaaaaaaaaaaagttttttttatagtaatttacaagtttcgaatgtgtgtcagtctgtgacagatgacaataaacaagctcttttatttagtcgtgttttgttgtttatggtgattttgtcaaaggaacaccagtgactgtcaggctgccactgataaagaagtgaactgtgagaccaagacgtgtataatttacatacaagaagaaaacaaaaacaaatagtatacttaaaaaaacctaagaaattttttacaagcaacttacatcaaaacatgaaacctaattgggacgcacaaacttcaaatgtacaatgaggcaacgcgcattcacaactcttcctagctcctaccctggcatatatttatttttgttcaaaattgcgaaatgcagttttggttaggcaaaaatctaaaaacttatccaccaccatgagcctggctaaccctgctcctctctttgctaccctgcctatgatatatcacgttagtttttgacttatgataacaattaagcactcagtttatgacattgtttaaactttaaacgtaactaaccttttttctgcaatgcaaggttaactagtaaagctttattctggtagtgattgtgcttcggcaaatggggcaccattctaggttttctccacaaacacagcaagtctgccaaatgtgagaaaataacaacagtggaaagaaaagttaatataatgtcctaatcatatagtcttagattcatcaagatgaatcggtagaatataattcaacttggtacctggtgcccgcaaccaaatgccatatccttatcattagtaagacaaatcgggcaaacctgcggttaatcatgtcatatgtaaaccattgttgacttcttgtgacacagaaacatcatgaatcatgatgatcacgtcatatgtctcgagattatatgaaagtcacatcttaagttgaaaaaagaatggtctaaatagtaccttattatcatataagtttcttgaagatgattctgcgttaacattatcataatatgttggtgtgttctgttgaaaactgtttgaaggaagaggtattgtgctgctgctggaagccatctcataatgaggtggaggtagaggaaccctgtctggtgaatgtcctctccgtgcactactttcatcaatgaagacacgaagcaagttcagttaatatctagataaaatcttcattaatatgctataagtaccttgtttttctatataatattcatttattaccccaatatgccaaggtctatggttgccttatattgagaaggtatctccatcaaagctgatagtgcaaactctgtctcttctttgcttgagtctatactctctgacattatttccgtaaaattcacaaactacatgcagccaaaaataaaatgttcacatttcagcttaatatgaaggactatgaagaagtaaccgtggcaggtcaataggactaagtgaattacaccaaacctgaaaattgtcaaatgctcgagctgggatgttatcatcaaattccctcatcatatcccatgggccatctccaactcccaccaaaactattgaaagtggatactcactgcaatttaaagagtatgagaatgcagggtggcaatccagaaaaaagaaaactacaaaatttacctggcttttacaattgcatcaattgtcttctcttcctgtggacttagctggccatgttgtgtgtcaacacttctggtcacctgtcgcaatattttaagtatcaatgtttttagatcttatagataagaagaaaaggaatttctacagtaaaagattaatcattgttgaagcactgacaaaattaagggcattttaagttaatcttttgttcagatgtattcatgtatccaattaatcttagcaaaatattgtagtgaagaagacagacatatttcagaactcacacattatgctaatctaacaatctaacaattagcagttttcttctgcagctatcaatgccaagatgtttgtgttaaggtagatattattattatcactaacaaaagaaaccaaacaaaaaaatgctttcataaacctataccattttagtttttttttatttaaaatctatgatacttttagagtcataatcatatagttagtgtgataacggccaatgaaacatttgatgactgatgcacgtttacactagtttaaaaaaatcttcttttcaattttgtgaaatatgtattaaaaatacctgtccatcagcaattattagcaggacatgatattggccgccactttgctcgactatagtcatggccatctcaataataggggcaaatgaagtgggtcctgtcacataaatgcaatgagtcatgctgagcctaagtcaaaaatgcaatgaaagattattggtgaaggcaacacctgctagacgcaggcgagggagaatatctctatatcttgacaaaacttcctcaaatccattgcagaacctctcgtctgaatagaaactgaagacatcttgatcatgtgttgatgctgtcagaggaaaaagacaagaaagaaacacaatcaagtttgcaattttgaaacataagcaatctgaaagcatgaatatttatatatggaattaccatctccaaatccaaaacaaggaatcaagttatcctcgtcaaaaacacttaaagtttttccaataatcgagattgcttgttcataaggattttgaccacttcctatatgatgtaaactttttcggttgaatgacctcttccctgatttcaaagtgatttatgcaaatttaattaataccacaactcactacaagaaatccaagcatcaagatatgactaagagataaaacctgtccactcattgctctttgtaaaatcaatgccaacaatgagattagaagattccaggccagcatgtgaaagagcagtggtaacctgtgcaaaattatttcattatttgacaaaataaggtgttcttctgtgagtaataaccgtaagaatgaaagttttggggagtgaaacaaccaataagtattttctcatgctggtcttgttgcactatgagaaaagaaaaaaagtaaaataaagcaatctactctaagcttcatccaaatattttctcataccaaccttgttgcattgcactcttggactagtttggacatatcagacgttgataacatgtttactgctactcatattattaaatgaattaagggatgctctgctgattcatgcatgcatgatcaggaagaacaataaaaatgagagacagttgtctcttttcgtagcagcttttcttaagccacttcatttcagctgaacttgtttaactatattctatggcttggatttaaagctcatgccaacttcaaagatctgctgaagtataaaggtctgcttaaaagaaactttacaagtatatataaaggttttactcggagttgtagtaaaaatatagcaattctaagcaagggtctcgcaatttttttttgcaaaatccagcatttctatacatttttttctcctggaacatggtccccaatattggggaaaacccaagtcccacatatcggctagagatagcggcaaaatagtatataagtgggggacaactctcatcctatgagctagcttttggggttaagttaggtccaaacccacattctaagatgatatcaaagtctatcctaaatctattaacgggccacccactgtattatccacgcaccaagcccaaaagtgttgggcgtgaggggatgtattggggaaatcccaagtcccacatatcggctagagataatgccaaaatagtatataagtgggggacaaccctcattttatgagctaacttttggggttgagttaggtccatacccactttctaagacacaaagccccaaacagatccatttgatggttcagctcggcacagattttaacactcttttctgtggggaaacatgtttgttgttagattgaatccttattaagacttaagaacctcaatatttcgattttcaacgtggaccatcatcataggcagaaatttgaaggctgatttcagaaagaacataactgattccctttctttctttcttctcctcccttttgtgttgactgatgaaatatcgatgccgttcaggtaggaagtagatagacatactagttcaaatcaattcattatgtccctaaccccatttcttaccaaacacaaaaagtcaatgatgtaaacagaacaaaccaaaaatgatgaaaaaatactcatatattcatacaaaaaaaacacaattatatctaacctaagcaaatgacaaaaacacaattatacgtaagcaaatcacaacaattacctcatccagtgaatggtaatcatcagctattcttgaatatctcctatctatcctcctttttggctgtgaatagtcgtggaatggagcttgtgcacggtggtgaagaggcgtattataaggattttgttgtgggtatgcatttggtgattgagggcatccatagctatcccgtgaatatgaagaaccagcagatccatatgatgaaacatgccttctttcagacccttttgaactcttacctcccatgatcgactcctttagaatcaacaaaagcaaaaacataacaaccaaagctgtccaagtctctagctgcaattgcaaacaatatgttaaactaaaagcatcgcatatatatgttcacggataatccaatctggaacactgaataagaaaacaaaaccttacaactttgactagcagtaaaatacaaattctgggaaactaaaagtaaatgacgcatacgaaaatttgttcaagaaatttcaaggccaaaaaaaaaaaaaaaaaannnnnnnnnnnnnnnnnnnnnnnnnnnnnnnnnnnnngaactatggagcaatgatgactgaatcaaatgacacctttccacaaatgatgactgtatcaacctttcctcaaatgctacaatgaaacttaaaactcagaacattttttttttccatacctctagaagcattgtttccacacaagaattgcaaatgaattgtgagagaattaacaacagacgctggataataatcaatgtctcacgctaatcgcgtcaagtagaatagcttctccttgtttaactaaatagaaggaagaggacaacgaataagctcctgttggaaggaaactagctagcaaggtcaagtcaacaacaactgattaatcttttcttcctattcaaacaagcctaaagagtttatatatagtctatgattataaaaatatgggaaaagccttaacatcatactccaggacaaattaattaacactttagttgagaagctttgtttacatcggcattcaataagtaaatgaatgttctttttacaagtaagcaattatatatatattgtcaatttggaatggtattagcaattgagacaagaaattgcctttgtatttatttatttatttattcattcattcattcaatagaaagtggaagtcacttgtgtttttcctcgatccttctccgtagagttggtgttaagaaatgtcaatatacattttgctacgttgacgagtcccactgttcaaaaggaccgaaacttccaagaaatacctcgtaaaccaaactaattaaatcaatcccactattaagggctttaatgcaacaacttaacttgagttattaactctattttaatggatctgttattgctacataggatttaagaatatttttattctaatttgaaaaaatttaagattttaatttaattttaacagatcttattttatctctctagatgtgactccacatgcatcataaaaggatgaaatctacttactagtataatctcttataatttcactaaagtctcttttgttaagtaattatgctaataaatgacttaacacataagcatctcattaatttatcacatcattactacatacatttacatttttttataaattatatttttaaatattgtattaattaatttgatgtcatccattattttaaatagataaaaatttcaaaatataatttacgaaaaaaatatacacatcaagggacgtgcacagtaagtcaatgagttataaatattattgtaacattataatttaatattgctaaagtaaaaacaggaactaaaaaaaatctctaaaggactaaaatcctattatacagtgatattcaagagagaaaaaactataatgattatgcgttccgtggcatgaaggagcagtctcaaatctcagcccacgctcgttttggcctcaacgagtctctctctgtctccgtgtcatcccttgcaaacgaaatttccttcctttttgtcccacctaccatcactccaatcccctgccctcacgcctaccattgccatcttcacttccccaatcctaaatcaggcccgtccaatcacatcgccgggccgtgaaacacacttccccacttgctcacctaggatggtaaatcgagtttgatctaacgggtcagtctatttggcccgcaagaaagtatggatcaaggttaaaattttgaactcacatttaataaacgggtcagaccaaatgtgggccaggaccggaccagcctaccaggtcgatcagcagtccaccaataaaaaaatataaaatataataggtcattaaatgaatggtttagaataagagtgactaagaagaagtgagtgattttgaatctgtaaccctaatacatttttatttgaaacctaatgatgagttatactacgtgtataaatatgcttagattgcctatatcatgttgaaacaaatttctaagaatatgttaagacttaggagctagttgaaaatcattgttagacatgtattctctgtttgcttttacttctattagatatgtattttatattaaaaatcattgttatatgattaagttagtacattattaatttttagtataaataattatttgaattttttataatttttttaatgttttttttaaatatattttttattttttaaatgaactgactcactgatcgactaactcactttaaagtgaaacggactaataatttcaacctactttataaaaatggatcagcccaacctatttttggatagactgatccattttttcatccttatccccaccacccatattcctttctcttctattttatttttatttatttccttgacttacacattcgtcaatttaaaactgagataaacaatcatttttattttaacaccacaccacagcagcactatttttcaattgaaattgaaattcaaaaaatagacaaattcttaattatcaatccgaaattcttcagaggctgactgactggtaggtccggtgtggcggtgtttcttcatcaatcatcggcaacctaagacaaaatcacatttcattagagttcccactttatactcccatgttgttggttcgctccaatttctagggtttatcacatattcgtatatatgctattacattaaatggacggcaccggcgacctagacgccgatgcggtgctcagcgacgtcgaggacgacggcggcgatccgattccgatcgccacgaagcctccctcgccggaagacgtctccgtcgagaaattccgggaggttctcgcggagctcgatcgggagcggcaagcgcgcgttgccgcggagaatacgaagtcagaactacaggtttcgttcaaccgattgaaggcgctggcacacgaggccataaagaagcgcgacgagttcggtcgccagcgagacgacgccgttcgggagaaggaggcgacggcgacgcaattagaagaaaccgcgaaggaacgcgacgcgctgcgatcggagattgggaattcgagccacatgatggtcaccggcatggagaagatctccgcgaaggtgagcagcttcgccggcaaagcgctgccgcggtcgcagaaatacaccggcatggcggctgtggcgtacggcgtaatcaagcgtgcgaacgagatcgtggaggagcttttgaagcagaacgaggcgaccacgaaggctaggaacgaggcgagggagcagatggaacagcggaattacgagattgccattgaggtttctcagcttgaggccacgatcggtggcttgagggatgaggttgcaaagaaggtttcgattgttgaggatttggagagggatttagctgttagggatcagaggctgaatgaggtttcggagaatttgagcaaggagcaaagtgagactttgcggttgaaggagtttgttggtgagtgtgaggagaagttgagtaagttggaatctcggatggaatcacaaaggcctttgttgattgatcagttgagttttgtttcaaaaattcataaccagatttgcaatgttgttaggataattgaccacggtagcaccgaagagctgtctgaatcgttgtttgtcccacaagaaacggatgttgaggagaatattcgtgcctctttgtctgggatggagtccatatatgagttgaccaagattgctgttcagaaagctaaggatgtgcttgaggagaaggatcgtgagattaagagtttacatgagacggtggctcggttagttagggagaaggatcaaattggttcttttcttaggagtgctttgtctaagaggattgcagttgatccgtcttctagaaagagtgagctgtttcaagctgcagagaatgggttgagagaggctgggatagatttcaaattcagtaagcttcttggagatgggaaagttgcagcttcaaatgacaagtctgatacaacggaaaaagaagaggatgaaatatactccctggttaagcattcgtttctctttctagtttttaatgaaacttgttcccatcgtactttgcattttgaagacccatcaatgaattctttgtgcatgcatgcaggctggtgctttggaggatgttgtaaaggcatctcagcttgagatcattgagctgaagcatactgtgggtgaattaaggtacttaacatcagaattaaatgcatagttgcttgcatatttgcaatttgcagttgtgttgacatcataactttttttctttgcatattgcttaactgcattaagggcagagttgagcttacttaagcagcatatagaagctcaggccaaggagcttgaccatagaatgcatcgggtagaggaacttgaagagaaggagagagtggcaaatgaaaatgtaagcttaaatttgtttgagtttaatttgatctagttccttaaccataaacagttttatctttaatatttgtatattgtagaacgtagaattttgttgtgtatcctaggctgtggataatttgtaaggcacatttgattgtttgtacttctctgtcacaaagtaacaacttggcctatttgtaatgtagattgagggactaatgatggacattgctgctgctgaagaagaaattaacagatggaaagtggcagcagagcaagaagctgctgcaggcagaggcgtcgaacaagaatttgtggcacaggtatgctattcattaccaacatttgttgacacgtttgctatatttggaggatgtgaccaaaaagaaattttcagttgtgcccaagtattcttagagtttaatgtttttaaattttgatttattattttttttcagtccaactttgattgtgcaatgttttggtgtgaaaaatcaattcttgcacttttcaatgaaaaacacatgtcccaatgtaaatttatgacagattaattggacacacatcctaattatgttcattgattcaaattaattttatcaagatcaattccactcaacattaaaacaaatgggctctaaatacattagctagtagctggttgctagtggtcatgaaccaactatctcaaaagctttagatattgggtggaagcctatgaatgattttatatatctaatgtgtcccctcatgaaagaaccctttgggcctatagtgtggatagtgtgcaggctcaccgataggaatctcagggagaagaactgaatgatcacatgaatagcagtagttgttagtttgttgtgactgagtctagttagtcatttggatggttagaatggctgcaaatgctacccgctgagttgttacgttcgtgtgtataaatatgcataagacaagcttatgcatgcttttcataatgaccaataagaatagttcatgaggccgtggctggagtgaaagtcctcttcctctagattctcctattcctccattcattgtcccttttcagcatgtaatgctctgatacccaagagctatcacttgtcctaccttgagctgaaatttatttagaagaatggggactacaacaatcgaactctagaccctgtttccgtaaacactttagtacaccatgtcatgagctaattatcccaagaatttaagtgatcagtttggtttgggaaaatgttttctgctttttacttttaattataagaatgttaccttattttcactttgttttctgatttctcaaaccaaacagcttctacgtttttagttgaaagctggttttattttatatctactactaatgacatcctttttccatgaattccgttactgcaatcccttggctctctaacattatcatctcactcttaaaaaaaaattgctgtaactaagcaagttgatatcatagaaagccacctgttggtggatttttttttcaatgctattgtattttttcatcgaattttcctagtgataattgctgtctgcaaatctgcagttgtcagcacttaagcaggaatttgaagaggcaaagcaatccatgttagaatcagagaagaaactaaatttcaaagaagaaacagctgctgctgccatggcagccagagatgcagcagaaaagtctcttaagttagcagacttgaggtcatctagactaagagacagagtagaggagcttactcatcagctcgaagagtttgaaaacagggaagattcaaggagcagtaatcgacctagatatgtgtgttggccatggcagtggctcggcatggactttgttggatttcagcagcgtcccgatacacaacaggaggcttctaacgaaatggaactttccgaacctctattataattgggccttattcttttctctctttttttgtgtatttatgttgatttcttcaaattaatgttacaaagttgtagtttataccatcaacatgttccaccatctcttggaatgccgtcatggtggtcactggttgagcattaggctactgtaaagtgagaaagtctctgaagtctgaagtatacaagtgagggtgtgttcacgcttgaattaaaataagttaagttcatcaaacactttaattttaattaacataaaatgcatcttcacttattcactttagaggttttctcaattcagatgagccgtttccctgcattatgatgttgcgcctgcttccggcttgagtagctagctattgtactttggttgttttgaacgaacatttcatgaaagcaataaacaaatacactgtcattacattacagtaagcgtaaccctggtttctgtatctgctcaatatagtgcatttttatgggtcggtgccctatttgtcaatcgagttacagcattgtcggcttctgtatggacgtttcttccattgaacaaattggtttttgggggatctatgtattcgtcaatgtctccctagcaagtctatattggaacaggtggaacaagtgggctggacaaccactcaacatgtcaaatctctagaaactatagcggtttcaacgtcgttggacgacattcaatcgtccctctttttgttttattatcaaatatattcaatacaattttactaataaaattaattatgattcttttttacctttattttgcttctgtaccgattagatcctgacattttattttgcataggaaggtgtagaacaaatatcctaaaagagactgcatattaagggggtgttcctcaaccgggttagatcttcacttagtcttgaactttcacgacattagatttgaagaagtatggaaatatacgggtttaactaaaattggacctaagtaggacaaaactaaattagtggtgtgactaagaaaaatcatgtcttgtaatctagtcgacatatgtttgtttaatggcaagatatgttgtttttattttgctttttaggtgtagacattgttgaaacaattttttttttatgagcaaatgttaacaattaatatgtcatgttaattggaacaatctttttaaactggtagtaatgttctaaacatatttgatgagccatctcaagtcctagcgcaacaccaaagatgttgttgctcatgtatgcatagattaacatgtttggaaacatgttgagaataaaagaatcgcatttgagacgtgaaagttataattattaatttttaaaaatcatatcctaaatgtgaaattaaaaacgctaaagcatgcagtgaaattacaacagtggcggagtcatgatggtggagcattaattaaacttggagcatatgttataatttttcgctgtgcaatttggtacgataaaatgtaacgtataagcatttcactttttaggacaaatcttggaccagctggtctgtgccttgtgggatataagataaaaaagcgcgatatttattggccattgaacatcgatcatacttggcgtgaaaacttaaaaagccacacacccttaagaaacttctactacttaatatagtatgaactaatgttaaagaagctgttactaatttataataaataatctctaataattctcgagaagaaaaaaaataagatacaaatttgtggtttaacaaaactacatgtggtggggagggaaaaaagaggctagccttcaaagatgttatttttcaggaggaataggcaaattaagaaagaccaaaaccccccaattttcaaggactaaaaaaagaataccaatgacatatagaatcatcatctgtggtgctaaattattgcttcagcgctttgttctgcatttctttttgagcaaaataccatcaggagggcgtgttagcatgacactgcaacggccataaagattatatgaataccttaagatgcttcccaatttggaccttgccctgaaaactcccctcacttcaaggataacgccattgccttccatttgtttcacaagcctctggctctctcttaatggcagctgaacttgactagagaccatgtggatatatgcaaaccttgattgaagccttgcagcatagaaaggctcaacatattgagtggcaataagggtacttccatagtagagataaattatcactgagctgaagtccacatgcaccttcttgtttggatttgtgaagttagccagcatggttagatcagcattgagtagatatccaaggtcaaggtatgcagcatttaaggtcacactagacacatcaaaatgaggactttgggggcgaaatacgaagtacactataaggactattaagcctcctatgattatgatgagccaaaatatcacacacaagcaagcacctaaccatgtcaagggttgagacttttgctccttgggcaactttataccactgaggcggggatcgtggcgtggctggtgccaatgctcggggcgacggttcagcggtggctggacatcagccgagggaggtggttcttgaaaatttacctttgacttaactggcaagaaaccttgattctgtctacgtggacttctttgcttgccacggcgaggctcttggagaataggtggtggtgggtgtggatgatcttctaccccaggttgcaatggaacatggtcttcatgctgaggtcgtgttcgtaatggaacacgatcttcatgctcaggtggcaatgcaactggtataggtggagctacttgtgtggatggttggtctcggcgttttcggcgtggcacaagtggataaggttctgtatcacgattatctatatattcaggttgtgatgatctagaaaaatgagggttggtttctcgacgagacatggtgtggttgtgcaaaaatgtatgaggaaaatgaagagaaacagaaaggcagtgatacgagaatattattaagctaatggaaacgagcacaaatcaagcctaaaacaaaaattaaagcacattaagggaatgagaatgacttcatgggaacttcaaggatgattcatataaaggcaaagaatcaaacataagccacttatgtggggcaaaatgtttcaattctttattttagatatttaacacccgatttgagtttttcaaacagaaagtgatatcatgtatcacttatggatgctatgattagctcaagccttggagtggatgtgtgaaatttagacttgagttgccgagcttattattgtcctatgatatagagaatttgaatccacattagagaacaagaccttgtgtgaatttacaggcggcatggattcttggactatgaaaattgtaaaggttagggaaaagacctgatcatgcaaggggaaaacatacattctaactaaagtctaaagcgctttcagtttcttgtaccacaatttacattcacacaaacaagactgcggaagatacctttcccctactttggtccaaaatacgtggaccacaaacacagactgcgaattctagcacactttaaaaagttaagaacagccgattgaagagaggaactcgttatgacttaggagtcaacattcgatcaatttaaaaagaaatcaatattttcagcttaaataaataaagcaatgtgttaaatataagagcagccttaacatactcatttcataaaaaagagacaagtatatgaaaccatttcaaaattggcaaaaattaaaggtatatatgcccataatataacactcatttatcggtggcagcttaaattacattgatgaacttcaggcggttgagcatttttttaacttttccagcaactgaaggaagctataattttcaacagatcagtcaaacagcagccccacggcactctctctcaaaaaaaaaaaaaagaaccaaagttcaaagggaaaataatgcaatagctacaaaacaactacacaaaagtttctgattcatgtggctaacatcaattccccaggctcatgtcacggtagtaaatgcctcaattcaatagttggaagaaattttctcttcaattttggaatggagatggatgttattcttagaattctaagtcaaatagaaaaattaaagccagggtcttttgttgccttcaaattttctatattttccaagatctggtcagatgtattgttaacagtccccagatgcagacaggccacggtttagcaattgcttttctccattttgtttcttttcaacacttccatttactccacctcaccccaaaacagatgtaagtaatgtgatcagccaaacccataaactactaagatttcatgatcaaatgtcaataattagcattctaactcctccattcttacatcggataacctagttcaaaagagaaaaaggctacccaagacagtaaaaaacttatgcaagtagaagttttcaattgaacaggatattaataatttaataggttgttagtgtttacgccactagcacagaatgtaaatattaatcacaagttcaacttgtggaataagcctcttgcaaatgcaagataaggctgccaatggttattcctggtctaatgatgttcaaaaccggagggaaaaatccatttcttcttctaaaatcctatattcaggcaagttgaaatccagtttcattttgatgacctgggattatattagaagtggattctcaataaaactaggttaagagtttctaaaattggtgtaatatgtgtgaataaagaacttgagataccacatgttagagaaagatttgttattgaaatgaaaatctttgagaaacacaattgaagagagtgagtgagtgaatgaagaaaggatttgtcaacccagtttcaatactgtactttccaaactaattctaaaatgtagcagttttgaaactagtttcctaatacacgtctcatttgctgacatttagccaccaccatggcattttcttaactatttccatttttaatttcatactccggaagttgcttggatggtggaccctagatgattcatttctatttgtaaatcatcaagaatccaggcgtatgtccttcatctgtacattctctttgccctcctttgttctttctatttcttctccaattttccatcaaaccaatctgcaaattgctagttgtgctggttgtagttgtccttcagctagtcctgttccaaggtgcaacattatcttgggtagaatctattggcaaggaaataccagcatacaatgaaccagggtacattaatatcattatataaaaaaaaagactaaggaacttattttatttcatagacatggggattgataccatgcaaaacaatacatataatcaaagttgcgtgaaaccatgttctgactccttaggttcagcacaactgcagagaatacacatcactgtggcactatcaaactaaatgtaacaactacggaaagtgttgttttaatataagattctcctgcataaatgcactataaactatcccaccaacaaaagtgaaaatttattaagtaacataagataaggcagtttccagtcagtctccattgattcagcagccttcagaaacactatgcaacatttaaatgattcatgcatccattttttttcttacattatattgtttgttttctttcatataggggttagcaaaagtggacaaaatcatattatatgtcatagttctctaataaaagaacgcgctgaaatttaaggagtagaaacatacttcggataaatcaatgtgtaatgatcatggtgacatttctttggaaaagcttgaggttccaagctgcagatacaggcagaagcatcataatttaccagaaaataatgttaataaaggtcaggcaagttgaattttgtaacagtataatcctacaaatatgtattcttgcatgctaatccaaatctcagaaggaaaacataacttgtgccagcatcacagtttttcagaaactaataaatctgaatcttgaaacctaacaaggctacctagtgaatctttttttcacatccacaactctccactgagttacatgtctagatatagacacaaatagtaaaccgatgatctgttaataaaggttccagagtttattgttcaacaatttgctaggatatagcaaggcactaggcataagccacaccaaggtgagatcaccaatgaaaccatatcttcatagttcaaactatgctctgcaaccacaaacttcatcttgatgaaacaagacaacattctaccaacatcaaggagttgttaacccaagaagggtgctatactattattgatagttagaaccataaaatattcattgattttctgctatgcaaggcaggacatgaatccatctgaattgagctgccactggtcaaagatttactcaaatagtatgaagacagcataagactaactcaaagccaccctcaatatgaactcttaagaaacaacaattgggatttgaataggcagctggagtgattccaaccaaatcatcaattactgaaattagttgtgctgggtgagaaacaaatccatagctctcaatgtataacaatcgccaaaagtaaatgaatgttctattgtattgacatatacaatctgccaagtgcatagtctgttcactctgttgacattatgaaacaaaacttggataccgttacttcattggtagcaagaaaccattagagcacagtcctctgtatggatcctttacaagaagctggcctgtgaattagtatgttatacagcacataagtatataggagcatagagacacataaaggtatgggatggcaccacgagcgtcataaaaataggataaaccaatttacaggcgccattacctgcagataacgtttcaggtcaggtcaggtttgctaagccttggtgtattgtatccagaaaaaactttttaagtcaggtttcccatttgaaagaaaggtgtgatgaatttgagtggatcaaaacacaaactagtgtcatgttgtgccatcacttgattgaatggcattgactagagtctcagagagatgtctgtcaagtgtaaagcctctctccatcatctgatcccagaccctacaggccagtgaaatcttttttccccttataagccctccaactatcaacttgtaagttacctcatcagggtacaaacctttgctctgcagttcatcaaataggcgcatggcatccataactctagaagccttacaaaacccatttacaagtgcattgtaagagatgacatccggatttaccccattctcaaccatgtcatgaaaaacactatgagccacatcaaccttcccattcttgcacagatgatcaactactgccgtatagaatatgcgatcgggaagaacatgcatccttgtcatttcatcaagcagcttcttaaccacatgggtacttccttccctaagaaacgcatctataagtacattaaacgtcaccatgtctggcctaatccccttcccatacatctcctcgaacaactcataacccctcctagtccggcgagccttacagaaccccgtgatcacagtattatacgaaacaacatcacacatccctttggtctgcatcctctccaccatcatcaaataagccctatccaccatatttgccttgcaaaaacccttcaacagctcattatagctatacaaatccggctccaccccactactctccatggtctccaccaacctcacggcctcatccaccatcccctcatcacaacagtaattcaacagtatgttataagtaaccaaatccggcacacacccattccggctcataaacgccttgatcttcatggccttgtcaaccctccccatcctacaaaacccatcaatcaaagcattgtaaactaagctattaaccttcaccccacccttgatcacaccaacagcgagctcataagccaaatcaacgcgcgccccaccgcacaacccgacaacaagagcaacacaggctttataatcagggctcaaccctctgtcaattaaacgacgccaaaccctagcagcctcgtcaaagcgtttagctttgcatagcgcgtcgataataatcgtgtaggaaacgacgtcggggtctcttcccttggaggacatggagtggaagagttcgagggcggtttctaagcgattttggcggcataagaggttgaggtaagtgttgaaggcccaaatgtcggggacgaagccgagagcgtccatgtcgaggaggaggctgtggatgagggggaggttaatgttgtcgggggcggagcagagggcggagatgaaacgggagtaggtgaagggcaggagggagaagccgcgggggatgacgtggcggcggtagtagtggtgggcgaggtggaggcgggagtggcggaggaggacgccaatgaagcggttgtagtcgacgctgaagacgcggcaatttgattcggtcatttggtcgaacaggtggatggcttggttgatgagaccggctttgaccaggttcgatatctgagagcggtatgcgaggcggtgtgcgccaatgctgctctgatacatatcaatcaaaatccaaaggcatagcaccagcaatcgcccaaatccttattcattcaccttcacctccaatgctgcctttaataatattatgcaatgcattccttcattcattgcacgttgagagttatgaacgcagtaactaaagttataaagaggcacaccacacctactgcatggtgcgtgcgcgcgtgagtggtgacaatggtggttgtttgttttccctattctcttctcgctccgactgcaaccggagggaaccggaggggatgggagggaagagaattttttattttctttttagttttgtcttcattttaatgctattttgtctctaggatttttttcaattttgtttatctctcttaggaggactcgttttgctaaatgttgtattttgtattaattatttttaaaaaaaataaccttaattacttaaatgatatgaattaaaaagataaatatattttctttttttaaaatgggagaaaaagactaatacatattaatcaattgggtaaaaaataattaaatataaagaaagagaaaattcaacaattttaagaataattttaaaacatactatataaattactaataaatttaatattattaactaaattaatttatttttaaaaaataatcttatattgagatattagtatttaagtagttaactactaagaatgtttttaggcaatatccctcaaccctcataagatgaatgattgtttccagagtgccaaaacacattgggcacacctcagtatctcccatatatgccttcgagatctctggacatacattagttaaaaagcaagttccttgacactatccaaatatgcattttgatcctttctggcacctgtagtcaccagatcgtttcaaaaaatattggttagcatcattgtttaattttaagttcttataacaagcttttatataataaaaacttgttggaaataaatcttaattaaattattttcccgaatgaaccctaaatggctaaaaatcataacgaaaactagtcgtaatacaaaaccgaaacaagctttcgttgtatattcaagacgtaatacacagtggaaatcaatttttggttgcagttaatttgtttttttatgcgtgcaatgttctttatttaattatgggttaaatatgatattggtcctccaaaaataatagattgtaacaattgaaagatataaacaagaaagcaatgttcctccaattgttgaaaatttgagaaatatcctaacattgtaaagaaaaaaaattcaaaattgaatgagtgatatgtaagaatggtaaagaaaattaaaagtgggataaaaaccactttcatggcatatagaaggaaaacatgtaccataatgtcaattgaaatttaagaaagtataaatgtgatgtgttgcaatgtgcacgataaaagaacaagggcataagaaaagaacgacaatggataccaaaaaaaactatacgaacatgttgtaatgcttacaattaataaacatgttacttcatgatttattgcattttttgtagcaaaacgtgttttttgtcgcgacaagatgattcctggaggagacgaagaaccacaacactctaaaattaatggagtgcagggtgaactcaccaacttggagatgaactcatgattttgagcaattctacgtgagtttatttgagttcataaaaaacgtttccacaatcaatttaactccatttgcatatgtcaatttggatgaaatttacgagttaatactcgactttgacaacaatggatgaaccaatggtgatgttgggtcattttcaaaacttgttggtgtttttaggctagaaggtggtatgtatgccctagaagaaaaaaccgttgctctttttgaagaacttttcgttatttcaaatgtccttttcaattcatcttttaataattgtcaagcatgcttaaatttaaatttcttacggtcatttaaagaataaataacatataacagtgacattatcctctaatcttatgtttttctttctgcctacaacaataaacagttgtaatttgagaacaacaatatagcaagaattaaaattaacttatagagaaccaataaaatgtaacttcagaagaataactacaccaaataatattggcttgaaaagaattgtgagttgaatgtaatttgaagcacaaattatacactcaccagaactcacaaattcaatcgcaactgtaattttgttacaaaaaatattcatattatttttagctaggagtttcaacagtaacttttcctaaattatgttaaattgtgcacaatgataattttgctaaaacgtttatttcatgtttagcttctttacgttttcccatcaaattttcacattcatgttcatttcataacatcaaagtagtttattgtgggagagccaattaagtttcatacgatggaaaaaaaaaattgtagtcatggaaagtttgtatttcttgggataagtgttggactacaataggcctgtacgcaccagattttttttttttttttaaaaaagacatcccttttagttgcaggtccgatctatctcctattccctgtcgacatcgttgcgctacttctcatcggctttgtcacactcttcatttccggcatcgtcgtagtttggttctacaatggcttctatatcctcgacaacaacttgcaaagtctggattaacctccattgtcctcctccaaccattatacatgtgtgggtttttttttccccagatctagttgttgttgatgtatgttttctcatatatgttcatgtgagtgtttgatttgtagatcaattatgggttgaactgttaaggaagcaactctgacagagagagattggtggtgcgaattcggatagccactatcaaagcgtcagtttcacgacggtataaatggcagcgaagtatgtctatgatgacaaaagtctttgtcagtgagatgtgtgcagtggcatcactagcagtggtggttgcttgaggggaggaaaaggaaaggaacgacgggagagaggttgttaagggaagaactttgtcaccgtcattgcaaaagtcattgtcagtggtggttgggtgagtcatcgggagcaggaaaaggttgtccaatcttaaggccttgtcatcagcgacaaagggagaagagtgaatgtggcgacgacgatggaggaggaatgcaacgatggcaatgaggagaagaaacagagacaataagaggaagactagaagatgggatgttttttctttaaaataaagaaaaagataatctagtataggcaaatctatggtggaactacacttatctcagataaaaatcctatcctacggaccacttatgtctcccgtcgtgggagacttaaaaaggtttaagtcccatatgttagcttgcttctcataatgttcccttattctttttccatattcactttaagctctttttcaaaatgttatctcttactttctttttcactcaaaatggtttttcactcaaaatggtattaggcaaaattgcttctctccattatgcttttacttcaatacatttgtttttttaaaaaggcttttgagtttaaccatttctcttggtcacatctatgatcaagataggttcaacttgttttcaattcagtatctttatccattttttaagaaattcgaatttctaatgtaaattaggtttaataatattggtgtgttcaagtctcttaaacatctctttacaagtttaagtttctctagcattgatcaccatcaagtatcatgttgtaaaaagtgagtttaattttttatttttgttgttgtgattttacaagtgtagatcaagtttgatttgtcatcaatgtatttgagtctccaacattagagttttttttagaataaatcatcaccaagttcatcattgcaatgaaagtgagtttaattttgtgatttttttttttgtgactttaccatgaatgaatgnnnnnnnnnnnnnnnnnnnnnnnnnnnnnnnnnnnnnnnnnnnnnnnnnnnnnnnnnnnnnnnnnnnnnnnnnnnnnnnnnnnnnnnnnnnnnnnnnnnnnnnnnnnnnnnnnnnnnnnnnnnnnnnnnnnnnnnnnnnnnnnnnnnnnnnnnnnnnnnnnnnnnnnnnnnnnnnnnnnnnnnnnnnnnnnnnnnnnnnnnnnnnnnnnnnnnnnnnnnnnnnnnnnnnnnnnnnnnnnnnnnnnnnnnnnnnnnnnnnnnnnnnnnnnnnnnnnnnnnnnnnnnnnnnnnnnnnnnnnnnnnnnnnnnnnnnnnnnnnnnnnnnnnnnnnnnnnnnnnnnnnnnnnnnnnnnnnnnnnnnnnnnnnnnnnnnnnnnnnnnnnnnnnnnnnnnnnnnnnnnnnnnnnnnnnnnnnnnnnnnnnnnnnnnnnnnnnnnnnnnnnnnnnnnnnnnnnnnnnnnnnnnnnnnnnnnnnnnnnnnnnnnnnnnnnnnnnnnnnnnnnnnnnnnnnnnnnnnnnnnnnnnnnnnnnnnnnnnnnnnnnnnaaaaatcaagaatattaaaaccgtttaaaaacacaggtaatgatcaaatatatataaataaaaatatggagcgatataattatatttatgttctgatcacttttataatttgatataaaaatatttttattcattaaattattgaattgtatttatatattattaagatcatgtatcaaattctattaaaattgaataataataaaaataattaaataattaatattttaatatattttaaaatttatattactatttgtcgttaatctatataaatgaggtattcaattattttagattcatgtgacattttgcaaacataatatgtatataaaaattaatctaattaaatggtaaattttaaaaatatattatttaattataaaataatataataattataaaaaattatgctgttataatttgattcatctacgataaaaatataacgaaaattaaattgggtagaatttccttcactagttttttaatgcacattacaattgcaccttatataaatattattaaaactgatgatataattaataggggaggaagaaagtcaattaaaaataaattaaaatatgtgacaataaatgcagttttaaagaggcacagtatttattattatatttaagaaaaaagttccaaaactgaggtggcactttgacgcattatgtctaggtcaaactgaatgaccatgaccactcagccccgcttttatttccatttctcggcaaactccaaactcttcttcacttccctctgcctcttctgttttacacacataccccaccgctttctctcttctctcttcaagatccaaactttaagtgcctttgtgtgaattctcctctctttataacaagaacgagtcagaagtgggtcaccgtcaatggttttaggtgagaaaaaactcgaacctagccgcaacacaacacctaccaataccataccgtaaccattttttttttaccgttccaagcttttgctttcaacccattattacttctgttaatgggtttgaaacccaattaaaaagttcgaatcttgtcgattatccatgttaggagaagagagtaacaacaacgaccgcggcggcggtcaccgtagaacaacacattccctatcaatttcctggaccgaccggtctccggttacccggaaaccgccgcgtccgcttaagcctctcgccatcaacaaacgcagctttttggagtggccgagcgccggctgcgacgatctcggcgattggtctcttccaccgaccccaagaggttccaccataacgccagattcgggttcgggtaaagtatttcaattcaagaaagactaccatgcgttctacgacaaggaatgttcgagaatcgcggagcacgtgtacctggggagtgacacggtggcgaagagccacgagcttctgcggcggcacgggatcacgcacgtgctgaattgcgtcgggttcgtgtgccccgagtatttcaaaaccgacttcgtctacaaaacgctctggctgagggactcaccctcggaggatatcaccagcattctctacgacgtattcgattactttgaggatgtccgccaacagggcgggcgcatgttcgtccactgctgccagggcgtctcgcggtcgacttctctggtaatcgcgtatctcatgtggagggaaggccagagcttcgaggacgcgttccactacgtcaagaacgcgcgtggcgtcacgaaccccaacatgggcttcgcgtgccagctgttgcagtgtcagaagcgggtgcacgctatgccttctagtcccagttctgttctcaggatgtataggatggctcctcattctccttacgaccctcttcatcttgtccctaagttggttgatcatccttccccacgcgcgcttgattcgcgtggcgcgtttgttgtgcacgtgccctctgctatatacgtgtggattgggaaggattgtggctccgcaatgtgttgcaatgctagatcagcggcttctcaggttgttcggtatgagagagcaacgggggagattgttagtgtggttgaggatgaagagccgaaggagttttggattgctctttctaccaaggaagtggtggtggagaatggagaggtggagagaatggagattgatgtggggattcgtcccaggagagttgaggagtatgatttggattatgggatttttcataaggcgcttgctggtggggttgttccacctttttctttgtctaatgctggatcagaaaattgccttcccgctagagaaaatgggtgggggagattgacaaggaagcttgctagtggtatcatgaaaggcttgttcacatcctctaagtgctgtgaatctagtgtgaacatcattgaagaggggaatcaacataagaatgttgatccttttccaccttcttcgaacaatgtgggtggctcgcggggttcctttgagtgttttgtagataatggctcggagagggtaaaggataatgttcaagtcagggatcagtttgttgtccctagtgttgttggttcatcaatgccgccaccatcgcctcatcatcgagcatcggattcttttgcttgttttctgaggagcagccccaaattcagttccaagtcgccaacactgtctcccaccagttcggattatgcaagttcctttacattttctccttcatcgactgaacccgttcatgtgaaagacgcatcttcctcagagagtcgctccttagttaagaaagaaggtgaggcatttctggctaatcacaccttggtaggagcaaagtccagtttgccgcgcaaaggaacttccctctccattgcagagcgcagagggaataacccgccacctcgcatgttgctaccctcggccaccgaatcatcccgtgccagcaaggtccgggtaagatccaggtcattctcattgcctgccttggatgatactctgatggaggatgttagttgcaagcaaatctaactatgaaaacagtgggaaaacggctaatatgagatgttgatattattagtatagctgttgagagtaacgttaatggcagaggatcattgtaatatggtactgtgtcattttaaggtaggttgttatgcttgaagtagaagacttctaagagaaagttaactttattacagtggttcagtttcttcctgtatagataatatagccatagttggctcaagtgatctatttttggacgtgaactttcactcctgtttgaatattggtgcatgcctgcaaggtgtagtgtaggctgagcaataaaaaccacacaaaacatgcaggcaatgcactgatagcatctcaagtacataacaattatcaaatttaagtgaatataaagtctatttttctctttggctgttcttgttcttgtttgttccagctactagtcagtatgaatgatataatattaaatgctacattttttaataaaaaaaattcatttataatttcaaaatcattatcctttgaaaagggcaatggttagcaaaattgatataaaattagtgcaaaagatcacctttgtagggaatcatgtagcagattaccttgttttagatgtaatcatcttcctttattagttactgtttccactaaaaaattaaaaccaagtttcagaaacaacatttcatttacttgatggtgccaactgccaaatggtttattctaatttcgtggtttatatgaatggcatcaattactactgtacgtccaaactccaataggattctctaacttgcaggatataatcttaacagtaaatgtatgtgaaccagtcatctcagtcaaagtgaagcatttaatctatgaacacgattattctttacttatttaggatacactgggagactttgtatagcagtggattcgatttcctacttaattttatcgggcatgcacctatagatattccaaagatgtattataatactccaaatttctttccaaatatatactgatatcagaatctgataatgagatgaagcatgcacggtaaagggtcatgtggataatttgtcctaacgttgaaacatatgtaatctgtgcaaaaggaacaaacagagcagatatagcctttgaaagtggcatcatgggaccatttccttcaaagagaatcacacgacgcgacgtatttgtatttctagtgtgaacctttgttagagacatgcgaccttttacttaagatgtagtggaatgcaacttccttcagcagtttgatttcccaccagttgtttatcaatgccaccgttggttgcttctgttgcatcaatcatcaaaagtgaaaacgactattttgctgaatcttagtttccaaccatgtgcacatttggccgtttccaagtactttgttttttttttgctttttgtataaatttggcccctttaatttaaactctgtgcttttttaatccctagaaatatgtagttagttagagaagagtggcctttttacagctgcttccactgcaagtcaggttttccctaccgtgcttattcgtttagtttgaagatgccaagctaaaaaaatcagtgcaaatattaataattaccaaccaaatgtagagcattttacactcgactgtgaggttcgtagccgttattatatgggaatgctgccaacctaccgttgagtctttattttggtcaataggaatcataacagtatcacaacacactcatataccctgttaaaccagttagactccgttgatacctacggttgaatcttattttagttactgtatcactagtttttaaataattaagttataatttgtattcttaaatattttgcaggtgccaaaggttcttccatacaaatcaaagaacagtggctgaacgagtcaagattccattcttcatctacttggactacctcttctattttaatactggctataaattgaagatcaggacaggaccgtacaaacaagatgctaattaaggtgaatgttactgtatcacaattggtagggagtgatttgctccatccacctaccttcttttcgtttttagtacaactaaagcacaaaagtttataaacataaaatatttaacaaactccttatgctccatgatacatcactaaacttcccttggcaacttaacctttctactttttcttcagtgggagagaaaggatgacattgcttagatcactccacaactcaaatgccttctttgatcatagtccgggaaatgctttacgtgttaagtagactttgcctgcatacagaccacatcaaccacgtcagattaagattctagcccttataggaagacgtaaatgaaaatcatcttttgcaaaaggaggagaggtggaaataacaacaacaataaatacatagtttccattattaagtaataactcaaatgatatcatgatatccaaatagtgctaaattttagttgggtaaaggaaacaaatacagaatgctttaccaacaaaaattgtagaaatgtagcatcttgcctcaagaaagttggattgaaattatttcaagtgcaaaaaacctcctagatagttttagaaaatcaggtaataaattcaaaaaacattcccaaattccgtttttttattttttataatggtttgggatccatatatgaatgacagcaaagagttttgatgagaaagggaaaccattcataaaatatccataacctggacggtgatcctaactcattttgtgttgacaatgtcaacactcttttcactgaaattttagtcccaaatctttcatataattcaaatctgtattggatggagctgagtattgcgtacatgcaaaagcttctccgagtaaactcttctctttgcaagcatgactgttaggatgacaggaaccattgcagcagacaaatgcttaagtgtgtgaccactgacaatgtgaaaagtcagtatataaatcactctatcggcagcctcttgcagcatagctagaagataaaatcctgtcaagatttaaaattgaaattcagggtaattgaaaatactatctacattacatagaaaaagctattataataccaaaagtacaaacctgaagcccagagccaatatgttgaatgcgtgtacataggaggcaataaagtagccatgagaggtatggcaatgcatgatgcactttgggccagaacatataaacggatgtcaccaaagaaccttcattataaatgaataagtgagaaaagtagcaactattctcaagagcaaaagttcagtaaactggatgctcagttaccgaagggttaagaactagcctaattttgacattatcttaatcaatccaagatgtttccactcacaataaatcctatatctttatgataactgcatttatagaattgacaattttttagaatagttagatgcagtttggtgatgcttttactgttattttcacattaaaattggagtatcaactacagaactcacacaacaaatgttgacgtgatgaaactccaactttgattaaagaacagccctaaaagcatctaaagaactggaactaagttttgtccaactttttatccgtatgaagagcaattttgttcacttatagaaggactgcatgtatgtatcaatgaataaatatccaactaatgcaatagggtaaggggaaaaaaaaactcatgcaaatagaaggaatgaagaagtaggcttgcctccaatacacattgctcattatgcctgccataattagaggtacaattgaaattgttcccttctttgtatcaatcctttcaatgatgaggattgccaacagagacgcgaaagcagcagacatctccaataacaaacaataatcaaggaatcaaaactatgaaatggaagaatatagatttctacagcaacaatggctgaattgaattcaacttctataggagcaactcaccggcaacctgtcccacacaaggcctgcatcatctgggccaagatgatagtatgaagacccaaaagcaactgaagtcacagcaacatagaagcatgtccaaccccatagttcaccttgcaaactgatgctacatatcttaattatataattgacaacaacaatcacgtaagctaaagaaaccgatggtgacaaaatgaaaatacctgatattaaaatagttcctacggtggcaaagcacaaggccaatgagaccaataaccatgaatgggaaatttgatatcacgttaggtgcattgggaatgcctgaagaacaataaaaaagaggaaacaaataataattttaatattctattatcgcaaagatttttacattgtgaacttacaatgatgtcataaaagattttcacgtgaaagatttttgaaactggcaactaatcacaaatacaaacaacattatattatatgaaaagtttgtccgtttttacattaagtatattaatttcatactcatgctaaccataatttctaattagttgatggattaaatttaaatagaaattgaactcttttaaatttaacaatattacattatacgaaagtttattattagaaatccttataagtttgttcactcagtgtaatgtattctatttaaattcggaaaaagaaatccttctgtttgtttttacttttcaaaatttgccaacaaactgaatggaaatggaagaccctcatctgctcagttgacataaactcctctacataaccaagtttacatttttaaggttactttactggaaatgaaaggctaacaagtagtttttcgtaaggaattaccaaagaattcgcgcttgtcagcgaaatcatggtatctctgaggctgaggaatggacggggttaagaggatgagtaaaaggaagaaagaaatggcgagtcccaatgcctgctcagtgcagtttctcatttttgttgcagaatagatggaaatgcgaggaaagagaacgaattatagagtgagacaggtgagtgaaagacatcaagtacgaggaggaaggtgctggcggtggcggtgggcggtgtggaggtggtgaatggcgccatcggcaaaacattaatatattattttgatgtagatgaagtgagtagaactttccccaaaatccttcattttattttgagtaaataacaatgcaacaaaataatttcttgcgtattattttccaattaatattgatattatacgcgtgacaaaaaattatcacttaaattttgatgagaaaatcatactaaaaacactttaaaaaattgtattttattttcataagagtaacttccctccaagtaatttcaatctttttttttataaaaaaatacactttagaaaatttggatttgtttaatgagaacatctcattttaaaagataaaataaagaaaaagaatacttatttttttactaataaaaatgtaaggatgacatattgatataatgaaaattttaaatttagttatcaaatatgaaaaagtgtaataattttatgaaccaaattgataataagttatattttttaaggactaatttagtattaagttataaaatttaggaatttaattatcattaaattgtttgtttgattaatttgtcataaattttacatatttaagaactaaatttattttttctatttttaaatgattcaatgtttcatgtttttaacgacaaaaattgatatttaacttgaaattttggttactaataaaataaatagttgttctatcaaaaataaaataaatagttgttaatattatatgcagaaattattcaattcaacaaaatatgaagataacacgagtaacaaaatattacttcaagttgattaacgtgtggattcaatgacaataaatgcttaaccaattaaccaaacggacttgttattgattccaatctcatttgttattgatccctacaaacgtgagaaaaaactttcttatccctctctctgtcccttcaccttcttttcaccccactcaacccatcaccaccacactaagcctgcgtgccaccaccttactgtgtgacatattggcctcactgtgccaccatctcctcaaacggaacccttttcgtggtattatttgtgggtgaaaataaattacacagtcatccatggcctacatgagggtgaaaaaattacacgataaaaatgcaattctgtcatataagtataattttttattacaaaatcacaattcttttatgtctatgtcaaaaggacattttggaaatattgttaaaagacacacagagtgatagtgtcaatagcaattccctactactaattttgcactttgaatataaaagcggttccttaaaagttaaaaaaatgaataaaattttatattaacaagttatttaattcacaaatattttttttctctctcttatatttaatatagttaaataactatcaacaatagttgcttcttaaagcaattctctttacttttaagcaacttaaaatcatatatatactaattgtttatttttaatttttataagcaactcattaggcagttctcaatgtgatgctttcaggttggagcacattgttcgcagtaccttgggtgaaaatgcagaacggccccctcttaatttcggccattggccctgcgtagataacggcatgcaagaaatgagatttaactgtaagtttgtaactatctttgcggaagtttttcatctttaagtttgcatagaacgcgtaacatttccccgcttgtttatatgaagaaaattgcgcaattttttttcattacgagaagtagattgattaggagagcaaatgaaccatatgtaatgtaaaccgcttcgtgccaaaattaactcggtttaagctatatatagcattggtctgttcctttccccagctactacatgcatttttttatttttttttttatgttaggtgactgattcagttcctatttttctcaatctaccaagaaaaaatccaacgaatacaatgaaacggtggttggatgagactctatcacgtcatatgtcgcagggttggacaaaaaaactcttatccataaaaaaatttatattttaattcaatttaatctattttaaattcattaaatggattagtttcatatccaaattcatttttttactttaaatccaatccaattaattagatatgaaatggatatggattggatatttatttagattttcaaatctatttttttgccaactttgattgagattatttttttttgtcgacgtcaactaatgatgattttaagccgtcatcgttgagggtatattttcgttaatgttggtaaggtttctttagtaaacattgattgagactatttttttgccaacatcagtcgaatctattttttggccgacgtaagctaggttttttttgttaatgttggtcaagaatattttttatcgacatcaagtaggattttcgctcgacgtcgtctatggtttttttgtcgatgttgagcgaaaaacctacttgatgtcgataaaaaaaaactcgacaaacatcgacgaaaaaatctagttaacgtcagccaaaatatttccccaattgtcgccgatcaaaaaaatcctaattgatgtcaacaaaaaaatccctagctaatgtcaactaaaagaaatagtcatggttaatattgaccaacaaatcctagttgttgccaacaaaaatatagttttaaccaacatcagcaaaaaaatatagttaacgtcgacaaaaaaaaagtcctgacgaatgttggcaaaaaaatattaatgattgacatcagcaaaaaaaaaatcttatcaatgttagttacaaaaatcttaaccaatgttggcaaaaaattagtcactatcgatgttgataaaaaatctgtagtcaatgtcagccaaaaaatgcactgactaaaaatctttgccgacctcaaccaaaaagtaaccctacctaagatcgaccaaaaacaccattggtcaatgtcgactgaaaatgtactgactaatgttagccaaaaaatagtcttggttgacgtagatctaaaaatgtctggaccgatatctgttgaatttgctttggttgaggtatgcaaaaaatacacaatattgatcaaaaaaataatcttaactaagatcggttgaaaataactcttaaatggacaggtactaagttttcactttttagcatttaataactaaaatctgtaatataatatttaagtggatataaattgaatatatccaaatgcatatccatttaaatagattgaatcttaaatctaaattgttttcttaaaaaaatatgaatatggatttaaaattcaatccatttaaataaatataaattggatacatattggattctaaaaaattcaatccatgctcacccctaataagtcgtaattaaattttgttaacgtatcattaaaatgatcatgttccaattttaaaactttacctatatacagaatctcatttttttattcgtattagttacccctaatacgtcgtgattaaattttgtgaacatatcattaaaatgatcatgttccaattttaaaacttcacctatatacggaatctcctttttttattcgtattagtagaaaagttttggttaaaaagcaacgatcatgttccaatttttaaaacatcacctatatatagaatctcatgtatttttatatattagacggaaagttttggttaaaattcaaaaaaaataaaaaacacccaacgcacctcactctaccaagataataaattatatgagaatannnnnnnnnnnnnnnnnnnnnnnnnnnnnnnnnnnnnnnnnnnnnnnnnnnnnnnnnnnnnnnnnnnnnnnnnnnnnnnnnnnnnnnnnnnnnnnnnnnnnnnnnnnnnnnnnnnnnnnnnnnnnnnnnnnnnnnnnnnnnnnnnnnnnnnnnnnnnnnnnnnnnnnnnnnnnnnnnnnnnnnnnnnnnnnnnnnnnnnnnnnnnnnnnnnnnnnnnnnnnnnnnnnnnnnnnnnnnnnnnnnnnnnnnnnnnnnnnnnnnnnnnnnnnnnnnnnnnnnnnnnnnnnnnnnnnnnnnnnnnnnnnnnnnnnnnnnnntttttaaaacatcacctatatatagaatctcatgtatttttatatattagacggaaagttttcgttaaaattcaaaaaaataaaaaacacccaacgcacctcactctaccaagataataaattatatgagaataatttagatgaaaaatataaaataattttaagaaaggagatttattttttactttttttagtgtgagtacatattagttgttggaaaccatttcggttcgacacacaggatcaagtcttgagaaaaactttatcaaaagtgattttatataaacagtaaattctccttaatgaacactgtatagagtactagtttttattattaattaggtccataggaagaggctaattccatacaaaatgataaatcacgattcaaatattaagagagacgctttttttttcctcaagaaggatactttgcatgcgaaaaactaaaaagaaaaaaatgaaagagaagtttttcttcgacggttagaacacggattaactatgacttcggtatcatatataatcataaaggtaaatgctaacaagtattttaaagatattggttaaaaaaattaaagtaaaagtatttttattgaaagatgaaaaattgtattatttatgtttattttatattttcttatgatttacacaaaaatatttttttggtttaatatttaaatcaatgtcttcatgagtaagacccaaacataaatatagtagtaatttataaaatgtttagcatttaatgagttgagaaattatctagaatagacaaagattaagattaagaggcaaaaccaaaaccaaaggaaaggtgttttactttagctgtatctttgtctgtgcggaggaatctacgcccacgcgctccaccccgcaaatttatagacacatgcccgacagcaaaccacacatgatatcatgttctcacatcgcatgtgtgaaactgacccctcttcaactcgtcaatttttattaccattttcttttctctcttcttttttttctctccctttaccatataacaaaatttccatttcaaactacaaattttcgtgcacttttttaatcaccgaaaccgttcttcgttgatcgtcacgaacatgcatacaaatccgaattttggaatgaattgcaaaatttttggaggtggcagatacgtttactcctctgcaatcgggatcatgcgcgtagtaacgtaaacaagtgtcaagggctaaacaaggtcgcgacaaaaccaaaatgcgcatcccttcgaagaaagccacgactgtgttcaagtaaaagtctgaaacagataaacgtcaccgttattacgttgctttcaatgtcatgtgataattatgcatcatgcacacatatatatggttcacaacgcatcaacgcattatcattactttattctattatatttgttatttcgaatttaatttattataacttataaataatgatgtactacgaagttggagattttatcagtatttaactgagtgggaactgttgtttggtggaacagacgtgcccacaatgatgaagggtttctcagtgtccttatcctccttatgggttctccttgctctctgttctctgaggtatgcaaccatggaatcttttgcttctcttgctattgttttgttggttctgagtttcgcttgtgtagtccttaatgctacattttggatattttttaagatatgcttgattgctaatttctggttaataaattggaggctagaatccagagcctataaataaagtgttctgcttttttgttcattcacattgccattgcttgctgcttgagcttgtcaaatggactgattcacactggtttcattactctggtggatctgtgaagtgtgaacagaagtctgccttgtgagtgaacagaaatactagtgatttaccgagtattcaaaatttccactgccttttggaattattaaattgaatatgtagttgaagtgctgctgctgttgttgattagtctaatgatactcggataattcaactctgattttgcatttttagtcattgtaaattcttactcttaaagaaaatatctacttacatatttggtctcgaacagaaaatatttttattaataataataaagcactgttgtcattatttcctgaatttatatgaatacgaaaaggtatagagctcactcacatttggggtggatttggtattgctgggtgattttcagaagctggttttatgcattgctttaaatatagtatttggtagctaaatgtcaaaagctgtttgcaaaacttgcattgaatatcgtctatggtaatcatatacctatatggcaacctttaaaatcagtaacataataatgcaacttttgacttagatccacgatgtcaaatccaggaagcccaagtctggttaatttcaattagttaatttggagaagtagacttgaaactcagcataggttttaacattaatgtttactatttcgaatgtgattttgaattaatatagaatataaactagcttccactagagcagtgtgtgtggaatgacttttaaaccttacaagcaagcttcaattatgtccaaattaattgcagaaaatataagttgaaagtatattaaattgaaatcttatgttgttcaatcatatcctaagtgcaactagtattccttaatcttattcgtcacatattagacaataaaagtaaagaaagatataacataatatatatctgagtgtgtcatttcagtgtgttatctcaaaatatatctgagagtggcctacagcaagctagcctcccaccaagaggttggaattcctatgattccttttgctggacaatttctgaagaagaattcttacaaagtgctgaaatagtttctcaacgtctcaaggctcatggatatcaggtatagatactgcaaagaacaataacttatggatgatttaactgtgttagcagtgctttggttagatattgactgatttctttccatcaactcgtagtttgtcgtggtggattacctctggtataggaagaaagtcaagggtgcttatcctgattctcttggatttgacgtgattgatgaatggggaaggatgctccctgacccaggaaggtggccttcttccataggcgggaagggattcagtgaagtagctaatagagtacatagtttaggtttgaagtttgggattcatgttatgagagggataagcacacaagctgtcaatgcaaacacccctatcctagatacaacaaaggtgttgtttgcatttcttctatgacttgattatttttctttacttctgtattagaaatttgtagtgatggatgccttacataatacattttttttctctaaaaaaaatacaaaatggcaggcagaatatgagaatattgttttatcttaattggaagttcttgttgaccttgatttcctcctcgtgcaatttcctagggaggtgcttatcaagaatctggtcgagtgtggcgtgcaaaagacatagcaatgccagaaagggcttgtgcatggatgcctcacggtttcatgagtgtaaatacgaagttgggagctgggagagcttttctgaaatccctttatgagcagtatgctgcatggggtgttgatcttggtaccagttcaactaatttataatctgcttattatgcactatcaggacttgcatcatgtcacagacgacaatcatgatgaatttaaataatttcttgctctatcttaatctaagtttaataactcaaacagttgtactgcttttttcatcaagagactaagcagacagaattcgtattttagtggtccaatagatatcaagtaatgttatcatatcaaggaacttctattttcactaaagataaaaacaacacagcctacttcattgggccacacttgtaaaagttagtttactgcaatttcctttttcatccattctaaacctctaaaattgtgtcggccttttaaacattgttatctctatgttctagatggttcctttttagtccttttcctcttcatctcccccctcctcctttcccccttcttagcttttaccatttttgttttttcaacctcctcgtatctatcattgggttcatctaccaccgattccaattagtttgggttaaaggtgctgttgatgttgatgttgacataggaaaaaaatgcaatagaaattagttagtggactcttaactggattttcattatgatctatgagaatacatatatcatcattttggctatgctttggcagctatgttgatagattttcttctgtccttgcagtgaaacatgactgtgtgtttggtgatgacttggatttaaatgaaataagctatgtgtctgaggtattctgcagttccctctccctcttaccctctccactacctctcattctcacataaacactgagattggtaatatttttccaatgatttgttggctaatcgtatggcatgtcatgacaggttctcagtgagcttaatcgccctattgtgtattctctgtctcccggaaccagtgtgacaccagccatggccaaggatgccagtggactagtcaacatgtatagaataacaggagatgactgggatttatgggaggacgtcaaggctcattttgatgtaacaaggtgattaagctgtctatatttctgtttaagattttttttatcagccttgcagtatgttgcaatcatgctacttctctgtatacattctgtcataaccatattacagaactttagttcatttaattctgaaccagggatttttctaaagctaatatgataggaggaaaaggtttaaagggaaattcctggcctgatttggacatgctaccatttggatggctaactgatccaggtaatgagactaagctgctactttttcatttgcccattatgaatgtcaatatgtcataaccctcatactgtgcatgagttgtttattacttttatgtatgtattgatccagtaactgcttttatctattattcatttgtgtgaaccagaatcctcatgttattggaatatggattatggaattatttcttatccccctattctatctgtaggatcaaatgaaggtccacacaggtttagtaaactcactctagaagaaaaaaggacacaggtattgataaaaaaaagaagaagcataactgagttgctttcctatatattcatgtatctattttgatctgcgtacgtgcattatgataatagactctgagtgaatcaattcttatctggcagatgactttgtggtctttggcgaagtctccccttatgtatgggggggatgtgaggaagatcgatccaaccacatatgaagttatcacaaatcctaccgtgctagagattaattacttcagctcaaacaatatggaggcatgtgagccatctaattttttagggaataataggcacgtgaggcatagaacttatcatgaatcatttcactttactgcaatgacagtttccttacgtcacaagctctattaacttgaagcaccctggagggaaaaaaggaagacctaagaaaggaataaaagcatcatatagacattcattgggtttgactggctgcagtgaatcaaaggcgagtggttggtctattgaaagtcttaaccaagatcttgaaataatctgttggaaaaatggtttagaaaacaagcatcaggccactttctgcgtacacaaaagagaacttcaattcagattgtaatcatgctttatctttctattttccatttatccaacttccatttaaatatttgtgttgcagttaacaatagaaattgttacattggtattgttacagagatggggtgagtatgtatcaggcagactatgtatcaggcagactatcgagggaaacatcaattagttgcaactgacagaatgaagttttgcttggatgcttctccaaaacgaaaggttacttctagagagttcaagagaggtacattttctccgtgcagatgggattcaaatcaggtatgttgcagtccatatgtcatgtacaagagtagcgtgtggcccttaatctttaggaagaaatcctgtgtgtgattcattaaaacaacttcgttatgtgcatattattatttttacccctattgagtaccatttgccttggccaatttgtattttattgattctgttggaagctgatctatccggtcttctacagatctgggaactgaactccaatgggaccatggtaaatagttactccggtctttgtgcaactgtagagtatgttgaaggtaaaattttgtaatcattttccactttttagaaatagtttccagggttgcttttctttttccccatttccttgtgtttatcactcataaagcaaattggtcattcatgcagctaatgttaattctggtgggattcgctcttggatcgcaacaggaaggacaggtctctctctactttctaacaaacacttggatggatgtcaagaattttcttcttttctgcaattgcaaagcatcaaaattggaaaaatgctaattgcttaaataatcatgagtacataagaacttaaataacagaatttgcttaatcacgagtaccatctgactcttaaataagggtccaatcaactactataatttcatccacttcaccctctaagaggagtcaaagtcaaatcctatattaattcatttatattaatcttatatatctattcaggggaaatctatcttgctttcttcaatctaagcgaacagaagacggagatatatgcaaagacatcatatctggctaaggttcttcctgacaaaagcatcacttcatgcaagggtaaggaagtgtggagtggaacagacgtaataacaacgcaggggacgatatcaatgaacgtggaaattcatggatgtgcactatttgttctaaattgcaactagtctggcatggcttccaattattttaaacagaaaaggataagaaaatagcatctcattgttgaggcttcccccccctctatttaattattactcttcctatggtgggggttaggtgaaatttgtatatgttaatgcagtgtggtgcggtacgtaactgttggatcgcaccgtgtttagacaaactacataggaaattatagttgtatgttagtcagcctcatacctttctaatggttactttgaaagaacacattttattttttaaataaaatcgtggcctaatagggtaatgtacctatgtagtggtgttgttacttgttagggctccatagatcagtgtcatgaatgtacgatgacttaaagaacatgatggtctgtactgtagtgaaaaccaaaacgaagtatctaaactggaaactacatgcagttaggaaataaaaaatgctcgtagtgagttaagcaaaatgaccatcaaaaagtaacaacagaacagagtaaaaggccaaaagcctacttgccactaccacttaccattcagtgttatatgaaacttgcatctttttgtaactaaaaaagaaaatttttgtttatgtctgttagaaaacgattgtttgttactttgtggcccccttgaattaaggattcgaaaaaaagaattaaggattcgaaaaaaataaaactgcaccgaaaagcaatcggattgtgatattcacggccttttatgatatcgtcaatatttgagattgtggtaagttattgagagtgaaaaattcaagtaagagttttcacagaaaaaattgttgatgagttatttttttataggcatgagcagtcaattaaataaaaaggaaacaacacaaataaaaaaagaaacaaaataatctgttatcgaaaaataagattgtttaaggtaaaatattcttcgctgttcttcgttaaggtaggaaaattttatttcaaatcaatatttttaatttctttaatcaatactttagttttctgatgaatattaaacatgactaatacatttataaatttattaaaaaaatgttggtttttttagtataagttttatgtaccgtcaatattaaatttgtacggtcaactaattaaaaattatcttaattataattttaaaaatattttttataaaaaataataatcttattatatatcatatttttaattgaataataatatagtatttttacgataataatataatattaaatagtgtatctgactaaattatatatatatatatatatatatattttttttttctatttacacataaatatgcgcgctgatataagttattaaaatatcatattcggatggactaaatggacttttcacgtacacagcattagggttccaaaacctgactggtacataaacgactcgttcaactcaaattgccgcactgcaactttgctctctgtgaggcttcaatttccaattagggtttcgctttgagtaaccaataaccatgggagtcttcacctttgtcgttcgcaaatccggcgccgaatggagcgccaagcaacattccggcgacatcgaggcctccgccgactccacctacgatctccaacggaagctcgtgcaagccgctctcgccgttgattcctccggtggagtccagtcctccttctctcccgtgtctcctacctccgctgtgttccaggtacacattttcacatccctaacgattgtggtttcttgattcggagataaaacttcacggtttatgtttatcctgcgttcaacttcgatcctttttatttgtattattttgattttctagaatagtacattttctatgcgtcattgcactgtgcctgtttcgagtattgcttaggctttcgttaggctatttttcattgacgaatgtcctgaatccgagagagtttgctagtttggttcttgttattcatttgtgagattctgttgtggaattaatagtttgactttattattattttttctttattattttttggtttttcattcagattactctgagattatgcgctgacttgaagagaattataggttttagtgctatgacttgcaaagcttaatcattgttcattacctgaaagtatataatttgtgcacacataaaacaagtacaaatttagatctagttactttaaagcttttagtgcaattttgaaaatttgaagttttactctggtaacatttgctgatattttttagacaatttagttggtattaattttaaggatgttcttagacatgggactctgttatttacagagttcagcttctgtccattatagaaaactgactcttattttccatagttgaagctttactctggtaacattgcttagatgatgatcgaaatgaaactaattttaattggagaacaatacttaatacacttgtccgactaaatgaattattgtgctattgatgattgatggtggcatttctgccttgctggtttaacttttggattcaataattaagtgggtcactgaggttatttttcctttgttgattgttttgttcaggtgatagtgggtggtgctgtattcgttggaggtggcggtggtgctgttgcagctgcacctgcagggggtgcagctgcagctgatgctgccccggctgctgagaaaaaggaagaaaaggtggaggaagagtccgacgatgatatgggattgggactgtttgattagagtttttctgctttttattgagttttgatggaaaagtgtttttttagtgtttaatcttataaattgtgtttgtgtattgcttttcaccagttaatggtacattgaacttcgtcagatagagttatgtgctgtgacccaaatggttcttctgtattgggttttagtaggtattttctttttcaaacaaatgtctcgctcttcttttatcactggcggatagagtattgtgctgatcaagcggttttgctgttaatacgattttcttcttacatgttactggacaaacacagccatacatgtatgagaaatagtcttaacaaatatatttcctaacacttttgatacattggtaaaatttacgtatgtttaaaattgctttttctttctttcttttctcatttattggtagggtgctactaggacccttctaaatataattgcttgacataattggatcaaagaaattgggtggtttgcaagcagcatccaatgcattgaaattgagtgatacgccaaactaaaataccaagaatcaaactaaaatattttaataatttcaaattttggtataagtttcatatttacattctactttaatttaaaactttcatctcaattttatttttttggaagggaagatgaatttggcaatatgcattagcatatataaaaatattaggtgagaatggaaatccaaatgtataatttaaatgaatggctaaaattaaaataattttgatattctgatgcaattatatggttaagatatatgtataaggtggcaatgtccttatggagtatttggtgtcggtggaatactaagctctgggaaggaaggatggagacaagctcaatggtaatatctggagctatgtctgtcctgaatgatgggcagaaagctaggacagtgcaggaaggaaatagggagttggatatttcggaggtaatcataaacccgtaattaaatactcatggttttctcaattgctatgtagatacagccattttcgaagaggataataagactggagtgggtctctgcctaagggatgaagttagagtttttgttgcagtgaagacagtctggttttggttggaaactgattctaaacttcaccttcatgctttctctcatccgaagattgtccattggacactttacactagatggatgaattgtaaaaagttcactgacaattttaacttcaaaattattcacgtttatcataaagacaacttgtgtgtaaatagagctgtctcttttgggtatacttggtgggatcctctaccattttttgtttctcacgagtttcttaggtatagacaaaggctcacattttatagattcccttagtgttattccttgggtacccaagtgttttgtattttcgcttctaatgaatatatttagaggaggatcttttttgggagattaaaggttgggatgtcaacccccatctgtccttgatccttcgtctttctttctttacttttttttttttttttttaaaaaaaagatagcttggttnnnnnnnnnnnnnnnnnnnnnnnnnnnnnntagagaagggaaagcacttgccctcttgtatgcaagtaaatgatgtgctgagaggggtgagcaacaagttatcttcaagactgatagcaaagtagtggtagaccaactgcaaaaagaagcaagagatttatctgaatttggctcgatacttgttgattgcaattgctcatttacaactttttctagttatcaaatttagtttattaggaggcatatgtgtatggccctaacttagctaggaaatcggcttatgcagctaatccgtagatttttcattttgcctttgattgtaatgcaaatgatattttaataagaatgatatgatgtacttctagtaaaaaaaatatattcttttcacatccaatgctaaatatataacgtataaataaatgataatataaacagtatcaaataaatattgatcatacaatatacgaatagttaagattgttagttttaattttaactatttatttgaattatacaatttacattgtttcttcttatattcttataaggatggtgtatttttaatcagaaggaaggctcaaaggtcgtacatcatcaggaacaacattgggcaattggtgaggaatgtcatcaatcaaagatatatcatgttctataaaagtaaggtgggctacacaatctgtcgctttattctcaactctatttacaaagcaaaatttgttctattcagcaacagagctcagtcttgaatcacacctgcaaagtagttgttgtcatgaaaacggttattattcgaagcatccacgagtcttttgcaatcagattcataccggacagattataaaaggaggtccgttgcagtttcaaggcccagccacatgtggttcataacaatgacgactgagtatattttggcaagtcctcaatgccaagttgaagcacttaggaactgtaggaactgtccacagcttcttccacaaatccccattcactgagctagagcagaaattcttgcggagaagaataacaagaattttgccagcaactgactcattgcctagactcatggtcaatcagaaacataacattgtgaaaaaaatgttaaacaaacataacttttttaataaaagaaggatctaatttttttagtgtgaaagaatgatataatagaaatgcaattgtagtatgaaaaatagaatacacgtgttcaagaaatcaagaattgttaagttcttaaaaacaaaaatggttaacattttctatcactcctttcaaaaacaaacatagagtattagccaattgattgatattgtgaaggaaaaaaaatgaactacactaataatgcattaaaatcaaacttataaaagaaagcaaaattactttgacaatgctattattattcaaatttaaactcgctgtaccatttaattgagaatagtgtgtacttatattagacatagactctgatataaaaaaatagcgtgtacttaagacattattattgttatttacaataatattcgaatgtcctttcttgatgaaaggttgaaatcttttttttttatataaaaaggttgaaatctttctttgcgcgtgaagcattacattgcaattacttgacaaagtcttttcaaccaatcccaaacatgtagatatttagagacaagtactaataagttagttgagtgccaccaaagtagaaaatcatagtttatgatgtgttatgctaatcattcgctaattagattaacaagaattaagtagtcaataatgatttagttttgacattaaatagacgatggacatagagagggaccaaaacaacggacgacctttatgggaggccaatttaggccaagttagactcaataaacaaaatttcgaattcaatcgaatatattttgatttattttttttagatttatataaatatagacaaaaaatttaaagtgggttaaataaattgatccgagggttcattgaacttgactgaccaaaaaattagaactagtccacttcaaagtatttttcacacttgaacggatgattttcctagtggaatcatatcccaactttgattataatttttgttttggttaccttgggtcaggcttcatgtcctccaagttatcttgccgtgttctttctatgaatttgggctttgctattgaggcctgtatggtgtcaacctaattcacatcagtataatcacttatttttttaatcggcaaaagtataataattatatatagagaaagcacaagctgtgcaaaatatagtgtaccaggcatggacacctataagtttgcagcaaatacaacccacccataactatagaaaagtattctcccacgaacagaggttaatcactattactgattatacaacacatgaataatgattaaccaaatgtgaatatacccgcagaacaaaaatcagcaagtttatccacataacctcaagaaataccaacaaggacttcatcgcccatacatctgcaccatctatcaagacctcgagatgcctatcccaacaccactgatcgcaaccacttggtcttagcttagttttttttacgtaaaaaaaaataaatagaaactctacttttgattctttcctcaaatgctagtaatatttttctttatgttttatacgtttatggtaaatacagcaacagtgaatgaaagatttattatgatgttaaaaatattttaatataaataaaaatattgattatttcttaatctgtgtgctattatttgaaataaacatatgtttttttagactaaatattatttaatggtctttattattactttcctaataaagtttgaattaatactttcatcattttgatgattgatttgaattttaaaagatcgaaatttaagaagcataactttaaatgaaaaaagaactattacttcatccatctattataattattgtgtatatgagaaaaaaaattatccaaaaataattgtcattttaattaaccaattttaaacttaaataatgatgaataacaaaatttataaataaattaataatggtataagattatttttataaattttttatccatttattattatttttagcctgtatcaaataatttaggacaatagagggagtattatttttcatgtaaaagaatatgtaaagtaaattgaaatgatgcacgaaaaaaattgaaatggaagaatacaacaaaaagagtaatattatttacatatttttataaaaataatttttttaacatagtatttatttttaaaatttttatttatttcatttacataaaaatagttgtgaaattttactctataaataacaataagctacagaagaaggaaaaaaacagaggtcaaaacataactggtaaggtagtaaagtacacagaaaaagaaagtcaaaacgaaaaaataaattaaagtgtgatagctgcgacggcaagtgcttcaactagggttctagcgtacgagcgaatctactactgtattttataatataaaattaatttatgaaactctatttataattaaattaaaaaaaatgctaaaaatatctatggccttttgcactgaaaaattgcctaaaataaaacattaactaaaaagaaggtgggtaacacgacgacgcattgctccagggccatgaatacccaattggaatgaggccgtgaacccctcatccgcgcgtgagcaattcccaaacccacgcgcccacgctcccaaatgaaacacacactaatgttcccttccttcccattctcattctcaattcgcatcaacgcacgcacggacgctctcctaatccccttcctcttcctcttcctttgcatgttctcggagctccggctccactagcggagccccggctcagttcaaacccatttgcgaaaacaaaaacaaaaaactaaactccattttctcttccctttcgagatctcgaaatgtcgaaaccctggggcaacatcggagcctgggccgccgattccgagcgggccgaggccgaggaggctgaggcccaggctgcggccacggcggtcgagccccaaagctttcccagcctcaaggaggccgtgaactccaagcccaagaagaagaagggaaccaccatcacgctttccgagttcaaccgtggaggtttcgaccagggccttacgcgcgacgagatgctcgcccttcccaccggtcccaaggagcgttccgccgaggaaatgcagttaaaccgccttggcggcggtttcaactcctatgaccgctccggcggtcgctcgcgcgaccgcgacggcggcaacaacgaaggttcgtggggcggaggaggcagaagatcctacagcggattcgacgaggagcgcaggggtccgaatcctagggtttcggaactcgatcagccgtccagggctgatgaggttgaaagttgggcgtctgtgaagaaatctctccctgccttcgattccggtcgccagaatcgctttggtggcggcggttttggtggtggtggcggttttggtggcggtgctggtggaggcggcggcggcggcggttttggtggtgcgtctagggctgatgatgtggacaattgggcggttggtaagaagcctgttcctgttagatcttccaatttcggttctggttttcgcgattcgggagtggagcctgatcggtggacgagaggcggtccgcctcgtgaggttgaccggacggagcgaccgaggctggtgttggatccgccgcgaggcgatggtgtggtgaacgagtctccggcgaaggcatcgaataaggcgaatccgtttggcgcagcgaggccgcgggagcaggtgttggctgagaagggtttggattggaaaaagatggattcggagattgagacgaagaagacgagccgtcccccgagttcgcactctagcaggccttccagtgctcagtccaatcgttctgagggtcccgggttgcagggaaccgatgctgtggtgaaatcgaggcccaaggtaaacccctttggggatgccaagcctagggaggctgtgctgggcgagcgaggcatggattggaggaaaattgatcttgaattggagcatcgctctgttgacaggttttgttttgtttgtttttgtcaattgatgcttttatatttcttctttgatctgttttttgaacttgtaaatgttgctttgtttgtagtggatgattggtaatggtcttagattggcctctaggctttttgtttgaacttgaatttgtgtctgatcataccggatttgctcgcattattcaatagttgcataccaaaagttcttttgtccccattatgcaatgaccataaatgtgcttaagggtggattgttgtggtgtgttgaattagtttgatttatgggaatatttacagattaggcatatcatatgggcatgatttgtaggtaaaatttaatcaagagtgtacactaggattggattaaagcaatgacatttcattagactgatcaataaatggttgggaacggtttatttagagttggaaatgcttttggtagagattttggtcgtgttgttttatatagttcatgtattgttcaatggttactactctaattagacggtggtcgtttttttactactctaattagtaagattttaatgggagtaagagaagagtgtgaacatcattattttttatgatttaatagtaaatggttactatataatatatattctattcctagatcaagagctaattgtgagtgtcatatagtggttatgaaaaataagataggtatccatgtaataaattactacgttaatgaagcttccttctatttttctctgttaaattcagaactatatggtttgtaaagctatttgttgttatttcagttaaatcttatgaaagaaatcaaaccttcttaggatgatacatgaattatggatgccatagagaacttctgacttcccagtcaagttttatcatgcctgtaaaagacttggtatctgtaaaataattattgcctcatttctttagttattgaaaatttattgaatgaggacaatgcccatggtagatgcaccacaacaatcatgtgtggaatccatgtgaaaattatgcctgggattttatgttggtatatgtatacctctcacttttgattatcattgaaaggtttttatagttggcttctagtataaattctggggtttatttgtagtgaatactaggtcatccaagggagtgatacctagccccaccttctatatcttagggacagaatgaagcaaatatatccattgatattttttcaaaacagaaatgagttgagaaataaatatctgttggtgttagaatattaggggcatgtgttggatgatgaacactttttgcaaatgttataatcgtaattgaagagtcgagaggaaataaatagaagtttgggatgttgagacatgctttggattcacattgtcgattgctcttgtttaaataaacatactttttaggagaatcttgctttaggttgtttatttgggcatgtgtggagaagaccctattaggagagtagattagatgaggggatcctaatcactagagacaaaaggaaactgagaaaactatacgagaaaccattaagaaggatttagaggttaatggtttgtctatagagacatgatttattatagaaaattgtgttgtcatttgatccttgtagctgattagtgggaaaaggcttgattgttgttttatttagttctagtgttgtagagttgagattgtacttgcagaagtagtacttcttcaagttaaaaaaaaaactacgtatctcattgttcagaggttcctcgctatgcgaaggtaaggaagaggaatattgtatgcagtcttacccttgcatatgcaaagaggctatttccaaattcgaaccctgaccaacaaatcaccaacatacaactttaccgctgtgtcaaggctcaccctcaagtagtacttcttcaagttattggtataaatagtgtatcagacttatttttggttggttactactgtttgttaatttattttccccattctttttcttcgaatccggaaacaacctctttgcatgtgcaagggtaaggttgcgtacaatatccctcccccttacttgtgcatagcgtggaacctccgggcaatggtttttttatttatttattattattctttctcttctaattcttaacctataattccaacatgatattagatctgtatcttccttattgataaggatctgtcttttttgcttcactgagcttgtcaaagttgtgttttctgatctatgattttttatattatatttttaagtctccaatccttgttgtgacctaagttcgtgtcctaaacacggcagaatcaaccttggctggtgccctgctgtttaagtgaccaaaggtgggtggttgctggtgtttgcaagtcacttttggtcagcctgggtgagataacctgctggctatcgctaactggctgtttttctggctgcattctgttattgaaagctgtcctaggattactaagtttcagtgttatttgccttgggcttgtagtagttgtaccagtactagacacaatttctagtgtaaatagaagtattggattgtggtattgtatggcagatatttatcaatttcagtatattggttatctttctatctttttcttcttccttacctgaaccttatatttccaacaggtgaattgctaatagtttaatcattgttctatatcatttactcctaatagtttggcattaatcaggacttgctttcataaatctctatcatctctttgtttattttgttcgtcttgccagattatgcacaacattgctacataattttgtgtaattaattgtgaattgttgtctttcaaaagttctagttaccttgttgactcctgagttatttcaggcccgagacaatggaggaaaaattattaaaagaagaaattgataatttaaagaaggagcttgagaaagagtctacaataaattcaaacaaggaatctgcggatgaggctggtggagatcaaaccagtacacgtgcaatattacaactgaaagaaaaggagctggaacttcttatccgtgatttggatgacaaagttcgttttgggcagaaagccattgaaaggccaggttcatcggcaggaaagtcttctactttttctgataggccacattctagatctggctcctttgaggattctagaagtgtggattttacagacagacctcgatctcgtggtacaggagatatgtggatgcatcctagtgatgacagaagacagtttcaaggtagcagggaaaggggatggttttctggcagcagagacctaaataggtgagtaataagtgttattcatacattatttatggcaactggttgattttgaattcaattttgtttattctcttgtattatttggcatatatagcttttacattttgggaaaaagtgtttgagaatgttgatatttgttgtcctacaggtcaacgtcaagagatagatggtgaacagcagttttgtgtggattaagagttatcttcaacttttgatgaccagaacctaatactactattttattacttgtctttctaatcgttttgctcattttactccaggcaattggagcaacaatcattgagtaatggcactaaaacttttgcctaatctgttattgcatctcgaaacattgtaaatttgttttcccccttctggtaattttttgggtgtctggatgaaggcagaaagcctgtaattttattaggacaaaatttttattgagaatcttgaaacttactagttaatgttaatgtgataatgttctgaattctgatataaaatgatttttcttcaattttgcgtctgcacggtattgtccagtttagtgccgtaagattggtagcttaaagccgctatcctctacttgtaacattggccagttttagtatcatatttttgtttgaaaatggatatcccagtatttatgtattatcctgtgctatccttaatattggaaagtaccttttactccctaaaggtccttgactatggtttggagaatgggatgaaaagtgcatgctaagttatgattttattactggatcaaacaacccctaagagtttttaagtttatctgctgaatctgatatcaccaaccttgggaaaaagttttaaagagtgatatttgccatctctatgacaaaaagttaatagttatagtcacgtttagtgttgtgtttgcttttccataaactggttccgtaacattgtttcattggttagtttaaatatgcatcttcatacctacttgaaaagttgaggtgttagtggttcttttcatcaacggtggtcaaagatgggaagcttaacgtcgttcagctggatgatttctgacggcctgtggttcaaaggaaggggaagagactcgaggggcgggagattttaagactagcgcttcttgtttagattttaaaataggagaatttaaaatttagcttattaatgttttaatagtatacaaataaaatcataagttcaagcaattgaaattttcaaacttattattagtaagtaccacgaataaaatttaatatttttcattctcttcaaatatcttttatatttagatgaaatgcaagaatggatatagaggatttttggtttactttcattgtctctaaaattttgaactaaacaagaaagttttgtaaaattttcttatcatctctatgttttctcggggggggggggggggggngacaagatgaagctaattcaatttgctgacatgatatattagtcttaatagctaaattatagaatttaaaaagtatacaactataaaaaaaaaagtatataatatcatgttaaacaaaacattatttattaagtcagaaacttttaatattaatgcatagaaaactatgccttttaagaatgtataacattggaccaaattaggacaacttattaacttgaatcagtctttaaatacattggtctaatttcttaaacccaaatttgtcaaaagttccctaaagataggccagattggtggaacgaaatgcgtcatgaacattcctagttggaggaaaatgaaggagggataggataattgtttaattttttataccttatttgatttaaaaatttggaggaaaatgaagaaaaataaacaaagagactaatatttttcttctcatatttttatttttccttgaatattgagaagaaaagcaatttataatttttgaattatatagactaaattattccaagattgtattttctcttatccctgaataaatacataataataataataaaatattttgatatagtttatgagtatacttgaagtacacactcattaatttagccatgcccaaaaatacggtaagcaacaaaaaataccacatgcatagggttatgaaattttcttttgttgttgttgcatatttaaacgtggaaaatgtaatgaaatactcaacatgcaatgttttgaatggaaaggttttgaggagggggtgatagcatgctttggacatggtgagaagtcggagtagataagatagatatacttaattgaatctcttttcttaatacaacttcaataatacagagagatgtggagcaaccaagagggtgaatggaacagagatcatacccaatttcatgcaaagatccaagtgtgaggattatttgggacggagtccattgcaccgaagctgctaataaatggatcttccaacaaatagtcaatggctccttttcagatccacctaactctttaaaaaggacttgttatggtaaatcatccatccacagcgattaatccattaggacacataaattcatgttcttgtaagagtgaatttcgatccatgtgcttaaactgacaggtcttatttagtgtttaacgaattatgtttggcaaattttatttatcattgatgtatatttaatgacatttagcatgttaattattattattacgtgttaaacagggtcttattaacgtgctaaattaagattttaacatatacaccttgcaaagaaaataattcatagaccttatgaaacaaaaaagagaaatataatcaatactataatttttttttgttttttttttatttcctttattcttgtgagttttgattgctcctatttttttttaaaatttattctgatttttattctttcaaaattagtattttgggcgattcatgattgtttctgattaacgagtcattttttcgcaaccatgtaacattttataattttatgtagacaatttaattaaccttttggtcactctatttatgtttggtctttatgtaaatacgtaattaataaccaaaaataaaaaatgtaaacactcagctttgcctttttcttttattttgttggtcctttctttttgtactaaagaacgaaatttaaattttcctcttccttgtatttgcttgtcctttttatttttatgttaactagagaaaaagaataaaaaataattagtttttttatctttccattcagaaaacaagaatgaaaatacatttaaaattaagttaggtataaaaaaaactaagacaataatttaaaaaataaaacaaaaatttggaacaaagagtctgaaaaaggaaagaaaagaacaaaatacataatttataatgggatgttaaagaaaacaataaatgatggcgataaattccttttgttctttattttttacatttttttattgataagaatcaaaagactatataaaaaaaaatttacaatagatttatataactatttactcaattagattcctggatagtatacaataaatataagataaatatttattttatttttaaatgtgtaaaaatcaggacaatttaattattgaaagaacaaaaattgtcattaaactgagttataagaaaaatgtaactatagcaaatttttagacatttaagaattaaaatgaggatgagataaaaaaaatagtagttttttagattgaagagttgttgtgctgggataacatacttccctgtagatgaatggtagaatgagaggaattgacttatctccacacttgttgcaaggaacgaactgtcctgctacgccaaaatttagttaagagttggcagaatttgtgattggtttgtaagttgttgtaagttaggtgtagctaaggcaaatgcttgtctcaggtgtcactcacactttctgccccttcaactccaaatcccaccgcccatttttctcaacacacaccccttcgtgcttcctccaaaccatcaacgctaaccctacctccgattccgatgacgccctccgcctcaccgttccttccgccgccgcagtcgccgcctccattcgcaaagcctccacctcccccgtccaattcacccagcagctcgagaaccagcgccagagcggactggtgcttcccagcaccgacttccaccgactctgcctccaccagcttcatctccttcgcagaatcattcccgaaaccctcctctcggttccgattctcatttcctttctcctatttttttaattatctcatctgcatgcatccttgttagcttcaattcaagtcgcttaaatataccatcaatttcatctctcaagtattatcctctctaccaacaaataacaagtcttagaaatcgtgctaagtactctttcaaatattgaaaaactcttcaaattgatcccggactattattaaaatatatcaattttctatagatcaaactaatggatattcaatacttgagggattactgtggagagagaataatactttgggggggcggggggggatcgaactgatgattcattcgatataagtcaaacaaactctaatctgcttctttaaattagtatcatccatcaatcaaggttttaagttgccatccccgtttaggttttgttgtaatccatttatattgcagaaatttgagggaaaatgcagttgatataattgcaatttcagtcccaaagacaacaaaagcctcgatgtggtggctgaaatcgcggttgcagagtgttttataaaaccttgccatcaatttagtcttgaatttggccaattttgttgggtcttcgtgtatgtgcagattagtcagtcaattgggtccctcatggctttaaccaaattaactagcagatgttaggcactagattggctaatttggtaatgttagggaccaaattggatattgatccaatttcatggatcaaattgatcgacagattgttaatagagacagggactaaattttttttttttctttttgtaatatttatgaccaagttggctgttattgacaaatttagaaactaatttgatgttttactcaattttgggattaaatttacattcctaagtaagcactaaaatgtctgctttcttaaatttgaactgagtgatgtggttaaggagctattttgtttgctttgttcaggtgtatgttagaccagctggtagttatgtgatggatcggttggagctgcggcgggttgcactgtaccctggagatgcggaggcagaaggcattgtcattcttgtgggtcattttaatattcctgcaggcttgcgtgctgctgaggccacgctttccaattcgcaagtgtgttgaataccttgagcacacaatgtgcttctcttctgttccaccgtgcttgattattcttgttgggtaggatgaatgttaatataggtttgaatgttaattgtaggttaatgttgtccctgaatgtaaggctgtggttcttccgatggtgaaacacccatttgttgttggtttcttggttgctgagcttccgttggtggagcaggaacagtgtcagaaatctcaaattgatggaccagaaaacctcatgtctgttgaggaaccttattcatttcctccctttttggatttagataagtcaagggaaattcagaatcttcaggtcaagaatgaggcagttggtatgcataacttcacttctgagcaaagatcaaatgctgtcaacatttcacagtctctagctatggcatatgtcatggatcaggtttatatactgcatctttttcccctgaaaaaaaagagagaagaaaaaccattacattaacgcatcactattcaaatatgaaatgctagaaagtttgacgctactcaaactttgtgggagttgccttgaaatttgcatttcataacatttggtacttgaatgtgtgctttgcaagttgttgcattgaagttcacaattatttaatccatcactcgagtaagactgagtaactgttagtttttagattgcaatgcaagtcttttaatttatttctctttaacttttatgtatggtttcacggctgttataagaatagctttgacaccttgtatgggcctaaatttctagctcatggttatgctacttttacagaaagcaattttacttcagcaatcaacatggcaaaataatgtcaggatgggtaatctggttgagcaagtatgagttattgactgttgttgcattcctttaatctctcattttcatcctattctaattttttttttaatttatacagatccgcggtccactttcaagtattcaaaccttaagtaaaatcctgtctacacagacaaagagaactcaggtttgaaaattgtctaaattgtacctgataattcacatgcacttacatttctgtaattggggaacccaatagctgggttggacaaagtcccagctgaactgacacatgatcatgtctagtctctgactctacaatgcacctttttaaagcatcattaaattacttttttaggtggatttaatattctgaaaagtctttatttcagcatgcactttatgtgtactgaatgtgctaacttagtgagttggtgattagtagctatcttattcatgatgccttgaatcgagttctatcatagttttaaatgcaaggatatagatgtttggtaaaaatattactaaataaatatagatctatccagaaaattagagtgaacatgctgcaaaaggaaataaagagttcaatctcaaaggatgttgaatctaaactatagttatccataacttatagttattgaatgtcaaaaatgtcttataattggtaattgcacagatttcatatgacattgttgaagacctcttggtgcaaggtgatcgtctgagggatgtcctccaacaactacaggatgctgtttatttgacaaaggtacttctttctcttgtacttataatcatgcatacatgcaaatacattttgtatacctacaatcaattaatgacttattgaatttcaatgtacgttggttggaagatcttgaatcttcatcacttgttgtctcttgactcttcctctatataattttgcatgcaaaaatacacttataggcaatgtgccttgtcacaaaagtaataaagggatttgagtcctaagtatcatattcaagggattaattcaattcatgtttattgaattagtaaattcttttaaaccttttgctattcaaactatcaaaaagggactactgcaaaagaattaaaagaggaagatgaattaggaatttaattcccaaagaagatgaattaagaatttaattcccaaagaacatgaattaagaatttaattcccaaagaattaaaattggctagggctctggcctcacttgcattctaatttctctatacttatgtgttctcttatcagttgtgaatcacctcttctaacctattagcaatctgtggtcatgaactgttatattatttcccttgtcaaaataccaagtttggtcatgtaaggcacaaaacaagaaaagcataatgaaccaagtgacctgttaatttaataataataaccaattggaattcaagaattgaggtttggtcatgcaacaattctaagtgcatgtttgattcaacttattttggagaaataactgcttatttttgctagcttgagaacttatgaaaaacaatgatttcctcaaaattaatcccaatcaaacatacatttaacctaatttatcctataaatctgttaattaactgtgcattgtcatcaacctatcaattaactcaagtcattaataatggccaattcctaacatacaacaagtacaataatttaaacccaattgaaaaaggaaaaatacaaattatattaacgttaagtaactcccagttatggatttagttactcatgttcaaaagatatactaaataaagcaagaattcattaaacaatccataaagaacaaaaacaaggacccctttgaaattcataaaacacaggttcctaaagtgaaaacgtttaaaaattaaatgttattgaaataaacaaaaaaggaaagcaaacactgatagaaaccagtgcctctgatgttcaatttttgtccaatatgtagacaaatatagtgcgctacaatgaagaagcaatcaagaaaatgaatagttctactcacatacttgctgaatcatcaagatctcagttgttagatagcaatccaggtgatgtctctgcaaataaaatggaaaaatctagtgagtcactttctctaagtgctgctgtccaggatatagagatgccactaccacctttggcccttgctccattgcaacatggaatcaggtaggtttcattggttggttaatgcttatgcttcttttcatagtgtcatgacttatccccatatcttctatataatatattctcttgattctgttatatcccataataataaactcctaacttgcactttttgttgcatcaacaatcaataatatcttatatagtttgtttctttcattagcttttagatatttatttcttttacctttcaacagttaaattttttctgcatttattttgcttatgcttttcattaatgtcaggaagaccatgcaatgtttctgaagtattggcagacttggttgattcagtgagaccacttgcccggggtcaaaaacgtgtagtagaactaactgaactctcatcatcacctttgctagctgctgtagaagaacctgcattgcgccaggctttcagcaatcttattgaaggtgctttactacgcacacatgttggaggaaaggttgaaattgtatctacggcagcaccagctggtggtacccttgtacttattgatgatgatggacctgatatgcactatatggtaacttcagcccactcccactccttgctgtgcttactcatttttcttttggacaagctggaaattgttttatgcatgtaatttgcaaatttgaagcatctccatgggaaacttgggaacatttaatgctttggacttggcaaacagcgcattgatgccattttgtgagggaattagtgcagcttttcccaacgtataatttgcatgattcataatcatagtgacatgtctgtaagtctatagaaatgtggagccctccataaaattaccattatattgttgatattcgaagacttcctttgtggtacacatagcacttgattcataaaatatgacatctttcaagcacttccttgcttcttctattcaaacaattcttcgattgagtgctttatgcctagggaattgaattttgtgaaaatggaaactaattgttggttatgaacttgcctgcagactcagatgcactcactcaccccttatggacgagaactgttgtctgataatatgattgaagacaatatgacttggaactttgttgctgggttgactgttgctcgtgagatactagagagttatggctgcgtcgtccgcattgtttcacctcgtattaaagatgctcctcttggagctgggggaactcgtgtggaactctggcttccttcatcaattgtactgtctgatttgagtagccacgcccaagaggtatagcatgagtttgaagttccattgaagataaatagtttccttctcatacaattctacattgtagcacttggccagtatataaagattgtgaaattcaggagtggtagatattactagttctttcttcgttgttgctaaatataagtatccggttctgtatatagctcgtaaaaatttctttagtagagtttattttatgactttgctgtgtgtcaccatgtaaacaataacataataaacagtgtatgcatattatatgacaggaaaacttgttgggtttttacaagagaccacttatctgaagcttcagcatttgtaccatgcgaatccccttaatccaatataaataaacgaaaagagattgacctctttgagtaaactaaacttcagtcggacaatcttccctttgttaaaacaacaaaatttaggtagaagactaaaaagagtctttcaaccaccataaataaagaataatcgttattaaataaaattaatagatatatatatatatatatataattatttagttgtttaaatttcaactattcatttcaatcaaaatgacatggattccccggagcccggacttctttagactttagatgatagaatgcataataattgttaatcagaaaattaataatttaannnnnnnnnnnnnnnnnnnnnnnnnnnnnnnnnnnnnnnnnnnnnnnnnnnnnnnnnnnnnnnnnnnnnnnnnnnnnnnnnnnnnnnnnnnnnnnnnnnnnnnnnnnnnnnnnnnnnnnnnnnnnnnnnnnnnnnnnnnnnnnnnnnnnnnnnnnnnnnnnnnnnnnnnnnnnnnnnnnnnnnnnnnnnnnnnnnnnnnnnnnnnnnnnnnnnnnnnnnnnnnnnnnnnnnnnnnnnnnnnnnnnnnnnnnnnnnnnnnnnnnnnnnnnnnnnnnnnnnnnnnnnnaaaaaaaaaaaagtctaaaaaagttattcctttaactaatcaaaaatcaccattaaatatcttttcataaaaatcaacaaactgaatgataatatgtgattgaataataatataaaattatttacatttaaattaaattctgatgatattacattttttttcctttaaatcaattttacattttaaaaaacaaattaaatttatatccgactactgctgcatatgataggctctaaaagaccatcccattcacatattaatatcttatttatcgttaatgtgtgttctgctagattccagtgaatagtggtggctaataacagtttcttgacctttcgctaacaagcaagcctatctatacatcctccaatttatttatttatttattttttttttttttgaggattgcgtattgctccaatcattttcaaagattagttaacatatcactttctccgacaaaacatacatgcatctaaatggggcaatatgctaaagttttggtgaggctatagcaagtatgaaataaagaattgaagtttcagcccattataaaaaaattagttccttctgaaatgaaaagagcatcaaagaagatatattcagtaaaatctttttcataagaattgatctagatacatcaactttgatgcgttggaaatactgtgctcaaatttgaccctgaaaacttataaatccaaatttggcctacgtagcaagggcctgtggcacattaaatataaatttcattccacacaaaattgcttagttttggaatttcttttcaccacaacagaagctccagacgattatgatttatgaccttatatacttgtcacttatgtttttcgatattagtcatcaataaaagtaattgaatattccatataatataataatatggtaatccaaaaattatacttgtgagttacgccaaagtaagaaacgcctttaattgctaactattaccaacttttttttaaaaagctaatacaagtgacagaagcttaggcctctataatttgaagctgtggcggtggaactcatacttcatgttgctgaaagaaacttgatatttttttttaaggaaaataatatcaatgctcctaagtcctaaactatatgtcttggcagtaaacttaatcttcttgattaattaaaccaaactaaaatttttagggtatatatatttgtaaaaaggagtatggtttaggatatgattaaatactcttttaccaagtaaaattctgcaaatgatttgtgttatgaaaaaaaaatgttgagggtgattagagagttgagaaatgttggtaataaattattgattgatcaaacttacaactttattaaatcatctggaatcattttttatagaattaacatgactattaagataataaatattaacaggtttataggagcattaattaaaaaattaaaaatatagtttattatataaaaataaataaaacttgttctaatcatgtttccttaaataatacttatagttaaattttacacaaaatccataaaattgctacctagctaggtggggaagtatcccacttaaaaatcaataaatattttctctgcgaattaatagttatctttttatctattgtagattttgtttttatcaacaaaacaaatgttagtttatattttttgttaaaaatatcagtaaaaaaatttaagcccattatcttttctcttcttctttcttcatccttccttaagcctcttttttttaaccaccaagctcatctaatacagacttgtttgcaggtgcaactgtatgctcaatccctcccgcttatctccattgctttgcttcttgtctatttttacagatacaaggacaactagtgcaacctattttacaagatccattcatataggccattttgtttagctagattattagttcatcatcatcattctacattttactattcgattcacataaaaaatagaaaacacacacacacacactttaatattaaaacaacttctttgctgtcaataatcaagataaacattgggcaacatttaccttaatttccattgtctatatgatgcaaattcaactttgatatttgtgttaaaaagatattttagataacctgtttacagttacacagtcattatttgaatttctgcgtagaaaacttcaacgcgtgagttttgcacaataattaacatacatatacttttatcgtacgtcccatctcatttttctctaaaaccttttttttcatcaaatttatagttttctcactcttcttttatttttctcttttatctctcttattttcactcgtacacctaaaaatggagtaatatgtttatctctactctaacgcatgcatatttttttacatgacttgaggattttagtattacgtatatattatgataaaataactaaagattgataatctggatagaaaaacttcacacgtctctactctctcgagtaaatggctaaataactaaatccgtccacaaaaatgtaatgtgtagataaattgattgttgatagatgaaaaatataaatttaattttttaatatactttgtaataaattaatcttataaataaataaataaaaattattttctaaattttataatttaatgtcaaattatttttaaaaaatattatttattattaaattagtctttgaacattataacttaatgataaaattgtctcacaaaataatatgattaatttgtcacactttttaaatttttaaaaactaaatttatatttttcatgtgatcaattttttatttcatctcactttaaagacaaattttactctttattcccctataaataatttccaattgtttatcacttttcatcagcacaagctgaggcatgacttcagtacaaccctccctactcgtgttgctgctgcttggagtggtgaaaattaccactcctgtgctagccaatttgaagccacgcttcttctatgcaatacgaggtgatactatgttatcgttgattggttggtctgtttaaactttaaaataagctatatacaaatatttatatatcttcatttggtctttgtaattgtgtaaattttactttttaatccttacataaaaaataatttgttttagtctccatataaattcttttagtttcattttggttccaaccgttaaaaataactttgatatcttaacggttactgacatggtaacaatggaaaactatttatagagagagacatgccaaattttcttgcatgtcaagtttatcaatcttaattaattttgttgttttattttatgcataatattaaaatcccccaactcgataaaaatgtaattgttggtaagtttaatttgtgtgtctctctttggataaaagcgtttatataaccaaatgttgttaacacaagtgatttgatatttgagttttttcattaagatttggatatcgattcaatttctgacttggacatgaataaaaaccggagatatcactttacttaaaaaatttactgacttggtgggagaaagattaaacttcttagttatatatacagaatttttttttttaaaaaaaaactttttatataaatggatattgtaaaataggttgcatttgtatttataaccattacacatgaagcaatggagataagtgggtgggattgagcacttgtacttgctaactcgtttctggtttcaaatgcataaaaattatattcttagcagataaagtatttactactttttatgtgggattattttcctcttaagtagaaattttatggattttgtataaattttagtgatattattatttcaaaatataagtatataccaaacagttaataaaaattatataataaactttattttattaaacatttttttaaaaattatttacgtcactacagcataggcattcaaggtcggttatttggaccatacaaagtcgattttcaaatcgaccttgtctctgactacaacataggcgtacgtttctaaaaataagtaggtgtacatatttcaacgatattgtgtagcccccaagagagaaaaataagagagttattctggtgtttctcctggcctatttcttatatagatatgtgtattctcttatttataagaaagacactgtgtaattattctatttttgtatatttagagagattgtaatgtaatttttcttttttttagatacatgtaattttcttttacttagtaaaaatatttttttaattttatctgtaatttttttcttatacattttgagggttttttcatgttaaaatagagagcaaaaatgttactttattggcactttcatatatctattgtttcaaaaataaattatttaaaaatacattgagagaataatttaaagatattgtatctaatctttatgaagcagtctaaattttaagatattatgtctattcttaattaagtcattctaggagtgctaaaacacaatgggaattgccatcaacaagctaagatcaaacaattcaaatcatacaaataatatggactctacatttaacataaaacttcaagacgttatgtgaaagtacagtatacctctccaccaaccgtcaccaaaaaaattcaaatgaaaagcattgcgataaaatacaatatacttttggacaaattcttttcttttaaaaactcaataccctattatttttaaaatgttaaatgtgaaagtttgggttctttttcagagacatcttggacaaaaagatttccagtaggcaggactacttgaacttacatataaattagactactaatttttcaaattatatatctgaatcaaattggatcaaataacctttttgcacacaaattctcttacacatgcaggaagatgcttccgacagcatgtttgaaaattttgcctcggatcaaaattaagcaagatattcttgggtgggaacttatatatgcttttttttttatacatggagggcccttaaggccgaacttatatgtatgctaatcagtcttaatttgattttgtaaagttgcacccccaagatttgaaaaaacggtatgcgaccgtgcacgaatgaatgcaatttaaaaccttagttgaatgtgccatgcatgtgaagaatatgcacgtatgtcactgttagattaatttaaacaagtacagataaaattatatatgtttaatttttattattttaacgtataaagcgagaagatttaagcacaaagaaaaataaacatatcgtagtcatgcatagataaagccattattaatatataattgacattacaatatatagttgctgaaagggaaattaaagttattccagagaggcatatatagagcttttattttgaagaactattgcaggcaaaggacaaattgtactttccatcttaaaccggtagcttctcatatgaagggtggttggggcttatatattatgaaatggttgtggtagtattcgtaagtgctcatatgtgaatcattacggactgtggggtgcttttgatgatgaaatgaatccagtagtggatttggggggtactgctttgaatgaagacatgatttcagtggttgattttgggggtgctttggatgatgaaatgaattcagtagtggatttggggggtactgctttgaatgaagacatgatttcagtggttgattttgggggtgctttggatgatggcatgaattcagtggtgatttttgggggtgctctggatgaaggcatgaattcagtggtggattttgggggggctcttgatgaaggcatgaacttagtggtggtgagtggtttctcaagatcatggtctggggcaaactcaaaaaatgatggcttgaaattggctagcactggagtagtgagaaccaccactccaagcaacaggagcaacacgagtgggtgtagtacagaagtcatgtctcagcttggaaatcaaaagtgataataatgagaaactatttataggaagagacaaaggaagtttttttgtctaggtcatcaatcttcagttgttttattaaatatatacataatattaaaaaaaaacatttaatcatgtaagaaatgtggtaggtgcgtgtaatttgtgaatatgttgaggattaacttggaatgaattttttttaccaatttagtgcatttttgtttggattaaaattgggagaattgaaaaatatttttgttccatatgtaataatttttttctttcattaaaatatacagtttaatattaaaatttgtaaactactttttataactttaaaccaaatatagatttaagtaattattttattctcttcgtcacgttctttttcctaaaatgaaacattcttttttcacctttcatattctatgtcacattatttatcttttttatttatataacaaaatatcttggtgtccaagtatctatctttatcatataatttattttacctaatatttttaaagcttaattatcacatgctttaaaaaaaggtttaattatcatctaatgttattaattgacttcgttggttatgatcaattccggcaatgggattattattgtgcaaattaaattgacacacgtttaagctttgtacagaagctataaaataggttatcattaattaaataagataaattttaatgaatgtcttaacatcattggttaaagaattagaaggaaaaaaattattgggatacataaaattatgttatatatctataatttttttttacattttcctatattgttcataataaatactttctctttttaattttctaactaatgcacaaacattaattagtgaaactatcaaataacaagttggtgggctagggattaggagggcgagcaaaagttatcaatactcctatggccataattttaaaatccatattgattggtttgatcgtgaattgataatttggtcgagtcggattagatagaagaatagttatgtagtcaattaggtgcaacctagtgtaacctgctaactaagcaaggttgaaccagtgtcctgatcctgatggggctgaatcattgacccaggttggggtcatgtagcgtttttttgaagaaaaaaattacttcaaacgtcattttatcattaatgactaaaataataaagaaagaaaaggcatgcttgcatttaagtgtctcactccttcgaaaactttaaaagattaatctttggcgtcaacaacatttcctcccaccaccttaaagcttatgaattatgatgttttcttattaatttgtcgtcagtcatgatttcttcattttatgtttcctttttggttgtacatttgattttgttgttgtaatgtgattgttgatttggttttcatattatttgttaaatatgatgtgtttaagcaattatttatgttaactgttttagatacttgatattgtaattttatttatgagtagtaatttttttggattttatggtaagagatgtataaactttttattttttaaatattgacaaataatgtggatcaattagaaacttattagttcgatcgttagtttagtgacatagtattttaatttcatctgatcgatttttaaaatcatggctataggaatctcaatcatacacaaagcttcctgaaggaaaaaataatgaattgttgagatacatgcttaaaggctactagcttaattgaataagttgcaggttattttattttatgaggattactggttttattttccttttggttagttcaagaaacataggggtctcacaaatttagaaatgcaaaattagggagatttgttgcattgtgaagaaaacacgcacttagagagctcatgcaaatagtgcagccggttttgttgctgcttgttagttacccacatcttctctttctaactcaaaatggtatatacatcttgtgtatgtgagagttttttttataagtaggaattaaagattttataaaaaattataataattaatgaattctgtttaattaattgaattagaattctttctaagattattattaataaaattatatttattttataagaaaactaataaacaattttttatatgagaaaatcatcatcatagaatgataaactctctttaaatatttaacacaaattatatatgcagctacaggtaatattcctatttgaatcatatagaattaatatcaaagtttcaatagcatattatattttttctgtaagtatttaatgtaattatatatataaaattcaaactcaaaattgattaaattaaaataattcgcccgaacaaattcacaccaagtataaataaataatcagttgaatttgcaccatatagatgacgtaactataaataggtgaatgctacccaaggtttatcttaatttattgacagtaaaaaggttgttttaataaagtgtacatatgtgtgtttctctctaaacaaaacgtttaaatggatattgtaaaatagctaggttacacaagttgtccttgtatttttataaccacttaacatgaagcaattgagaaaagtgggagggattgaccacttgtacttcctaagtcctaacacgtctctagtttcaaatacatgaaaataatattaattattagttattaccagataaatactttacggattttgtgtaaatgttagcataatatgcatgtattatttcaaaaaataagtatcaaatataaataacgaattataattttttatatgacaaactttcatttttactaaacaccttatttttaattttttattaacattcctaaaaaaacccgttaatatttatttttcttattagtcgtattaatttataataaaaaatgatgcaaaagtatttaataaaattgttataaagttcatctaacaataatatattattaacatttttcagatatatctgtaatgttgatccttcgacaccatattctttgtcaatatacatcaatcatgaaactaatctacacacataatgagtaggctattcataaaagatttgtgaggatagtgaaactaacccaaacacgttatcatgagtaggaatgtaggatatagacgtcttacgtttaatcggtacgtaatcgcactgtggcacacaacatgtgtgtgagaaatttttgccaaatttctgcttcacttattatatcggataaattaaagaatgcatccaccttcatatctttcattaagggatataaccgcaggattaattttttgccagttttatgttaaacctattatatcgggtaaagtcaataatacttgaaccttcacatcttccatataccgtaagcacttttggatagattaaaaaagacaaaagaaaatgtgtaagtttatttgggggtaaatgacataatcaactttcattttagtctttatatttaacgaaattaaaaaaaaagttccttatattgatgttaattgctcaaattagttcctaactcattcaaataatatttaaatttgattcttaattgagataattattaattaaattttacttaccacttcagattaatcagactccctactaaaaaaataatctccaaagtggagtatgttagatacctccctcgtggatttcagggacggaaaaaataaagaagagaaaaatcttccttttcaacttttaattattttctctttgtgcattaacaaaagaaaaagaaaaaacacgtcgatggttaatgtggattcgcatccaactttaaattcttttgtctctatcctccctcctagtttcaagcctttcgcatttgggggtgaggaggatccatgagccatggcgcaatgtcgttggacggtgttaagtaacaacgtggaggtagtgaccaatttgagtgagttcatcaatttttggggacttctttttaactttttaaattttgggactagaatatagtgggttataaatttagggaacaatttcacctttactcttgatttggagcaaaaaatggtataaaatatgtaaggacaaatgcaacctcttacacaatttttaaagttctgatagcatttttatacaatttaggctaaattatatatttagtcttttatcttaatttgatttcttatcttttaaaaaaattaaattagtactttatagtttaaatttagattttttttttatcaatttagaattaacatttgttaattattttaacataatcatagttaaaaaacaccatacagttactagacgtgttttcacacatgcgaagaactttaaaaattctgtgctcattttctctcttacggtttcataaatcttaaaattaattgaggagttttgccgccgtgtgtttcaatcaatataattaaaaatcaaatgatttcattaaagtatgtgtaaaaattaaatattttcatgccgcaaattttaagtgtatcttatactttcatattatgaatggtatcgttcttctagatatctatttcgtaactaaaatattatacttttgaaatgtctatttcgtaatacattcaaaagtaattaaaagtatatattcctaaacaccttaggatagttattattcatccataacacctattccataaccaaagtatcgtacttttgggatatcaatataagtattctaaaataccatacagataggtgtaattctttaataacacttattctataactaaaatatcaaacttctagaaaagtctattttgtaatttattaaaaaataattacgcaacaagccatcaaaaataaacaatgaggggtattttagaagtgatacctaaatttttagtgagaagggagtgtaggataagtttttcgggtgccggaggataaggcctacctattatcataggttacaatttgtatttgatccactttaggctgatccgcattaggcccataaccccttttggacagaccagttttaatatttctttaatttacatgtactgatatatagttcttaaattagtttctattctttgtcacaggactataaagttttttttttattattattattgacattattatttaatcactgtgttatttaaataattataccattatacttttcgtttaatgaatagttaaaatagtcttattcatctggtcactgtttatgaaaatgaaataacttttatatttaatttctttcttttgtagtcatgcagttatctttcttaatttatttgaatttttgcatcaaatcaaattaataattttaattagttatccagtcaaagaaaaagttagttttcttaattatttattcaatactcacattccttaatttacatcaagtataatgagatgtttgactttgtaaattattattattatttgacgatcattattattatttgttacaaatatatcattaattaaattaacttttaagatatttttttaaaaaaagttagatgcattttttgcatttctaatttattatttttactactaatctacatatatattaaaactatccaacaccttggcatgtgttggtgctgacagtgctaacctatttttctttcttttacttttttttttcttattctgattgttaacccacacctagttactaataaagcaataagtcaacttttttttttcatgaatgaggagaaaactgtgtaatatgaattttcaagtagccgtaaaaccggtaaaagacacattaaagaaaatcagttggaaagagtcacctaacattattccgcttcaattcccgcactgacaattatcgatgggaattctctgcaatcacatttttgtgactgcttcaaattctggccataaaaattaaattatacattaaatataaaaacaaaatataacttgaaaaattttggtccgttagatgaagactgcataccctgcactgcagttgaaaagggtccgacaattatccgaacagatcttatcgtgcaacagaagcaggcgaaatccaataacaaattactgcaacagtagtattcacaaattcaaattttcgtgtccgtttatatattttttatcactattttttcccagaaggaagttgcatcaaaaccaaaagtaccaaaagcaaaacaaatccgtattttggctacaaacccaaacctaagagagaagattccataggacaattttgtgcctgctgctaaatctcttctttttcacctttgttcctctcctccaagaactcagatcactaccaccagcaacttccccgagtgttgtttttcactttttcttctcaaaatccactctcttcgccagatcttgcttccagtcgttccaggtgcgcgcttctctttctcccctcttctgttatcttttacggtttttagaattcagttttatatattaccctgccatttgcattaatttaattttcgtttggtgttctccgtatttcatgaaaatgtcacatgttttcttaatagtggagcattttggggatatcccctccctggttgcttatacgtcgcttgcggtgattattaggagaaaagcacgtgtgtgtttttcttgcttattgtttattttatttttccaacaatttggggtgtgtgaatgaaaatgcctctataataggagattcaagttgactaactgttgaaattctgggttatatgagaaaaggaaaaattgatgcgactgacgtgtttagattgtgacaaaatgcatccacatgatttataacaaattatgaagctgtttgaatctattttctcattaaggaacataactccttacttacggttctaaacttaacaaatccctgcacaattaatgtaggtcacgtagtactaatgtagtaagactaaaacagtaatagttttgatttctaacgcttcccttcaagttgatgctcactaagatcttcgtctgttacaaataagcacaccaaaagacaatcataaaaatttaatgttttctctatcatgaatagtgctgaagagaggcaggaaagacatcatagcaaacacttgacaggtctgaagagaaacaacaaaacatgatgactgggggttgttgacacttggcagtctgaagagctggtcagaatgttgcatggccaaggaggaagggaaactgatggaaagaggtgctgcagaaatttcttgacaaacaattatacacttcaaggcataagctctccaaattaattagaaacaacattgggaagctcttcatacttcaagaattctagagattcaaaattcaaaaaccttgaatactaaatatggcttgaaaacagctcgtggttggaagagaacacaccccagttgtagggaagcatagccaacaggggtaaaataagtttgcatttaaggcagccccaaagaggccacaactaaggtgggccagagatgactgcaattaaggcagtttttcaacactcctcctcatgttcagggataccggcctggagcatagcaaatgcaagtggcccaacaatagatctaggataggctctggcccaacaatatttttatttctctgatgtttgaataatacagctactgatatatacacaaagaggaatagaaatctgctgtgatgaggaaacaaatcaggaagcaatgaatagcctatctaataataattcagattttattcaaatctgattctaaacacatttattacaaaatattttttatctcatacaatggtgtattttcctcctctttttttttttttttttgaaccattttcttgttccattattaacatgtttagttgttctttgtactttgtacagggactgttttcttataacaagtatctttgcttcttataaggagggtacatgccactggctgactagcgaagaagaacaacccttgtgtatcgttttatgagcatacaattggaaaaccttggatataatggggatcagttctcgaaggtctaatcttcagagatggctaactttgtttatgctgtttttttattaagaaaaattttatctgctatttaacatcagaaagtctgatcgattgacatttgcatcttgttggctgcagttctaccaatagaaaaccaagtgatagtatgaggcttattgtgacaacttttgttggaatagtttttggcttctttataggagtatcatttccatcattgactacaaaggtgctgacttttagcatcttcttgttaggcataccttgtgccttggcaattggtgataaaatgttgttggacttaataatggaactctaatggtgctttaacaatttgcagttgaatctcccatccggcctgcttcccgccattgatatttcttaccttcaagagaaatatgcaggtgtcaatgcaccgtcttttgtgaagaataataacagcatctcatcaaagcatcaattaataaatgatacattgaaggtacacatctcatgtcagccttgtgaacgatattaaagttgctggattcaagttaatttctgtataacttctttcattgagaaggaaaaagatttaatggaataatatagttggaagaggtttcataatctcatcaaagattcatgcacattatttgttgaatgaaggatggtaaagaaagtgggatgagtaagtgggccagatgaatgaagtatattttatcaattgatgttagtttacaattttaaggttttaagaaccatgctttaatgggttgtagtggataggcccttaagattaagtagatggaaacttgagtttttgaggaaatgaggtgctggagttattcatttctgttgttagtcttctgcttcccttttatttatttattttttccaaaggaaatactgctgtagtaacaaactagagtaaaattggctggctttcttttacctagatcttcctttcagtttcagtcatgcaacagttctgagcctaaatttatcatcaagcattgagtaattttattaaattcataaattgtaaagctctctgtctctctctcttgtttttacacacacaaactatttcaccatcaacaatctagagaagttgaaatgtagaaaccaaaattccttatgaacagaaacagggtgcttttattaattgataaaatattgactcaaatgtaaggaagagagtaagaaattactgctagggtgatgttaaaaaattggaaaaataaaataagatcaagcacatagcaacaatcagaatcagaaagactcatgcttcttttgttaacagcttttgagtatgattttgtttacttaatattgggaaaatggtttgttaaaggctcaataacaattgctgcatattttcttgattctctgcattgcagatatgggttccatcaaatccaagaggtgcagaaagattacctcctgagattattgaagctgagacagacttatatttgcgtagattgtggggtcagcccagtgaggtgtgtatcctaaaacaattttgttatttctttttttttttcattctatttttgggagcatctgggggttgaaacatagaaaacatgttctttttgcatgcatagaaaaatacatctaaatacaaattatggtcctgctaatgttgttaataaacttgttaaagaagacttacatgctttcatcagattctttgtttcgatgaaataaactaaatataacaccccaaatccaagattgatataatttgggaaaggatagtgacatagaaaacttatgttgcttgccacgtgcattttttcttctagcttgatttttttttctgtttgtgttattaggccaatctgtaaatttttggactggagaggcctctgatgtttttattgtggtatatcatcgatatacagagtatttgattaagttgctgcttgcaggatttaacatcaaagccaaagtaccttgtgactttcactgttggttataatcagagatataacattgatgcaaatgtgaaaaaggtcatctcttagtttctttttctttctgatgcataagcttgtgtatgactgcatgggtctttaaactagctccattacttgtaacagttctcagagaactttacaatagttctatttcattatgatggccaaacaactgaatgggatgagtttgagtggtcaaagcgggcaattcatgtgagtgtccgcaaacagaccaaatggtaagaatccattgcgctcgatcttggatgacaaattttccttgcaacttttaccattattattgtttgcctaactaaaatcaaaagtgttctgctaattcatctatgttatgatattaagcatttaattgttttccctcctaggtggtatgccaagcggtttctgcatcctgacattctggcaccatatgactatatttttatatgggatgaagacctgggtgttgaacattttaatgcagaagagtgagtatttattatgatacaatacacagtttaattttgatatccatgtaaagttttacactatcatccaattatttgataattcctcattacaagattttgacttttaagttagtttgtcatcatctaacttgtccaatgtggtaatacaagatgtgattagatgatagtgttagaaacttccataattgatagtggatcaaaataaataaataaaatgtatatttatatacgtaaggatttttttttttaattttactcatgaagtttgatatgctctaatttcaatcacagatacttaaaactggtgaagaagcatgggttggagatttcacagcctggtttggaacctaataaaggattgacatggcaaatgacaaagagaagaggtgatcgtgaagttcacaagtaagacaataatccagtgttagttttcttctggtacttattttgttaaagaatgtgtactaactgtttatttttgtgatttctattagagaaacagaggagaaaccaggatggtgcagtgacccccatctgcctccttgtgcagcgtaagtatcagttgaagcattatttttgtcttatcaacccataccaaactgtatcgaattatgttatgcatgcagatttgttgagattatggctccagtgttttcacgagatgcttggcgttgtgtgtggcatatgattcaggttaaatgtttactctttattcttttttaaatatccattggttagttgtttaatgtctgtttatgcactcgttagagtctaacaattaattatgattgtaccattctgggcatttcagaatgatttggtccatggctggggccttgattttgctcttagaaaatgtgttgaggtgagtttgtggtctcattacttaaattcatctaatttcaattttttaattgcaattgctatgctatagaacattaaactaatatctctcactatcatgtagcctgcccatgagaaaattggagttgttgattctcagtggattattcatcaaagtgttccctcactagggaatcaggtaatttgttttccatgattattaatgttagatttaaatagttttactcatattgccgatgtaagatatgatgtttttctttactttgtagggagaatcacaatctgggaaagcgccatggcaaggggtatgttaatgttatgcatgtttcatacagtttgattcgtctctcaaaaattcatatatacaagttttctatgctgtaccgaaccatgaataggcctatatataacatttttcttgcatagttgtttaacattataactcttgatttaatttatcgagaagctgtattacaatggatggagctgttagtttatgcaaatactttgactactaaatatgcatgtctgttgatgaaccatgcatggtgttggtggcaggtgagggagaggtgtaaaagggagtggacaatgttccagagtcggttggcaaatgcagaagacgcatattacaaggccgtgggagttgatatgtttaactcgactactccttagtggggacaacgacggaagttgacttgtacacagccatcaccatagttcgattttgcatgatgtataattttattttatttttgttacttaagtttgtggcactagttacttgcacttataattgagagtcctagctaaggacaaaacaacagttcaatgtgggattccagtgctgatagagaattagataatatataggtaaataaaacttactgtgtaagtagtgtatttgattataatattctttgaggaccttgcaggaaatatgaatgcaatgccaggtataaacaatttggatgtgacaaggaagcgatatacctattggaacggcttcacatcttcgttaaacctctaacaaatcaagttgaaaaaatatattatcaaattagaagtaaaacagaatggaaaaaattaaaatgaaaagataaaaaaaattaatagaaaagatgtgttatttaaatggatagaaataaatgaaaaagtggaaatttttctttttcttatttagattagtgaaaataaataaattgtatacaaattatattaattaaaaaaattaaattttttattttataattcttttctaaacatagaattattattttgcaataaaaaattatttattaaaagccaaaataaaaaaggtaatgtaaataattgagtctaattattatgtataataaagcataaaagttttgatattgtcaattaataaaaaaaattatgataaatatgattcttaaggtaaatgtaaaagttaaaaagcttatcataaataataatttataattagataaaactgtaaaattctattgccaacttttgatgacaacctagaagttttctcatataccagagtgaacaagtaaatcttctttttcatttttttctcaaataaataattaaaaattgatatttctattccattttttttctctgttttattctcaaatgagtcgccaagtgcttttccactatttcgtgtggaatttgaacagaaaatagtattctaccttttcttgtgattgttgtggccatggattattcttttgggtgtggtgtgatttcctggtgtgtgcctttttgaatcattattagttaatatttatttctcaattcaactaacttgttacattatggtaggtgacaagtcaacgaggttccttgaatggtacttttctttgcttcaatggtcctccaagtttgccaatattaaggaggcagatttctcaatcacgtgttggcgcacattttagcgagacctcgacccacgtgccacgaattttaaaaatatttacctaaatgccacgtgggggaaagtatttgccagaatgccacgcggcgtagttcgctacgccccccagcgaactacgcaagctgatgtggcgcgatctgggtggctgcataattcgctacgcagtccagcgaactacgtggctgccccacgggcagtctacgtggcatcgaaacgtagttcgctagcctatccagcgaactaggtgcagcggaattcgaaaaagctgacggttacggccacgtggcgacgccttacatagttcgctcccacccccagcgaactacgccatctggaattcaaaaaaatggccgtnnnnnnnnnnnnnnnnnnnnnnnnnnnnnnnnnnnnnnnnnnnnnnnnnnnnnnnnnnnnnnnnnnnnnnnnnnnnnnnnnnnnnnnnnnnnnnnnnnnnnnnnnnnnnnnnnnnnnnnnnnnnnnnnnnnnnnnnnnnnnnnnnnnnnnnnnnnnnnnnnnnnnnnnnnnnnnnnnnnnnnnnnnnnnnnnnnnnnnnnnnnnnnnnnnnnnnnnnnnnnnnnnnnnnnnnnnnnnnnnnnnnnnnnnnnnnnnnnnnnnnnnnnnnnnnnnnnnnnnnnnnnnnnnnnnnnnnnnnnnnnnnnnnnnnnnnnnnnnnnnnnnnnnnnnnnnnnnnnnnnnnnnnnnnnnnnnnnnnnnnnnnnnnnnnnnnnnnnnnnnnnnnnnnnnnnnnnnnnnnnnnnnnnnnnnnnnnnnnnnnnnnnnnnnnnnnnnnnnnnnnnnnnnnnnnnnnnnnnnnnnnnnnnnnnnnnnnnnnnnnnnnnnnnnnnnnnnnnnnnnnnnnnnnnnnnnnnnnnnnnnnnnnnnnnnnnnnnnnnnnnnnnnnnnnnnnnnnnnnnnnnnnnnnnnnnnnnnnnnnnnnnnnnnnnnnnnnnnnnnnnnnnnnnnnnnnnnnnnnnnnnnnnnnnnnnnnnnnnnnnnnnnnnnnnnnnnnnnnnnnnnnnnnnnnnnnnnnnnnnnnnnnnnnnnnnnnnnnnnnnnnnnnnnnnnnnnnnnnnnnnnnnnnnnnnnnnnnnnnnnnnnnnnnnnnnnnnnnnnnnnnnnnnnnnnnnnnnnnnnnnnnnnnnnnnnnnnnnnnnnnnnnnnnnnnnnnnnnnnnnnnnnnnnnnnnnnnnnnnnnnnnnnnnnnnnnnnnnnnnnnnnnnnnnnnnnnnnnnnnnnnnnnnnnnnnnnnnnnnnnnnnnnnnnnnnnnnnnnnnnnnnnnnnnnnnnnnnnnnnnnnnnnnnnnnnnnnnnnnnnnnnnnnnnnnnnnnnnnnnnnnnnnnnnnnnnnnnnnnnnnnnnnnnnnnnnnnnnnnnnnnnnnnnnnnnnnnnnnnnnnnnnnnnnnnnnnnnnnnnnnnnnnnnnnnnnnnnnnnnnnnnnnnnnnnnnnnnnnnnnnnnnnnnnnnnnnnnnnnnnnnnnnnnnnnnnnnnnnnnnnnnnnnnnnnnnnnnnnnnnnnnnnnnnnnnnnnnnnnnnnnnnnnnnnnnnnnnnnnnnnnnnnnnnnnnnnnnnnnnnnnnnnnnnnnnnnnnnnnnnnnnnnnnnnnnnnnnnnnnnnnnnnnnnnnnnnnnnnnnnnnnnnnnnnnnnnnnnnnnnnnnnnnnnnnnnnnnnnnnnnnnnnnnnnnnnnnnnnnnnnnnnnnnnnnnnnnnnnnnnnnnnnnnnnnnnnnnnnnnnnnnnnnnnnnnnnnnnnnnnnnnnnnnnnnnnnnnnnnnnnnnnnnnnnnnnnnnnnnnnnnnnnnnnnnnnnnnnnnnnnnnnnnnnnnnnnnnnnnnnnnnnnnnnnnnnnnnnnnnnnnnnnnnnnnnnnnnnnnnnnnnnnnnnnnnnnnnnnnnnnnnnnnnnnnnnnnnnnnnnnnnnnnnnnnnnnnnnnnnnnnnnnnnnnnnnnnnnnnnnnnnnnnnnnnnnnnnnnnnnnnnnnnnnnnnnnnnnnnnnnnnnnnnnnnnnnnnnnnnnnnnnnnnnnnnnnnnnnnnnnnnnnnnnnnnnnnnnnnnnnnnnnnnnnnnnnnnnnnnnnnnnnnnnnnnnnnnnnnnnnnnnnnnnnnnnnnnnnnnnnnnnnnnnnnnnnnnnnnnnnnnnnnnnnnnnnnnnnnnnnnnnnnnnnnnnnnnnnnnnnnnnnnnnnnnnnnnnnnnnnnnnnnnnnnnnnnnnnnnnnnnnnnnnnnnnnnnnnnnnnnnnnnnnnnnnnnnnnnnnnnnnnnnnnnnnnnnnnnnnnnnnnnnnnnnnnnnnnnnnnnnnnnnnnnnnnnnnnnnnnnnnnnnnnnnnnnnnnnnnnnnnnnnnnnnnnnnnnnnnnnnnnnnnnnnnnnnnnnnnnnnnnnnnnnnnnnnnnnnnnnnnnnnnnnnnnnnnnnnnnnnnnnnnnnnnnnnnnnnnnnnnnnnnnnnnnnnnnnnnnnnnnnnnnnnnnnnnnnnnnnnnnnnnnnnnnnnnnnnnnnnnnnnnnnnnnnnnnnnnnnnnnnnnnnnnnnnnnnnnnnnnnnnnnnnnnnnnnnnnnnnnnnnnnnnnnnnnnnnnnnnnnnnnnnnnnnnnnnnnnnnnnnnnnnnnnnnnnnnnnnnnnnnnnnnnnnnnnnnnnnnnnnnnnnnnnnnnnnnnnnnnnnnnnnnnnnnnnnnnnnnnnnnnnnnnnnnnnnnnnnnnnnnnnnnnnnnnnnnnnnnnnnnnnnnnnnnnnnnnnnnnnnnnnnnnnnnnnnnnnnnnnnnnnnnnnnnnnnnnnnnnnnnnnnnnnnnnnnnnnnnnnnnnnnnnnnnnnnnnnnnnnnnnnnnnnnnnnnnnnnnnnnnnnnnnnnnnnnnnnnnnnnnnnnnnnnnnnnnnnnnnnnnnnnnnnnnnnnnnnnnnnnnnnnnnnnnnnnnnnnnnnnnnnnnnnnnnnnnnnnnnnnnnnnnnnnnnnnnnnnnnnnnnnnnnnnnnnnnnnnnnnnnnnnnnnnnnnnnnnnnnnnnnnnnnnnnnnnnnnnnnnnnnnnnnnnnnnnnnnnnnnnnnnnnnnnnnnnnnnnnnnnnnnnnnnnnnnnnnnnnnnnnnnnnnnnnnnnnnnnnnnnnnnnnnnnnnnnnnnnnnnnnnnnnnnnnnnnnnnnnnnnnnnnnnnnnnnnnnnnnnnnnnnnnnnnnnnnnnnnnnnnnnnnnnnnnnnnnnnnnnnnnnnnnnnnnnnnnnnnnnnnnnnnnnnnnnnnnnnnnnnnnnnnnnnnnnnnnnnnnnnnnnnnnnnnnnnnnnnnnnnnnnnnnnnnnnnnnnnnnnnnnnnnnnnnnnnnnnnnnnnnnnnnnnnnnnnnnnnnnnnnnnnnnnnnnnnnnnnnnnnnnnnnnnnnnnnnnnnnnnnnnnnnnnnnnnnnnnnnnnnnnnnnnnnnnnnnnnnnnnnnnnnnnnnnnnnnnnnnnnnnnnnnnnnnnnnnnnnnnnnnnnnnnnnnnnnnnnnnnnnnnnnnnnnnnnnnnnnnnnnnnnnnnnnnnnnnnnnnnnnnnnnnnnnnnnnnnnnnnnnnnnnnnnnnnnnnnnnnnnnnnnnnnnnnnnnnnnnnnnnnnnnnnnnnnnnnnnnnnnnnnnnnnnnnnnnnnnnnnnnnnnnnnnnnnnnnnnnnnnnnnnnnnnnnnnnnnnnnnnnnnnnnnnnnnnnnnnnnnnnnnnnnnnnnnnnnnnnnnnnnnnnnnnnnnnnnnnnnnnnnnnnnnnnnnnnnnnnnnnnnnnnnnnnnnnnnnnnnnnnnnnnnnnnnnnnnnnnnnnnnnnnnnnnnnnnnnnnnnnnnnnnnnnnnnnnnnnnnnnnnnnnnnnnnnnnnnnnnnnnnnnnnnnnnnnnnnnnnnnnnnnnnnnnnnnnnnnnnnnnnnnnnnnnnnnnnnnnnnnnnnnnnnnnnnnnnnnnnnnnnnnnnnnnnnnnnnnnnnnnnnnnnnnnnnnnnnnnnnnnnnnnnnnnnnnnnnnnnnnnnnnnnnnnnnnnnnnnnnnnnnnnnnnnnnnnnnnnnnnnnnnnnnnnnnnnnnnnnnnnnnnnnnnnnnnnnnnnnnnnnnnnnnnnnnnnnnnnnnnnnnnnnnnnnnnnnnnnnnnnnnnnnnnnnnnnnnnnnnnnnnnnnnnnnnnnnnnnnnnnnnnnnnnnnnnnnnnnnnnnnnnnnnnnnnnnnnnnnnnnnnnnnnnnnnnnnnnnnnnnnnnnnnnnnnnnnnnnnnnnnnnnnnnnnnnnnnnnnnnnnnnnnnnnnnnnnnnnnnnnnnnnnnnnnnnnnnnnnnnnnnnnnnnnnnnnnnnnnnnnnnnnnnnnnnnnnnnnnnnnnnnnnnnnnnnnnnnnnnnnnnnnnnnnnnnnnnnnnnnnnnnnnnnnnnnnnnnnnnnnnnnnnnnnnnnnnnnnnnnnnnnnnnnnnnnnnnnnnnnnnnnnnnnnnnnnnnnnnnnnnnnnnnnnnnnnnnnnnnnnnnnnnnnnnnnnnnnnnnnnnnnnnnnnnnnnnnnnnnnnnnnnnnnnnnnnnnnnnnnnnnnnnnnnnnnnnnnnnnnnnnnnnnnnnnnnnnnnnnnnnnnnnnnnnnnnnnnnnnnnnnnnnnnnnnnnnnnnnnnnnnnnnnnnnnnnnnnnnnnnnnnnnnnnnnnnnnnnnnnnnnnnnnnnnnnnnnnnnnnnnnnnnnnnnnnnnnnnnnnnnnnnnnnnnnnnnnnnnnnnnnnnnnnnnnnnnnnnnnnnnnnnnnnnnnnnnnnnnnnnnnnnnnnnnnnnnnnnnnnnnnnnnnnnnnnnnnnnnnnnnnnnnnnnnnnnnnnnnnnnnnnnnnnnnnnnntgcccaattaatatttgtgtaatgacttacgttagaccaaaatggcacattgccctctcctatacaatgatacatttaccacattgttatgcataaaccacaacatattaacactaaaattactaagtaacacacagttatgcgtttttacctgaaatcggagccacattttgcattccaacaactcccggagagggcatttcaaaagcacgatcaaaatcaccgtctacgtccgtatccgatgagtcactatctggaacaacaccttcatcaacctcttcctcagaactgtccatgggccaagctgggtcgtgggctggggccattcctgtatcttcaaaatcaatttcttgggatggttgggttgctggtggtggttgtggcgatggagacatatctctatcttccagattgaccatcggctctaagttaaggtcaatggatcccatgtttgtagttaattattcactgcttgactgtccaccagaatatacttccgcatacaattctataaatcttgggttttctccatcggatgtgcatgcatcagtaactaaggttacatcttcgtcatctacaacatcaacagcaacccactccacggggtttccagatgcacatctcgcactaagtcgagatatggattgtccccgttgtaagcgtaacttcttgtatatcattctcatcaaatgatcatagctgcatcgcggcggaatacgaaacattttgctttctccttcgaacacttgaccattcgctccaacatatctcctcccattataatatacaatggtgattaaaccattccctctcccactcatttttacaaattcgacactataccaacgaaaaatattctctagtggaaatcgatctcagaacaacatgcaaattgaacaagggctgctgcaattaaataggggggtgtggacaccaagttcgctgggccccatagcgaacatcaagttcgctgggcactatagcgaactctaagttcgctgccctgacaagcgaactctgaaagcgccacgtgtcagcaccctaacgtagttcgctggagggccaagcgaactacgtcacctacttcgctggccttcctagcgaactctgctccgtctgccacgtgtccctgcccgttctgccagggcactgcgccattggtcagagcacgccacatcagcaagcgtagttcgctagggggcgtagcgaactacgccgcgtggcactttggcaaatagttttgcctacgtggcatttcggtaaataatttaaaaattcgtggcactgtggtcgaggtctccattttagctgcctttgcaatgtaaccacaccctgctttccttgaaagatttctcaaacaagcacttggaaataacgtagatatcgtcacaacggaacttctataagaaaaactatacacgtcgattattaaaaaaaaaaaaaaactatacacgtcataagctagacatgaaaataagaaacagcatataccctcaaatgtggctttcgtgtttctgctgtctcatattttagtggattatcaaaaaatactgtatacaatagtatatgtaagagaagcccattgtgaaaaagaaaaaaaaaaaagtcctctccatcaacaattgtactcaaaattaatatataagggttgacgtaattaatatatgtatgtatatgaatatattttaaaaaatatgatggatgattagttaagttttattaacaatctggtaatgttgacataatttattcaagtcgttaagttttattcttatgatttaatggattggttgaatttatacatgaataaattagatgattagagataaacagtagcaatcgccatccgaagttgtacgaatacaatgttaccttttgtaaagttgaaaaagactagaaatcgggttgaaaaaaatgattaaccagttgaatttgttcgtggaattcctgatggtactttttttttaatgtagttcctgatgtcactaaacatttttacccgataaaaatgtaatacaatctctatctatatcttatatataactgtaatacaacctttttaatacatttttcatattggatgaaattcatatagaactcacaaatttagtagttatttaggaaggctattgtaaatttcacttaataataataaatatcgtcttgaaaaaattgtgagttgatacctcaagggagaggatccatcaacaccaacggatctatatggccatgaggatgggtagatgcacctctcatttcaatgaaatcattagtatttgtcctaaaatattatattttatatttagtaattttatattttgtaccccttaattttatgtatttgaatctctttaccaagttcacatataaaaataagtaaatgtaccctcttatttaaaccaccgaccccaattaatttgggttaaaggtgctgttgatgttgatgttgatgttgaccctcttatttaataaatattaatatttatcttaaaatattatattttgtacctcttatatttgtatctgaatctaactattctataatataatgataattataaatttttattttttaaataaattacacccactgactcagggtcttagttctgccactttacagcaaggtttaagtatatttcttattagaaagaaagtgcacttagttttttaattgctaagctctaagctgtagatatatatccttttgtcaaagaaaccgcttaagttacttgcggaggttatttgggcggaaagcacatgcgttacttagtaacggttcagcagtttcaaccttgtgttatttcttgggtcacacttataaggcgtgctttctaggtgttcagactttcccaattgtcactttatatgttggaaaaaactatctcgtgatgatattttacttttccacttggattgtggaagtggaacgaacaccttcattgtggaagcataactaatttcatttgttaatcccactatataaatatttggggtgttattttccaaagtatgatctctttctctcatagcatgtatgtgtgtgttttccttttgttcttctgaatggtaatctggttccatttattaaaccatttagctttcttctttcgactttaaacagggctctattcatttaattagcatctcagtttcttatatggaggaaacaatcagaaaagcttggatataatggtgaaagctactcgcaggtataatatttggcgatagatacttcgtgttgattattatgtttgttcttaagaaattttgtatatgctataatttaagtccacaaatcccttaaactaacataattttgcattttgttgcctgcaatcttactattaggaaaccgaatgaaagtatgaggcatattgtgttactttttgttggaggattttttggcttaattgtaggattatcacttccaccactctcaataacaaaggtgcagagattgaacatcttattcctggtgtaccttatgcttgagagcatatttcatatttattcatgtagttgatgttatttaactttataatggaactctaatggtgcttaacaatttgcagctgaatctaccatacggcctgcttcatctctcttgtgtacaggaaaaatatatagatagcagcaccgcatcccaagatcagtttccaagtgatgcaacaaaggtatgcatctcttcttgtcatccatgagaaggacttgaaaattgtagggtgtacagtgattcaagaaagttaggggaaaaacatattttattcaattatatagttggagtaaaacccataaagtcaagaaaggttcagcagcttataattgagcatcatgcttcaaaagtgattgactttaatttggaaggaattagagattagagatgtttactcccatttagagcttaagtatgatcattaaacactgttattgaaagcagaatgccttgtgaacagaaacagcgttggttaataactgatcaaatcaaatgattgtcagaatatatatggaagaaaacaagatattattagaattttatgtggttatctgacaagagtgaaaaggaaaattaaatatagcagcgtgagatccataaagcctcttgcctcttcttttcctctccatcctcttcttatttgttaatcaattataaaacataattgtcaaaggatttaaccatgatttcacattatgtaatatttgaaaatatgacatgttaaggtctgtatatatgatgataagacatttgctacttgttttcatgattgtctgcagatttgggttccaacaaatccaagaggtgcagaaagattacctcctgggatagtcaatgcagaatcagacttatttttgcgcagattatggggtcttcccagtgaggtgaagtctactacgagagtttatttatgtgctcaatgtagctacacccttcgaatgtaataagaaaaatgcagctaaacacagattaatgtgctgttaaacattatgctaaggttatttaaagagaaaaaggatcatgcactgaaaatgtaaaaagttctatacaatcatccaatcgcaatccaccatatattgtaagtatattgacttttaaattaattatttaagtaattcaaactataatttatgattaaatgacaatgtcagtgcatagacattaaactcttattaaaagtaacaaaaaatttagcttgccacatgtgatatttttctttctagcattattttctgttttttctttattctgttctttatttacttggactaggagtgcctccgatatttttgttgtgtgaggttctccatatacagagagtttgataaaatttccacttgcaggatttaacctttaagccaaagtatcttgtgactttcactgttgggtatgagcagaaaaagaatatcgatgcagctgtgaaaaaggttctctccctttctcttcctatctttctctgcataggtttttggacgcgtgtttaaactagatatgccacttgaacagttttcaaaggacttcacaatcctcctctttcattatgatggccgaacaacggaatgggatgaatttgagtggtcaaaacaggccattcatgtcagtgttcacaaacaaaccaaatggtaaaaattctatgcttaaattttcatgatggcatattttcagttaatattgtttaccaaactttaaatggtttgttatttctttttcctcttaggtggtatgccaagaggtttctacatccagacattgtggcaccatatgactatattttcatgtgggatgaagacctgggggttgagaatttcaatgctgaagagtgagtcttagatatatgatgtatgtgtattttctttaatttttgcttgttaaggaagtttcacttccccactaattccaatcgcagatacctaaaactggtgagaaagcatggcttggagatatcacaacctgccttggaacctagtaaaagtaccaaagcggtgtgttggaatatgacaaggagaagagagcatagtgaaattcacaagtaagagaactacttttcttgtgctgtgttttaatgtgagtgtgttgactgggtatttctttgatttcgactagagaagcaaaggaaccaggaaagtgtaagtaccctcttctgcctccttgtgcagcgtaagtaactgttaaagaattttttattttattttttttttgggaggggggttacaatattttcccatctttaattagctgattccaccattctgtaacatgcaggtttgttgagattatggctccagtgttttcacgaaatgcatggcgctgtgtgtggcatatgattcaggttcaatggttactctattgattttttttcaaatatctcattagttattgagaacaattcttgtatgagcacttcatacctcataaaaatatcagcatgacattgaaataattttagattgttattttaacgtgttttgagattttgatttggttgtgtctagtaaccaattgctcatacttaattgttgatggtttccaaaataagttatgattgtaacacactgctcattgcagaatgaatttgtccatggatggggtcttgattttgcctttagaaaatgtgttgaggtaagcctattacctgatattacttcctatggaactgatatgctatatggaatattaaactgatacttcctatgttatagcctgcccatgagaagattggagttgttgatgctcagtggattgtgcaccaaggtattccctcactagggaatcaggtaattatttttccattatcattattcctattatgtttaatttaattctaattatttcactcaaatgcaactgtatatataatatttatttgtttttgttatcctgtgtggttggtagggagaagcacaaacaactgaaaaaccggcatggcgagcggtaagttatgtatctttcatataatgaagatcattagcacatcctttttaacgtattttttattattgattaaaatttattaaaatctacaaaatcaaaagacccattaaatgaaggatgggacaacctacaaaattatacctaatttctaataaatttgagttgtaaagaatgtgttgctaatattattcttttagtagttgtttaggatcctctttcttgaccacatagctttttgcttctttttttttctcacattagaaactgttacctacattgatcaagaagcagtgtaataatgttttgtttttcttaatgggctttgattcttaaatatgtggtattggtggcaggtgaaggagaggtgtggcatggagtggaggatgttccagggtaggttgactaacgcggaaaagggatattacaagtccaaaggaattgatttttctaatttgctcgttcataattagggggacaccaccaaattcttatacatacatcgccaccgttgtttatgttttcgagatgattattttgacatatattgttttattaatcttgtaagataaagtttggataaattattcaataaacagaagaagacaaaaacaattaagataaacgaaggatttatttaaaaaaaacaaagattttttttacacaattaactaatcgtaaattgttaacttgtctattacaaaatctttcttctttttttttttccggaaatatccaatacaaaatcttgtgcttaggttatatggacttttctattcttttcgtgtggatacatttaagccatcaacaacacatcatgtttatgtccggggaaatttctagattcatttcccaactcccatggttgctgtgggctgtgacaaatgattcatttatttatttatcatttctaccattattatcaataagttcaaatactataactttatgttcgattacaagccagccatattccttgaataaaaattttcttttcttcaatgatactccatctttgaacatattaaaagatggattttttaaatagaatgatgacgcagaaagttcgcaataacactttgctttcctttccttgaacgattttaagcaataaaagaaagtacaatatagtccacaaagaaaagtactaaatatttaattcaactatttatccaagcaagtgttgtaattcagtgggtattccgtattccaaaggcaagagtcttacattatctagttatacattatttatttatttgtttatgtttcaatttgtttttaagaattttaaagtggccagtaaaagtacgggactcccatatattaatttgggccttgtggggcttgatgtaatgcgataatatgcctcacatagaacatctttatctaaaaacaattcacttttccaaaactcctcttctcccttcctttgttcttgggttgaaaaattactcttgccagcaagttcagattttaatatatattgtgcaattactataactgatgcagatggcatcataacatattgcatggttagggatctacgagaaaaataacatatcataaacaacacgtatgaatatgttagagaacactgtttccttaaaatatatttcgaaatctgaagactggtaaaaaaaaaaaactgaagattggcgtatttcggtctaatgataccaaacatgataaactaattaaaatctaaacactgaacatatatacattctgttgagctgaaattttcaaacaggtcctaattaattatttagaaccaattgtacttggaatttatttagaacacaattttatataacgtatcattgcttgttttgcattctttctacataacatgtactgaaatagggggaaatctatagcaacaacccattatcactataagaaaattgaaaggagaggactgaaacaaatacaacacgccatatgagtgtgaggccttggtgcatttatttaggtgaaataaaaagaaaaaaacagtaaaacccctgagtagtagtacttcagttgtagattatttatgatttatgatatgagatgtgggtaatatggctacgagtcaatttgatgccattttaaaaggggagctacaaaaattgagggatgaattattcgtaaaactttattataaaagtctcaccccaaaatcttttaaccattttaagggtaccccaaattaaccatacacaatatgtaacaatgcacataatgcccctatgatataataatagaaatagctatttatatacaacagaggctcatcaggcaccccttgttgacatgagcctggctaattccatcctcgtatgctcagactgaataaatgcctcagcttcttggtccacacttttgtaagcactatgattccataacctggtactttcgtaaccttgttcacgagcctcaacgttggattctacttcggctatagagtcctgctcatagttggttctgaatgccatatgacccttcttgtgatgatgatgcctaggactatgatatgtagcctccactggggggtcgtacacttggtactcgtcagaggggaatcgccaccctttgttgttgttcctattgtagttttggtatgccatttctaattataactttgagggtgttgagctaggttgtggtgttgcttcatcttaatttcagctaatatttatagtttttattattccatgatgataagaaagaatttaattcttctctctcttcggcatgcaaaaggatattcggaggaggagatttatttgatatttgtgcatggagctagcatccaattcggtatttttcttattgttcaaagattccaacgccaccatcatttaacgagacctcgacccccgtgccacagattttttaaatattttccaaaaggccacgggggttaaactaatttccagactgccacgcgacctatttcgctaggcaacccagcgaaataggttggctgaggtggcgccttcctgatggccacctatttcgctatactcaacagcgaaataggtagctgcccaacggtcagctgatgtggcgtgacctatttcgctggacccagtagcgaaataggcacgcagtaacccaagaagcggggccgttagtgccacgtgtcaacgctggacctatttcgctggggtgggtagcgaaatagaccacgtggtccagcataaataccccaccccggtgctggtccccccctcccttccctccttccaaattttaaattcttcttctctcttttggcttcttctctcnnnnnnnnnnnnnnnnnnnnnnnnnnnnnnnnnnnnnnnnnnnnnnnnnnnnnnnnnnnnnnnnnnnnnnnnnnnnnnnnnnnnnnnnnnnnnnnnnnnnnnnnnnnnnnnnnnnnnnnnnnnnnnnnnnnnnnnnnnnnnnnnnnnnnnnnnnnnnnnnnnnnnnnnnnnnnnnnnnnnnnnnnnnnnnnnnnnnnnnnnnnnnnnnnnnnnnnnnnnnnnnnnnnnnnnnnnnnnnnnnnnnnnnnnnnnnnnnnnnnnnnnnnnnnnnnnnnnnnnnnnnnnnnnnnnnnnnnnnnnnnnnnnnnnnnnnnnnnnnnnnnnnnnnnnnnnnnnnnnnnnnnnnnnnnnnnnnnnnnnnnnnnnnnnnnnnnnnnnnnnnnnnnnnnnnnnnnnnnnnnnnnnnnnnnnnnnnnnnnnnnnnnnnnnnnnnnnnnnnnnnnnnnnnnnnnnnnnnnnnnnnnnnnnnnnnnnnnnnnnnnnnnnnnnnnnnnnnnnnnnnnnnnnnnnnnnnnnnnnnnnnnnnnnnnnnnnnnnnnnnnnnnnnnnnnnnnnnnnnnnnnnnnnnnnnnnnnnnnnnnnnnnnnnnnnnnnnnnnnnnnnnnnnnnnnnnnnnnnnnnnnnnnnnnnnnnnnnnnnnnnnnnnnnnnnnnnnnnnnnnnnnnnnnnnnnnnnnnnnnnnnnnnnnnnnnnnnnnnnnnnnnnnnnnnnnnnnnnnnnnnnnnnnnnnnnnnnnnnnnnnnnnnnnnnnnnnnnnnnnnnnnnnnnnnnnnnnnnnnnnnnnnnnnnnnnnnnnnnnnnnnnnnnnnnnnnnnnnnnnnnnnnnnnnnnnnnnnnnnnnnnnnnnnnnnnnnnnnnnnnnnnnnnnnnnnnnnnnnnnnnnnnnnnnnnnnnnnnnnnnnnnnnnnnnnnnnnnnnnnnnnnnnnnnnnnnnnnnnnnnnnnnnnnnnnnnnnnnnnnnnnnnnnnnnnnnnnnnnnnnnnnnnnnnnnnnnnnnnnnnnnnnnnnnnnnnnnnnnnnnnnnnnnnnnnnnnnnnnnnnnnnnnnnnnnnnnnnnnnnnnnnnnnnnnnnnnnnnnnnnnnnnnnnnnnnnnnnnnnnnnnnnnnnnnnnnnnnnnnnnnnnnnnnnnnnnnnnnnnnnnnnnnnnnnnnnnnnnnnnnnnnnnnnnnnnnnnnnnnnnnnnnnnnnnnnnnnnnnnnnnnnnnnnnnnnnnnnnnnnnnnnnnnnnnnnnnnnnnnnnnnnnnnnnnnnnnnnnnnnnnnnnnnnnnnnnnnnnnnnnnnnnnnnnnnnnnnnnnnnnnnnnnnnnnnnnnnnnnnnnnnnnnnnnnnnnnnnnnnnnnnnnnnnnnnnnnnnnnnnnnnnnnnnnnnnnnnnnnnnnnnnnnnnnnnnnnnnnnnnnnnnnnnnnnnnnnnnnnnnnnnnnnnnnnnnnnnnnnnnnnnnnnnnnnnnnnnnnnnnnnnnnnnnnnnnnnnnnnnnnnnnnnnnnnnnnnnnnnnnnnnnnnnnnnnnnnnnnnnnnnnnnnnnnnnnnnnnnnnnnnnnnnnnnnnnnnnnnnnnnnnnnnnnnnnnnnnnnnnnnnnnnnnnnnnnnnnnnnnnnnnnnnnnnnnnnnnnnnnnnnnnnnnnnnnnnnnnnnnnnnnnnnnnnnnnnnnnnnnnnnnnnnnnnnnnnnnnnnnnnnnnnnnnnnnnnnnnnnnnnnnnnnnnnnnnnnnnnnnnnnnnnnnnnnnnnnnnnnnnnnnnnnnnnnnnnnnnnnnnnnnnnnnnnnnnnnnnnnnnnnnnnnnnnnnnnnnnnnnnnnnnnnnnnnnnnnnnnnnnnnnnnnnnnnnnnnnnnnnnnnnnnnnnnnnnnnnnnnnnnnnnnnnnnnnnnnnnnnnnnnnnnnnnnnnnnnnnnnnnnnnnnnnnnnnnnnnnnnnnnnnnnnnnnnnnnnnnnnnnnnnnnnnnnnnnnnnnnnnnnnnnnnnnnnnnnnnnnnnnnnnnnnnnnnnnnnnnnnnnnnnnnnnnnnnnnnnnnnnnnnnnnnnnnnnnnnnnnnnnnnnnnnnnnnnnnnnnnnnnnnnnnnnnnnnnnnnnnnnnnnnnnnnnnnnnnnnnnnnnnnnnnnnnnnnnnnnnnnnnnnnnnnnnnnnnnnnnnnnnnnnnnnnnnnnnnnnnnnnnnnnnnnnnnnnnnnnnnnnnnnnnnnnnnnnnnnnnnnnnnnnnnnnnnnnnnnnnnnnnnnnnnnnnnnnnnnnnnnnnnnnnnnnnnnnnnnnnnnnnnnnnnnnnnnnnnnnnnnnnnnnnnnnnnnnnnnnnnnnnnnnnnnnnnnnnnnnnnnnnnnnnnnnnnnnnnnnnnnnnnnnnnnnnnnnnnnnnnnnnnnnnnnnnnnnnnnnnnnnnnnnnnnnnnnnnnnnnnnnnnnnnnnnnnnnnnnnnnnnnnnnnnnnnnnnnnnnnnnnnnnnnnnnnnnnnnnnnnnnnnnnnnnnnnnnnnnnnnnnnnnnnnnnnnnnnnnnnnnnnnnnnnnnnnnnnnnnnnnnnnnnnnnnnnnnnnnnnnnnnnnnnnnnnnnnnnnnnnnnnnnnnnnnnnnnnnnnnnnnnnnnnnnnnnnnnnnnnnnnnnnnnnnnnnnnnnnnnnnnnnnnnnnnnnnnnnnnnnnnnnnnnnnnnnnnnnnnnnnnnnnnnnnnnnnnnnnnnnnnnnnnnnnnnnnnnnnnnnnnnnnnnnnnnnnnnnnnnnnnnnnnnnnnnnnnnnnnnnnnnnnnnnnnnnnnnnnnnnnnnnnnnnnnnnnnnnnnnnnnnnnnnnnnnnnnnnnnnnnnnnnnnnnnnnnnnnnnnnnnnnnnnnnnnnnnnnnnnnnnnnnnnnnnnnnnnnnnnnnnnnnnnnnnnnnnnnnnnnnnnnnnnnnnnnnnnnnnnnnnnnnnnnnnnnnnnnnnnnnnnnnnnnnnnnnnnnnnnnnnnnnnnnnnnnnnnnnnnnnnnnnnnnnnnnnnnnnnnnnnnnnnnnnnnnnnnnnnnnnnnnnnnnnnnnnnnnnnnnnnnnnnnnnnnnnnnnnnnnnnnnnnnnnnnnnnnnnnnnnnnnnnnnnnnnnnnnnnnnnnnnnnnnnnnnnnnnnnnnnnnnnnnnnnnnnnnnnnnnnnnnnnnnnnnnnnnnnnnnnnnnnnnnnnnnnnnnnnnnnnnnnnnnnnnnnnnnnnnnnnnnnnnnnnnnnnnnnnnnnnnnnnnnnnnnnnnnnnnnnnnnnnnnnnnnnnnnnnnnnnnnnnnnnnnnnnnnnnnnnnnnnnnnnnnnnnnnnnnnnnnnnnnnnnnnnnnnnnnnnnnnnnnnnnnnnnnnnnnnnnnnnnnnnnnnnnnnnnnnnnnnnnnnnnnnnnnnnnnnnnnnnnnnnnnnnnnnnnnnnnnnnnnnnnnnnnnnnnnnnnnnnnnnnnnnnnnnnnnnnnnnnnnnnnnnnnnnnnnnnnnnnnnnnnnnnnnnnnnnnnnnnnnnnnnnnnnnnnnnnnnnnnnnnnnnnnnnnnnnnnnnnnnnnnnnnnnnnnnnnnnnnnnnnnnnnnnnnnnnnnnnnnnnnnnnnnnnnnnnnnnnnnnnnnnnnnnnnnnnnnnnnnnnnnnnnnnnnnnnnnnnnnnnnnnnnnnnnnnnnnnnnnnnnnnnnnnnnnnnnnnnnnnnnnnnnnnnnnnnnnnnnnnnnnnnnnnnnnnnnnnnnnnnnnnnnnnnnnnnnnnnnnnnnnnnnnnnnnnnnnnnnnnnnnnnnnnnnnnnnnnnnnnnnnnnnnnnnnnnnnnnnnnnnnnnnnnnnnnnnnnnnnnnnnnnnnnnnnnnnnnnnnnnnnnnnnnnnnnnnnnnnnnnnnnnnnnnnnnnnnnnnnnnnnnnnnnnnnnnnnnnnnnnnnnnnnnnnnnnnnnnnnnnnnnnnnnnnnnnnnnnnnnnnnnnnnnnnnnnnnnnnnnnnnnnnnnnnnnnnnnnnnnnnnnnnnnnnnnnnnnnnnnnnnnnnnnnnnnnnnnnnnnnnnnnnnnnnnnnnnnnnnnnnnnnnnnnnnnnnnnnnnnnnnnnnnnnnnnnnnnnnnnnnnnnnnnnnnnnnnnnnnnnnnnnnnnnnnnnnnnnnnnnnnnnnnnnnnnnnnnnnnnnnnnnnnnnnnnnnnnnnnnnnnnnnnnnnnnnnnnnnnnnnnnnnnnnnnnnnnnnnnnnnnnnnnnnnnnnnnnnnnnnnnnnnnnnnnnnnnnnnnnnnnnnnnnnnnnnnnnnnnnnnnnnnnnnnnnnnnnnnnnnnnnnnnnnnnnnnnnnnnnnnnnnnnnnnnnnnnnnnnnnnnnnnnnnnnnnnnnnnnnnnnnnnnnnnnnnnnnnnnnnnnnnnnnnnnnnnnnnnnnnnnnnnnnnnnnnnnnnnnnnnnnnnnnnnnnnnnnnnnnnnnnnnnnnattaatatttttgtccaagtattttgaccaaaaaaatttaataattataatgatattaaatgtcatgagtattagaaaaatatgtaaaaaataaaggtaaaaaatttaataattataattatattattttcattgtggacatttatttatcgcctaagtttgtcatggacgtcgttggtaaatttatttagttctttttgtataatttgttagtaaatttaaatattaaaatttaaagaatttttaaaattatcaaaattttgacaatagcatcgccttgtaatatatgaaatggatattgcaatttgcatgaatagagtaaaagttgcaaaccataaaatattggcacgcaaaccaccatattaattgtaatttaaaaaaaatcaaaaatacagttttttgaaaactaattacagaagtatggtttgttcttgttgttgttattgcgtggagggctcaggttgagagtgacaattgttattattattgttgttgttgttgttgattttgaacatgtatctgatgaagcctgcgaaagatgatcggatttgggtgtcgacgattttcttgagaatgcgaagcgatcgttcctgtcccacggcggcgaacaggcggcaggtgtcagaatggagcggaggctggttctggtcgcggcagatgctctcgatcagagactcgaccgagggcggaagaataacgacatcacagtggttgtggttttctgccatgagaagaagagtgaatacttaccaagaaagtgacgagagtgagtgaatcatttcgtgcttatcttttttttttcattctgaaacttaaaagtactagataaagtcacatttacgcacccttttttggtgtgttatttaaaataatacaacaattttccaaagaccattctcactcgctgcaatgacagctgacaagacaatgacaaacagcagacctcacttcactcactactcgtttaaatgaataagaccttgaaggacagaacaataccgtttcaaggtgcattgagtgtggacgtgattaattaatctctgctgtttcaaggtgacagagacacccccgtctctttcaagacaacactttgtggtcttctatactgtagccaataagtgcgtctgatttgtaaaatgacattgacaacaccggggacgattgacaacacgttgtggtcctttttactgtagacattaaatttcactggtctgtcatgtgacattgacaacacaaccacgacagctgtttgctcacgccccatccaggcgcaagtggtgaccccccacacagtcagggcttaacacggttatatataccccacagtggtgtttaatcatccacacagcaaaccttcgcaaccgaaagtcaacctcaatacgatggccttcttaggtgaaacctgctctcaaaatattggtaattccaaattagcgtttatttttccgaatggatcaatcttacagaatgaaactggtgtttctttcgtatgtcatactccgataccaatgcgaattcccgatgagtgttcctttcagtcactcaagagtagaatgcacaacacccttctgctaacaaatgaccagtctgtggatgaaatttactatcgacaaccatccattaatacataacgatttttttttccattcactgcaattgaaaaatgatgatgatgtttgcactatgttggtgtgccatgaaaaactcccatctgttggtcctatcgaattgttatgtatgataaccagaacacccgatggtgtcctcaacctacttcgagccaccatgactcctactcatgatgcactgttgtattacaacggcaagtggaacataccacgaaaaggcaattttttgggttactcgtttactggaaaaaatccagtaagatttcaaattccttcaggatgcaatatggaaacactcaagcatataatcaagcaagttgcgccggtaggagttcccccttatggaattcacgaatcacaggttgtcaaacaagtgttcttcagacaaccaggtcacgcaaaatattcagaaaacatggtcgagtatgaaatagtaaaactgcaaaatgatgaagatgtactgaaggtgttggcagaatcaaattactggaagcgtttctctccaatagaaattttagcaagttttaacaaaccggtaatcgaagtactggaagatgacatgtccgctgcacaagaccatccaaattatgattagtttcgtcattttcatgtttgaattgttgttgttagtaggtttcgttgttttgctttttcaatgttcaagtttttgtgtttatctttgtagttccaattgtttgtacgggctgttattttattaggtttccatcactatgttaccgttaatgtcaattgcattttgatgtttgaaattcatcgtaccgtatatcaatttcacatgactgatcaacacttagctcataaaacttacgttataataagtaactatgtctaacctaagtcaataacaattttctacatcaatatcaaatctctaagacaacaacacagtatatttcatgtaatctaacaataatacgttcaatcaacactaacttgctnnnnnnnnnnnnnnnnnnnnnnnnnnnnnnnnnnnnnnnnnnnnnnnnnnnnnnnnnnnnnnnnnnnnnnnnnnnnnnnnnnnnnnnnnnnnnnnnnnnnnnnnnnnnnnnnnnnnnnnnnnnnnnnnnnnnnnnnnnnnnnnnnnnnnnnnnnnnnnnnnnnnnnnnnnnnnnnnnnnnnnnnnnnnnnnnnnnnnnnnnnnnnnnnnnnnnnnnnnnnnnnnnnnnnnnnnnnnnnnnnnnnnnnnnnnnnnnnnnnnnnnnnnnnnnnnnnnnnnnnnnnnnnnnnnnnnnnnnnnnnnnnnnnnnnnnnnnnnnnnnnnnnnnnnnnnnnnnnnnnnnnnnnnnnnnnnnnnnnnnnnnnnnnnnnnnnnnnnnnnnnnnnnnnnnnnnnnnnnnnnnnnnnnnnnnnnnnnnnnnnnnnnnnnnnnnnnnnnnnnnnnnnnnnnnnnnnnnnnnnnnnnnnnnnnnnnnnnnnnnnnnnnnnnnnnnnnnnnnnnnnnnnnnnnnnnnnnnnnnnnnnnnnnnnnnnnnnnnnnnnnnnnnnnnnnnnnnnnnnnnnnnnnnnnnnnnnnnnnnnnnnnnnnnnnnnnnnnnnnnnnnnnnnnnnnnnnnnnnnnnnnnnnnnnnnnnnnnnnnnnnnnnnnnnnnnnnnnnnnnnnnnnnnnnnnnnnnnnnnnnnnnnnnnnnnnnnnnnnnnnnnnnnnnnnnnnnnnnnnnnnnnnnnnnnnnnnnnnnnnnnnnnnnnnnnnnnnnnnnnnnnnnnnnnnnnnnnnnnnnnnnnnnnnnnnnnnnnnnnnnnnnnnnnnnnnnnnnnnnnnnnnnnnnnnnnnnnnnnnnnnnnnnnnnnnnnnnnnnnnnnnnnnnnnnnnnnnnnnnnnnnnnnnnnnnnnnnnnnnnnnnnnnnnnnnnnnnnnnnnnnnnnnnnnnnnnnnnnnnnnnnnnnnnnnnnnnnnnnnnnnnnnnnnnnnnnnnnnnnnnnnnnnnnnnnnnnnnnnnnnnnnnnnnnnnnnnnnnnnnnnnnnnnnnnnnnnnnnnnnnnnnnnnnnnnnnnnnnnnnnnnnnnnnnnnnnnnnnnnnnnnnnnnnnnnnnnnnnnnnnnnnnnnnnnnnnnnnnnnnnnnnnnnnnnnnnnnnnnnnnnnnnnnnnnnnnnnnnnnnnnnnnnnnnnnnnnnnnnnnnnnnnnnnnnnnnnnnnnnnnnnnnnnnnnnnnnnnnnnnnnnnnnnnnnnnnnnnnnnnnnnnnnnnnnnnnnnnnnnnnnnnnnnnnnnnnnnnnnnnnnnnnnnnnnnnnnnnnnnnnnnnnnnnnnnnnnnnnnnnnnnnnnnnnnnnnnnnnnnnnnnnnnnnnnnnnnnnnnnnnnnnnnnnnnnnnnnnnnnnnnnnnnnnnnnnnnnnnnnnnnnnnnnnnnnnnnnnnnnnnnnnnnnnnnnnnnnnnnnnnnnnnnnnnnnnnnnnnnnnnnnnnnnnnnnnnnnnnnnnnnnnnnnnnnnnnnnnnnnnnnnnnnnnnnnnnnnnnnnnnnnnnnnnnnnnnnnnnnnnnnnnnnnnnnnnnnnnnnnnnnnnnnnnnnnnnnnnnnnnnnnnnnnnnnnnnnnnnnnnnnnnnnnnnnnnnnnnnnnnnnnnnnnnnnnnnnnnnnnnnnnnnnnnnnnnnnnnnnnnnnnnnnnnnnnnnnnnnnnnnnnnnnnnnnnnnnnnnnnnnnnnnnnnnnnnnnnnnnnnnnnnnnnnnnnnnnnnnnnnnnnnnnnnnnnnnnnnnnnnnnnnnnnnnnnnnnnnnnnnnnnnnnnnnnnnnnnnnnnnnnnnnnnnnnnnnnnnnnnnnnnnnnnnnnnnnnnnnnnnnnnnnnnnnnnnnnnnnnnnnnnnnnnnnnnnnnnnnnnnnnnnnnnnnnnnnnnnnnnnnnnnnnnnnnnnnnnnnnnnnnnnnnnnnnnnnnnnnnnnnnnnnnnnnnnnnnnnnnnnnnnnnnnnnnnnnnnnnnnnnnnnnnnnnnnnnnnnnnnnnnnnnnnnnnnnnnnnnnnnnnnnnnnnnnnnnnnnnnnnnnnnnnnnnnnnnnnnnnnnnnnnnnnnnnnnnnnnnnnnnnnnnnnnnnnnnnnnnnnnnnnnnnnnnnnnnnnnnnnnnnnnnnnnnnnnnnnnnnnnnnnnnnnnnnnnnnnnnnnnnnnnnnnnnnnnnnnnnnnnnnnnnnnnnnnnnnnnnnnnnnnnnnnnnnnnnnnnnnnnnnnnnnnnnnnnnnnnnnnnnnnnnnnnnnnnnnnnnnnnnnnnnnnnnnnnnnnnnnnnnnnnnnnnnnnnnnnnnnnnnnnnnnnnnnnnnnnnnnnnnnnnnnnnnnnnnnnnnnnnnnnnnnnnnnnnnnnnnnnnnnnnnnnnnnnnnnnnnnnnnnnnnnnnnnnnnnnnnnnnnnnnnnnnnnnnnnnnnnnnnnnnnnnnnnnnnnnnnnnnnnnnnnnnnnnnnnnnnnnnnnnnnnnnnnnnnnnnnnnnnnnnnnnnnnnnnnnnnnnnnnnnnnnnnnnnnnnnnnnnnnnnnnnnnnnnnnnnnnnnnnnnnnnnnnnnnnnnnnnnnnnnnnnnnnnnnnnnnnnnnnnnnnnnnnnnnnnnnnnnnnnnnnnnnnnnnnnnnnnnnnnnnnnnnnnnnnnnnnnnnnnnnnnnnnnnnnnnnnnnnnnnnnnnnnnnnnnnnnnnnnnnnnnnnnnnnnnnnnnnnnnnnnnnnnnnnnnnnnnnnnnnnnnnnnnnnnnnnnnnnnnnnnnnnnnnnnnnnnnnnnnnnnnnnnnnnnnnnnnnnnnnnnnnnnnnnnnnnnnnnnnnnnnnnnnnnnnnnnnnnnnnnnnnnnnnnnnnnnnnnnnnnnnnnnnnnnnnnnnnnnnnnnnnnnnnnnnnnnnnnnnnnnnnnnnnnnnnnnnnnnnnnnnnnnnnnnnnnnnnnnnnnnnnnnnnnnnnnnnnnnnnnnnnnnnnnnnnnnnnnnnnnnnnnnnnnnnnnnnnnnnnnnnnnnnnnnnnnnnnnnnnnnnnggaggacccagcgaaataggccgcgtggcattctggcaaatattttggccctcgtggcctttaagtaaatatttaaaaaaatggtggcgctttggtcgaggtctctcatttaaccaactttaatttgttcctagatagcgcaactcggatgaaattcgattcgtacaaaagtttatatatatatatatatatatatatatatatatatatatatatcccgctttcatgtgcaatttggaattttattttagtggcatgaccaacacttcagaaactgacgtctgtaatagttcattatttattaacaccttgcagatctaagttaattataaattgaaacaaaatagttattcaatgtccacagtcatgtatctctctggttatattccttataatttttttttgaaaagatagagtgggataaaaaagaagctaagaaaaagagttttaatctcaatattttactttaaaaaaaactgaaaagaaaataaaaagtgtatatataaaacatagtaaaaacgtgtagagataagatctcatgcaattgtataataattggagatgctcctaatctatagaggacgacttaacaacgtcaaaaaaaaaggatgacttaattaaaaaataataatgaaaggataaaataattttttactaactgtaaatatataaaagtaaatagtctttcacttttttgaaaatgtggaaagttgatcagtttgatgtatttcgttaattattgaatttttattaagcagtcaaggatcaaagcctataatcacaaggcaacaaagttatctatgaatcatgaatgtaattttcttttaaagtcatattagaacgtcactattaatctccatttctatattcaccacgaaaggagtggaagaaaaaaagttaaatttgattcctaatttgcggaggaaattaaatggcatattaatattccttttctcaactacaaagcatttgggttggacccgtaattggttaatcttcttgttagcttttgtgttgggccttaacccctccttagttctgaaaaatatattcaaaagtgttgcacctaaatggactagtaaaagccagattaaactagttggtttgaccagttggacaattggtccctcatctggccagaatgacccttggaattagtcctcataaaactagccaaataatcagtgaactagtcaatgaatgtgaaaattgaccagaactggggttcatcaattttattcttctatccaaattccaaagtaaaaccttttcctaaactctgatagaggcaagcttttaggttcctttagaggataatggaggataaatgctagtggacgttggctaagtgacatgagtcatatgttgaccaaagaaatcaatgaagaatgaaagaggttttatgggaatgggaggaagaagatttcagtagctgaatcatgttgtgtgtgaatgttgtagagcttatggttcccaagatctaagagtgattgaatgtcctatattcttagggatcgaagaatgcctatttgggcttcatattaaggagctcggaagaatagacaatggttggatcactattgaatccttcactaattgtctaattcaatagctagtctagttttataaacatggcttaaatcaatagttaacctattaattataacttctattcgtataacaaactcattacctttttggtacatttgtttcttttttttggtacaacaaactcattatttaattataaattatattaatgaaataaatataattaattttctcttataatatgagttaaagaactcatcttagaaagtgaaattgtcaccctccccactctcaatcaaacatacttaatattcgctttttcccttctttagaaaattgtaataggaaacttaccatcgaccctatataaaatgaaaagaaccctaagggaaactgaaccaatatcaagtccgacacgatttggttttcaacaaaagaacttcattgatgatacatgcacatgtcttattgttaactggttaaaattagtctaatagaaggactttagaattagaagataacatgaataagcgctaaatcacaagctatctaaaccatcgtctaacgaaagacctcagtaaatagcacatccccacgctttattgcatattgtctaaatcagtcaaataattttatagagcaaaatcaatgttggcagattccaacagattccaaataggaaattaccattctacagagggaaacggaaataagataaaataaagcaacatatgtcgcgcccgattaatatcacatattggaacggcatccaattgaaagtaaccaaactaaatttatgtaatgcaaagaactgagtcagcactgttatgaatatagaccaaccccaatcggattagatatttagcataaataaagaataataagaaaataaattggtctgcagaacaaaacttcccaaacaggaaaaagtggggaattttaaactactctcgtatatcggggatcaatcacactaataccaaataaacacatttcatgaaggcaaacccgttctcaaaacagcagtttcagtcctcataagtagagatgttgctccccttgaatgaaactccagctctaaattatatacagaactccccctagatcaaagaatttatctgaaattaaataattcccaaagaatatctcactggacaatgatacagctatacgagtgacacacaatcatcacaacctcagttaaaaacctccgagagaggagagtcacttgagctgtacaagctacaagctcagaaacaatgcagtatcataaatgactttcctagatcatctctctctcttgcaatttccaggtaaaagaaatttatacttctcagaattttccagaagaaaagcaggaagatgaactgcagaataggaatggggtattggtcccattttaccaatgatatccctgaaagtgtactcctccggcagcatatcaaataaatcggtccctttgcagattaccttctgaattctttcaggatttaaatagtgagagaacctgactctatcataatggctgtaggctttcatcttgaaaatgaaatcacggatttggcggaagcaaaagctacaatgccagccagcatctgccaatatgtcatcagactggcgataatgtgcatacctcgtcttaccagtctcatacctgtgaattgaagccctccagctcttatcatccacatgaaattcaaatgaatagagataatttttcagctgcagatgaaggattgagggtacttcatcacaccacctcaggaggttaatagtgtgagcacttgatatctcatccacatcagacataatcaacaagtcatcatcagtaataccagctatcttcaggagctggtccaatgctacacgctgatatgcctcttcaacaaatgggttttctcctttcttaaatctcccaccaatggtcccataagttaaccgcggctcaacaaatttgaactgctccctgttgctactgaaaaccagaggcttaggcaatccggtgaaggtggaatttgactcaaggacaacaaattcagttatgtaagggtacaattctttccagcgcaaggttagtatttccaactcattgctaaacaacacagcatcataaacacgtcgagggtactcccggactccccatccatgaagcctgcaaagattctccatggtgacattttcgttatagtaatgagggatgacattgaaaggcttgggtgctttttcccatagtggccgcagaaagtaggagatcttttgcccatgtatatagaatccaaagacacacattgggataatagcaaacatgaatatataggttttcacatccagaccacgcagaatgcagcgaattcgtgacatgcctgatacttgacttgattcctgcaaaattaaggaacaaacatataagtaaactgtaaaaatccagcttcaagaatgaaaaatcatgaaataaatatcatatgcagcttcattaaatcatacacaatcttatcaaaaacccaatgctcctctctctattgatgaaaattttcaagcatcatataacttaaatccccaattgtaatcataaagccaaaagctgtatcatgaagaaaaaagaaaccatgcccccaaaaaaccccaaattgcaagctcttcatgcgagaaaccttgcacccattcaaatccaattatggctacaacataaacgaaacccctttccctcccaaatgaatcccccaaaaaataggaacaagaaggaaagaaaaaaaaaaaaggtgtcttcgtttgcgttcacttacaagccaaaaaaaatagctcagcgggtttcctaaaattagagaaaataataataataataataataacaacataaaaaacgcaaccttatcccatacctaaattcagatctcgaaaatctcgttcacacaccaaaaaaaaaaattaaaaatagcacacaacaaacaacacctaaaaagagcaaatctaggacaaaagtttcatcacaatccagtgatagattacatgacaaaccacatcaacagttttctatggaaaaaccattcaaaatgactttttttttcctccaaaataacgaaatccaaaaattaaataggcgaagccacagctgaaagattaacttacatcgacaccacataaacggaaaagtaacatttaataaaaaaatattatggatgatatacctgaccacagacattggagcacaaatcatcgctcttcttagaacagtaattgcctccagtctcgctcatcatccaccacatttcgacgtgtctttcacagtccaacgtacgaatgaatcaaaacaaaaccagatcgtgaacacaaagtcgcaaaacgaatcggcgtttgaaattttagtgttaagcaaagaaacacgttgtcgttaaaacacagcagaggaaacaaaatccgaggtggtttatatgtttattcacacgaagagagtataggacggaacaaacaacgaggaaaagtaattagtaaatagcctctctgtatgttggaatgggtggcagttgtcgtctccacacagctagctatggaactgataaaaaaaaaaaaaagagagagaaaaagttccgttacaagattggtgattccactttctctatcccaatttctttctttataacttaactaataaataaagtcttgacctctacttttactgagtctctcttctccacgcgttgttgtgtgtattgagtattgactcgctcgggacaactggttcagttctctgctaatacgtgttattatttcatctaaaaaaaaaaaagctatgataagccgcataccccaacggcccccacaacatcagcggccggacaccaatgtgaggatgtaaattggactataatcacagtctagcaaacaagaaatggagttccgttgcctcttgtgaggtgttgaacccggatcttacccctggtatcactcatctaatctattacggaaacaagagggtatttattcgcttggcattttcatattttccataccacactacacgtggcagccagcgaatgtgtgcccggttttgcttttttatattcaacacaaaatattcgttacacaaacaaacactttctcagtatccaaaaaaataaaacactttctctgtttcacttcttttttatacattgtttttgttgctacaacttttccaatcatactatttattgttaattattaaaatttatataaaaaaaaatacataactcttaatataaagtaaaacttgccaacaaaatcttgttacggacttagttgttggtggtcgtttcttaatgagttgacaggctcaatttacttaaattttattatataaaaaaagaaacctgtaaattatgtaatttttaataattttaataccatcaaccatataggtcttttcttatagatttattgatctcaagactatttttaaaattatttcattacttttaataaaaataattttaattattttataattttcataatgagttgttttaatatatgtgaaataattaaaaaaaaaggcactaagatgtttatctagatgtggtactagaatcctaagttagaaaagacaatcatttaaaaaaaataagattattaattattatcatgaaaaaagtataaaaaaaattaaggacacgaaatttaaatatataaaattgagaaatcaaaatatagatatttaaatatttatatgtaatttttaaaaataagggatgcaaatacatctctttattcatatatgaattgtcatttnnnnnnnnnnnnnnnnnnnnnnnnnnnnnnnnnnnnnnnnnnnnnnnnnnnnnnnnnnnnnnnnnnnnnnnnnnnnnnnnnnnnnnnnnnnnnnnnnnnnnnnnnnnnnnnnnnnnnnnnnnnnnnnnnnnnnnnnnnnnnnnnnnnnnnnnnnnnnnnnnnnnnnnnnnnnnnnnnnnnnnnnnnnnnnnnnnnnnnnttaattattttataattttcataatgagttgttttaatatatgtgaaataattaaaaaaaaagtactaagatgtttatctagatgtggttctagaatcctaagttacaaaagacaatcatttaaaataataagattattaattattatcatgaaaaaaagtaaaaaaacttaaggacactaaatttaaatatataaaattaggaaaacaaaatatagatatttaaatatttatatgtaattttttaaaagtaagggttgcaaatacatctctttattcatatatgaattgtcatttcatgaatagatttttacatataaaaaataataacttaaatatttttttagttttttgtaatttaacgatttcttacatttagttcctgtaaaattatgtttttgtttttaatttttatagatatatttttctgtttttcattcctgtgatgtttcagatagtttttttattgatcaaattcctatttaaaatgttttaagtactaaaaacaaaaaataattttgcaataattctaaaagaaaaaaatacaaaattgtaagaaaaaataatgaaaaaggtgttatattcgaaactcgaaagaatgaagaaagtatacaagcgacatttgtcttggttacattacacttgatgatcaaaacaaagagtattgttagaggaggttgtaaaagaaagcggcaaaggtcgattttttgttatgttattgtttagtgtgtgctggaacagtccaatacaacactgccaccatgaaggttgtgatgatattaaagatgttttatttgggagcattaagttaagctaactataattaattaatgactaatgacaattatgtatggggaagaggaccacgttaggagtgggcccgtttagcaatgatatggccccccaccacgagcttgtcgccgttggctcgtctcgctagtttttaagcaagcctcccttttttctaataaaattattattattcattatgtctgtttagatataactgtttgatagttttttatgagaaatataaaaaaaaaaaaaaatcataacaaaaactctcaaaaattacttttaactttggatggtataacatggacatgttaactaatgtattcttcctttaacccaaacattcacactacaatgctcaacactgggctgagactaactgcctcaacttgtccaaagtcttcttctctagcctcctttccaagagcatgatcgccctccgatttgagttcggtgagcccaccttccacccccacatcactgttgttggagccatcaaaacacccccgacaaagccctcaccaagcttcgatcagcgtgtgaagccctcaggcccttccacattatcgtcaacggcgttgccgttgacaccttcttctactagtgcctctatctcctcctctgccccgaccctcaccttcacgaaactagcgcatactatagggaatctcgatggtgtcattgtctttaagaagcgaggtgaaggttattgcaacggcgaggcaccgatggaaaacaggattaaggacgccgtggatgagaaaggggagcccttggtcttgtaggttagggtttgggtctagagcatggccaaatgcagtcctattcaatacgaattgggacccaatatactgttgccgtcgccagcgacagtgacaatgacaacaacggctgcacctaatcggcgagaaagtcgtgttttctattttaggggttttgattttggatctcaatttgttgtttggattttgggtctgtttgcaagtctgattgaggttgcaagagggagtagaggcgacgaatattaagggattcacagtggtttggaggtaagggcgatttgttgaggtccatggtgtgtctggttgacgatggatttgagattttgcagaggttcagagtgggggtggtttgctacagacatagtatatctttctatagttatcaaacataattcagttgattttttatttattagtgaaaatgagtaatgatctattgattttcagttgatgtgggttcttggtatgattcagttctctctggttgaaagcagaagcaacagcaaaagagtgaagacgtttaaagaataacacgtttgtgggtagggatagaaataagccaggtcatctattaggggtctttggtctgacctgtttaaggcctaggtctaacttgtttattataaagatcagacttaggttttttgaaaagtctatttaaataaaaaggtcggattcaagctttacaaaaagcctattaggcctgtcatgctagtttatacatatttttttttacaaacctactacaaagatttcaaatcttttttattttaatatttatttatctatatatatatatatattaaaactaaaaaatatataaatcaatctttaactgagtttgttgtgattagtgaattttaatctcatattagagtgctttaattaattttaatttttttcacccacaaattaaaagggaagtatgtcaatgtgtgtatttctttatattaaattaaaaaaagtattatgcgaattctcgaagtttcactaatatataatatttattgtaaaatagactttttaataggcttgtaggtcaagtcagatttttaaatagactagaccaagcctaaaaaaaaaaagcctctaacaggtaaatagattaggcaggcttgatgtttttaaataaggccaaggttaggcctaatcgagcctgtcctatttccattcctatttgtaggggcatggacaagggtataatgggtaataagaattttaattagaagaaaggggggcttgcttagaaattagggaggcttatttagcaagatcttaccatttggtttgcttcgttcgaaagtaggcttgccctcgaaccgccagccaagtcacagtacgctttaaccaaccgacgtcttcttgcaaaaggcccaatactttattattattattatcgagaattaccaatgtgattcccaaaaaatacacaagaatcattgatgcagaatatcttaatcaactgcaaaaaaaaaaacaactaaattctatctaaactagaatatctttcctaaattgtatattttttttccttttcattgtcgttttgcaatttggtctccctttgttttaaaaaagagtggccttcacatataatgtttaacgaaaatatttacatatttgtacaataaagtatcacgtcaataaataaattaaaactgctctataaaaagttcatcaacaataaaatattgtcactaaaaataatttaaaaaaaatggagctctattacaagctactaattaccaactaagactcaaaatttaacagttttgtacttgtcacgtgttagaaatcatcttatattttatcgaaaataaatcaacttatttaataatttttaatctcgtgaccatttataattaaataaaaatcaaaaaatatttactaaatcaatatattttaattaaattatgttttaaactacaccctatgtttacttttatccttccaaattgggtaaggatgaaacaacttacaaattatatggatttgtttggcacttgtaaacaaaaatcttattcttgaacttaatacatataggcacgttattgttggtctcatccatgatgtcgatatagaaattaacatgttgagccacttgaatgcgaggctaaaggaaaaaaaatatattaatgagttagaaatataagttttatagacgaaaatattacatcatttgcggtacactcttctcttcttttttaccgattaattgtaacccaactatttattaatagcatatagcttacccagtggattaataactttacagcctttacagcacttgtataatagtattaacggactgcgtattatattccaatatcatccccttcagatatccgacaatgcaaatggcataacaattatacactatacatgtgggaaaccgtggaacgattccacctagcgaattgacaattaacgagtctaccacgatcaatatcggaacaacttactgatttgaatagctctatttacaatatttaaatgatcattgagttggttcaacattgatggtatactttatgagtgaggaaataagcttgatggtatactttatgagtgaggatataagcttccttgtctggggtcaaaggttgtttatccaaaatattctagggttaaaggtttttatccaaaaaaatttagtgtgtaatttgtgttttttaagctagtgttaggattttatttcactttgtgtttcaatacattttttggattttcaactataattttttcatgattttattattatttatgttctttagggatatgattaggagtgaatagattggactatgtcgaatcttatttaagtctgatctgatctactttatacttttataagttaatcttgggtttattatttgtcatggatttgtttttttggtctagtcctaatctctctataagtctaatttaatctattagcttatttaaatgcatgtttcatgttaaaaagtgtaaaaaaaattattgtataataataaaattattaaacgttaaactattaaagtgtgaaccaactatttatatgttatttccatttactttttgtttatttaacaaagttgtaaatttcattaaaaataataaaataattttaaactaaaagatgtgacaaaaacttatctaatgcctataaatattacacatgaatgtcatcaaaactttttaagccccaccaaaaaaaaataatctctatttctgctacccatatatgcatatagcaattaatctataccaaacattaaattcaatcatcaaatcactaaaataattttgtaatttttttgaaataattatgatattatatcatattaataataataatatctttattaaaataatattgttgctaattaggctcaatccatcaagcttaataagttnnnnnnnnnncgattccacctagcgaattgacaattaacgagtctaccacgatcaatatcggaacaacttactaatttgcatagctcaatttacaatatttaaatgatcgttgagttggttcaacattgatggtatactttatgagtgaggatataagcttccttgtctggcgttaacggttgtttatccaaaatattctagggttaaaggtttttatccaaaatattttagtttgtaatttgtcttttttaagttaatgttaggattttatttcactttgtgcttcagtacattttttggattttcaataatagttttttcataacatgattttattgttatttatgatttttacggatatgattaggagtgaatggattagactatgacagatcttagatcttatttaaatctgatctgatctactttatacttctataacttaatcttggatttatcatttgtcatgggtttgtttttttggtttggtcctaatctctctataagtctgatttaatctattagcttatttaaatacatgtttcatgttaagaagtgtaaaaaaaaaaatattgtataataataaaattattaagcattgaactattaaagtgtgaaccaactacttatatgttattttcatttactttttggtttatttaacaaagtaataaattttcattaaaaataataaaacaattttaaactaaaagatgtgacaaaaacttatctaatgtctataaacattacatatgacatgtcatcaaaactttttaagccccaccaaaagaaaatagcctctatttctgctacccatctatgcatatagcaattaatctataccaaacattaaattcaatcatcaaatcattaaaataattttgtaatttttttgaaataattataagattatatatcatattaataataatatcttaattaaaataatattgttgctaattaggctcaatccatcaagcttaataagttttctttttaagtttatggccttacctatttaattaaaaaaggtttttttaaaagctcgtgacaaaaaataatataaaagggatatattattagttacaagggtatatttatcgatacccattaaacaaaacctttcattttgatggaccattaatatttgtatttaacccatcacgacttacatatgacacttatattctatgcgttcttaattgcatcttgcatcttccatttttaaaaaatccccagcctaccctttctattttctcccccttattccttttctttctcacgcaaactcttctatttgttcttctcttcttcccgcggtgcactcgcttaacagttcttctcttcttctccaaccgaattcttcttccaactctcgacaccataggttctagcgcagaagtccatcccctccttcaactctccacgccaggtacatttcaacatcaccgttgtggacatttttccagagctggctttttggaacggtttttttgttttcaaaataaccattcggaaaaaggttttccaaaacacctattatggaagcaattcctttccaaaaagcttattttggattttttttttcatccaaaaatgccctgtcaggaacaccttaccaaaagccaaaaaaccattccagaaatcctgttccaaagtgcacttgtttcttctagagtgggcttttcataagcccagtaataccttccaaaacaccctttttgtatatctcattcctaaaatttttgctttcaaaatgaccgttttgtaaaaaggttttctaaaagcttatcctttccagaaagcctgttctagaatgtacttgttgcttccgggaaagactttcttaaataccttttcatgcttatgaaaatgctattctgaaatcattttttggatacggaatggtccttctagctgtttaatagataattaaatttgatttgttattttatagttttagtttgtatggaagatgattacttcaacaaaagatgttggttgaagttgacatggatatgaataataaataaaaaaagttatttttggataagaattaaaacaactacaatgaacattgtaatcattttgagagaagagagtgattgcactaaaatattattgacaacattacaaatcaaaaaaaattaaaggtactaataaaacaagctgtcacaacaaagaaaaatgacaattagagaatgatgtcataaataatatgtgtcttcttttatccagatgaatggaagttattcaaatttgaatccacaaaaaaaaaaaattgtgagaaataatcttaaataaaatttaaaagaacctgaaaagttttaaaaaatatataaataaatctatttcaagatttaaataatctgttaattagcgttcaagaacagatatttcaaaatggttattccattaaacaaatatagaattgaaacccagtttaagaagcatatcacagagatagttccagtcaaggcgatcatatgccttatttatgtcaatttttaaggcaacatctcctttctcacctccctttttacaatttgaacattaaatggatactaaaatcgtagtatattatattaatttattttatcttatctaatacagtgtgtgaactaggctcttaatgtgattattttaggataagaaccatgtgatgaaaaaaatatattaaaggacaacgtattattaattattatttttattgtaaacggatgtatctttattatgacaatcacgtacaagaggttccatggagctagatgggctccatcgatatgcttttgatggtttgcagatagctccatttcactgtatagaatgggcctacaaatgaacgggctaactagtaagtcacattcctaactccgtggatgctttcgaataaataacggggagccggatatgtatcctcacaaatgtggcttgcatattgatctttgcttaatagatggaaagtgaattcttattaatgccctaataaataacatatcacgcatgttttggctacagttttttgtatttgttatccgtacatttaacatgcttaaaactaatgatggtgtgagtgataacttaacatctttgcttattggaatcttgtgcagtctaattatgattacgaagaatatgtttggtttaaaatttgtaaagtatactttcatttccttctcctttaaactgagtttgaaggtaaaattgaagaaaaactcagtttacagtcagactcgaatctaaatcaaacaaaataatctttcagctgtactttttaacagatgttcaaaactcttaatataaacacaacgcacacacgtctcgtcgccctagcttcttttaggcctcaatagtgttcactgttcaatggccagattctggtatattccgtataacatatccaatcggaccaatcctatatcttgaacacttcgaccacgcccatgaagcatggtccatggaattatggttggtggcactttataatgcctatttatttcataaccatctgaatggtataacacactagctaacaccagtcatgttgtgctgtgctattgtctttatttttcagctggggtagcctatttatttatgacaatttaaaagatagatacaacctcaccttcaaggcatacggagtagaagggagaaagaaaaattaaaagatgaaaatataattaataatgtgatattacgatagagataaaaagaaaaataagatataaagaaactgataaatgcacgaatgtatagttatttttatttatttatactggttcgttgcatattgcggggttcctgaagttacaactcattttgttaggcttacgttaacaagttggtagtcacaactcacaactcaactcatgttatgccccttctaatcaattaaaaacaagaagatatctttggatctagagtgcacctgcggctcccaatgaaagattcctctcgaatactactacttatcattttcctctatatgtattattttgattgaacacaacacaaggcagcaattcagttccttatcacaaaccttacaataattaaaatcacatgcaatcctaattacaaaaaacctatccccaacccccccgtattcctaattacattgacataaaaatgttaaatcaacctcccggaggaaaagctgagaaagtcacgagaattgagaagccgagcagaaaagcgatccgattcactgacccttaattttatagtttcccttcgcaacttaccctcttctctatacacctgaatccctgctttgtccttaacctctctaaccaaatcccacaatctaagttctcttgccccatccatcatctcttggcacggctccaacctcttcaaacaacaaatcaattccaccgcttccccaaacttaaaccctcccaacctctccttaaactcactcaccctcacgcgcacctcaacttgcaccacgccccaatcctcacgcgccaggttcacaatctcctccactaacctgttcccgttgggctcgggcctcttgcaaatcccttccaccaaagtcaccaaggagtcaaaatcggtcaacaagtccacgttggccagacccgacaccctgtcttcgctgtcggtcgaggttccgaggaagaatcccaggatcctggaagtgcataagagctgctcgatgtgctgcgcgaaccatctgacccaggacgagagttcccatgatgtcgggtcggtgttgtgtcggaagttggagaggttgaggtagtttctgcccccagcggaggggtacacggagagctggtcctggaggatgaagctgccgtggtggatgatgtggtggacggcgatcaggcacttcagggccacggcagcgttgttggtcccctgaagccggtccatcaggacctccacggcggccgaggcggtggcgcgtgagccgtcgcccaaggagaggagcgtggccaggtgcttgcgcgtggggggcgtggaggaatcgtggctcgtggcgcgtaggagggagagcgtggtgcgtttggataacaacgccgccttgctctgcgatgctttgtccttgattatcccaattagatgcgtgagttttgtcatgtttatgtggcgtgcttaaagataaacacatttacacagacactactcgcgcatgaaaatttttatggtggaaaatggaattaaagcccaacccaatctagtcagctgtcttggcttggccctagtgggatatatgattatgaaatgatgttgccttctcagctataatgcccagccagatttttattttatttttatgcgttgttcaaatttgcgcatgttcaatcgagtggttgatgacttgatggctctagaacagtgcatatatacacacttaagttttccattttctttttcttaaccctcgatcgataaatgaatcatcattaatacaaaatttaattagaaaataaatatagtctaattcaaaattaattttaacaaaaattacttgtattcaatcacttaattacttacatacatattatattgaatattaatttttattttttataattaaatttattacttcttttaaacttatatataaacaaaaataactaatatcatatcaattaagaaatttaattgatattatttaattttttaatctcagtaaaaaaataaaattatttttaaaatattttttatcatgaatattttttttatattaaaaatagaattaaaatcatatgaatgatattttaagaatgataatattaaatatgataaaattagttaaaaatttatttatatttaaattaaacatatttattacttatatgtttcgaatatatatttttaatatttatagtcgtcttttttttctctttttgataaatggggatagtgattttcttttttaacgggatactttttttttgacatgttttgataggatacttaattattagcactattgttttttttaggaactagtaagtaaccgtgcataatgtatagataaaaatccaatgcaaaatacttaaaattaatgagttaactacatatacgtgtttggttacctatcatttacacacttagcttatgaattcaaccattctttttaaccgtgttagatcacactagttaaaaacaaataaattaaataataataaattaatgattaatatttatgattattataattgtaaatgcttttttaagaattataattgcgagtgataattttgaaagtatttgaccaattgttttaattttatgaattaaattaattagaacttagaattttagatgttatcttctcgttttataatttttaggaaacaattaaaacgaacaatattataatttctgaaactaaattgatgattactctacaataatagtactttctaaattaacatcccaaattaaataacttgcttcccaacttcctccagagtttacaggtccataacgggtatatttgccttttattttcttttctatctttccataacttgccatgagtttctggggaaaaaattgccacgagtctaatattatttttttaacaacatttaccatgcagcttcgagaggtcacacagtacgtaatatgttattgtattgctttggtattgaaatttatgacctgttgattttgatattgaaaattggatattggatagtagattaaaaaaaatgtaacgaggaaagagaaacagttgaccagtagtttcttgactttcttctaaaactaatctaataatcgtagacttttaaacggattggaagaataacgattgattgtccatatgctacgtaccaaatatacacaagcagtgccaattgaaagggtcatctgttcaattggattacgttgaaagagttactttaattcaattttattggtattattttatttttatcattgaattaatttgattttaaattttagtaattttattcaattgaagttanagactaattccataaaaaaaaaaaaaaattagactagtagcaagagagtttattaagttgggatttttggagtatttcaaaaggctcatatcccatattacttagtttaatacttttttctatagtgtttatatatcaatttgttttaaggacttttagacaacaaagtaagaaacaaagacttgcacacatgagattgagttaagtggatatgatgtggtgtaaattgtcatatatgtccctttacgggcacaagaattattttaatttacagattaaaaaattattttcagagtttagttttaattttggtttaagcttaattaccttcaaccaaaaagaaagcatatgcttatcatcacccttgaccctccccaaaacaagcatatacggttatggaattgtaattgatagcaagtaagggtgtacaagaacatacaatgactaatgtttttatcaacgtttttcttcttctttggatacatgttaaaatgtttcaatggacagcgcattcttatatcatttgtgtatgtaggcaattgcttcctgcccctctggctttgcttcctgcatcccataattgcttctatctttggatacatgttagtatgtttcaattagccattccgaattgcattctgggttacatttcgaaaaggctaatactgaatgtaaaattacaatttaaattatactttccagaagattaaaaaggtacagaaaacaaaatggaagtgcaggaagcaattgccgtgtatctactatatagtatatacacaagctgttgaagcccatgcactaatctggtaatgtgaagggccggggaatatataaatttctaagaatggtgcttcatacaccatttaaaaattctacaaggccattaatttttcaaaaacccgaaaatacccctgctgctttggacacttattttagttgagctgagcaccatttttgcttcttgtttgttgttgatttttggttcgcctcagttgcatttgagaagcattggtgatttttggtgccattttggttcatttggttggagttgtgggtggttgccggagcggcgaactcgtcgtcaaagtgtgcaaagatgggtggtgtctgctatcgtacggattcggtaatccgtatggatgctacgaattaggtaatccgtatgattcttacgaattggtcaatccgtatgattcatatggattaggtaatccatataactcatacggattggccaatccatataattcatacggattgaccaatccatatgactcatatggattacctaattcgtatgacttatatggattgaccaatccgtatgagtcgtatagattatctaatccacatgactcatggattggccaatccgtaagagtcatatggattaggtaattcatatgccttatatcagtattttttttttataaaaaaatcaaaaaatatatatttaaatgagattgatttgaagttgacaaataatttcgttgacaaaatacaatacaataaatggatttgccaatccgtatgaattatgcgaatctgtatgaagcaaaaggcataaaatagtgaaggatattttggaaattttactgttacgaaaatggtgtattagaaaaacgaacggtgtaggaagcaacattcttgatttaaaatatagaaaagccagaatgggaattgcttcctgcgccccctaaggaaagtgaaagtccagaaagtttttttattcttttatattgtccaaaacaggttgttgggggcaaattataaattgacaagccattacctgagttataatgattacgaagttcgacataatgaatcagaaacaaatgcaattagatacacattttgaagaaggaaaatgccccacatcggctcctagtaaatgttcccttcttaaacgttttttctctcaatatctacatccaatgatccaagattttggccttttaaaattaattgtcgcaaaagaaatactagtacttatataaattaataatctacttgtctcaaactcattgattctactctcgtttcaaaatcagtaactcatggattctactccatgcatgtctttcagatcctgttttaaatatgaagtgctaaagctgtaaacatggatagaattatttctgtaagattgcttttgcgcaatattagtaacaaggagaatatgatgagctgtcaattacgcgtaaaaatgcttttggatcctgattattctcactgacgattggactaaaacgatgctccagttttatatgtataactttacaacataaacttttaaattaaagttgattagttatcagaagacatttgtcgggcatataggtagacaaaatgtttacaaaatttaccaaatattctacattatacatatattaaatgaaatataaaatatgaattgaaaatgataaaatattaaattcaattgatgaaagattgtttcttaataaaaatgtaaatttaaatacagagatacaaaacgagtgaaactttaatttgttgtttcgtggcaaccgacttttaacccgtgttgctttatgtagtagtgtatttcaaatttaaatctctatataagaattaaattatattagtagtttagaagttaanatatatatatatatatatatatatatatattaatggtagtaaaaaaaattaagaaagtcgaagattctttgattaaatcatggaatcttgatcagatagatggattccacgaagaaccaagttctttatcagtttctttgtgcacacaaaataattaaaaataaataaaactttaattaaattatggttgacaaaacttgatgtgactattgatttgaccatgagctaacgatatgtttgctcatgcatacaaaatcagttatcttctaatttgactttgagcgttgaaaaaccaatcctgcagttattttaaattaaagtcaatggtaaaaaatttgctggcaacgtacttattttaatacattctacactatatattagttaaatttatcaaaaactgtataagtgcgacctattaaatatcaaactgataatttattttttcccaactcaacttaatttgtatttaaaactcattcttctaaaacttaataatactgttcagatttgagacaaaacgcaattcattttgattctgctaaacgggaatcaacaaaagtaaaaccaagtagttaatattttcagggaaagaaaacaaaaacaaaaaacggtatcagcgtgccgttctcctccgaaaccatcacaatctggccacgatgtcctacacaactacgagggcgaataaaatgaaacagttcgaaggacaattaaagccatgctagcagctctggtctggttgaccacaatgattaagcacagctcaaaaagctaaggaaagtggtggaaaaataaaaataaaacaaaatgtcacctggacctaaaaaagaaaacactgagttcctgatcaatgtctccctctggatcaatcaagtggaaagattcacagttgtctgagccacgaaccctctgaaagctagctctaaggtacataagttgatcatcttctttgttcactaactccttgcacttcataaccccagttccgacaaccaccgaacgcatcaacctcagcgcttcgaaatcagtgttggagggcctgcgcttaacggcataccccaccttcctcccattgcagtacatagtccacaaaggcgtggacaaaagtgtgtctatttcgccatcgccgtcgtcgtcgttgttgccgctctctagggcgattcggagggttcctcctctcatttccttggccaagatggttgttggaactgccaactctaggaggagaattggattggtggagttggcgtttgcctgaatgcaaaagctcacttttcctctgcgatatccgaagatcgtgcctgtgatattggtggtggagctcatcagtgacaatgatggtgaataaatatatttgcttgtgtttcggagggtctcgtttgttcttgttgttacatcttggtcttcttctataatggtggcgccgttacatgtggggattagtagttgcatgagagaacgtagcagcctccatgatctaacttgtttctcgcagtccactgtagtcacgccactggccatgtagatctaacttaatgtcgctattgtttcagtttatagctacctcttcagcatggtttagggtttgtttatataatacatggatgatgtaaaatacgctaaaaaatatactactagttaaccttaagttaatataatttttatttaataaaaaataaatttatgataaatataataatgtttgttggtataaaatattgttagtatatattgatataataaaacaaatttataattaaagatgttgatcaattaatatgagattattttagattaattagtatttttgaatttgaattcttatatgtaattggatgaaatatttgaaagaaatattatatgacttagtaacaaaattattttcagtaaaattacatgcaatctggtatatatactaaagagatattaatactcaagtttttcattagatcaaataaaaagagtaccttttcttcccaataatattagttagatatcattttatgttattgtgataaccaaaaatgaataaatattttacaagatatatataaaaaatggttgtccttttcgttttttgattttaatattcaacggttgacctcatgcacacttgttcaaaagaaacccacaaattcacggatcacagcgacatgtgtcgaatagtgtggaattggccaatcgggttcaacatttttgggctgccaactaaaagggttatctaatgcagccccgttgcttgattctgaaacaactcatgcacacgctcagtggatagctcctgttcccagtttttctaatttaaaatatttctcttatttattatttgaggtttcttttcgtttgtggacaaaagtacctgtagcacgctggagcagctatgtctgaaaataattaatatgtaaatattaggtgtcttctttcttttctctttatttttgtgagattaaactttgatttcagccattgaaaaatgcagaaaatttcggagagatttccgtacagtcataacccaccaattcactatcattcaatcattaggcaaatagatttcggaccataaaactccaaattcatacacactgttcaactcttatttaatttgctctacacacacacacacgagcatctttttatacttttcatcaatgataagacctgcctcaccaaaataaaagagaataaaacaatgtgtcggacttattatagcagacccacaaaactagcactaaatcttattctcatgtattattttgcatatagcatgtgagatgaactttggaggcaaagcgtgttgtgtggaggctaaaaaaaattggatgtgtttagctttctagcctggttgctccactcttgtcctcccatttcctttcgcttatttgtcgggtatcgaagactgtcacaggaaaaaacttgatcttccatattttttcagctttcctagatattcagtacgaattttgatgctatgagcagacaaattttgatgccagagataacgaatataatttacttgatgcataagttaatttgtagaattattttttttccaaaaaatgagttttaacttataaatatattaattttagtttatgaaaaaattatttatttatttatttattaatttcccccctataaatacttaaaagaaaatcttatccaaataaaccctaattgaataagagatcatgacttatatatttacttatgcaacataatggcggtaaatccatcttttcattgcaacaattaataagaaaatcaaattagtcgtgtatatttagataaggatataaacaacttctattcaatgatgttctaaactattacatgatagaaaagagtaaatatttgttttgaagaggagagtaaaagtttttcttcaagaacaaaggttctcttagtttatatgtatacaaaagttattgtccggtcgtcgtcatctgtgaacgactgaataattctacattttttttaacattctcctctctcacttaaaaaaatcatacatttacacatgacctactcctaatttaaacaaaaagagctaacttaagcccaatactaagacacaagtcttaaaccacataaaattaaatgaatatgtttaaagcccaattacacattagttattagagtgaaactttcggtagcttcaatttttacttcagataccccattagattctataatatagaattatattttggagtggacattctgaaatgtaatgggttgctagagaggtgcaggaagcaacactctagttatcaattgtaaccggtattttgttttcgggctaattaactaatacccgtgtttataactaaaacatatatatgtggtcatgttcgatattattttatctatatcttttatgttgaaaaagttaaactttggacttgtactgcattctaactatgtatgtagttttcaacttgatcatccctgtatttttttcttatcgaatccataatgtaaaatccgaaaaaaacaaacgtttatttttcgttcacttatataagatgtaattaataattatatgcgttttttaaaaactctttttaggatttttcacacacacttagaatacaataattatgattttcaacaatatcaagataaaatgtgcccggggttggatttcatgccactttacctacttgtattaatgataactaaaaaacttcaaattcaacaatcaatcctcaaccataaaagtcactagaaatctaatcccttagtggttaaagactaaatctcattattaattcctattccctaagtaaatcaataatgaaatttgcattaagcacatggtttgcaagatggctaagtattcatgcatacaccattcctagtgtcaaacccctagttatcttaccctaggtataggttttagtaacattttccaaattccaatgcaataaaagccaaaaatatgtggtttatcatgccacaactaaaatagagagaaagagaataagaaagaagattgagaaatgaaaaatatattaatataaaaaaaatgcaagatgttcagggtcattacattccaaccccaaatactaggagaatttagctagagagagacatgaaaatctcaaaacatgaagaagggaggcaaggtcttgaagagagagtcatggaaaaagcttcacaacaggtcccaacttcaagagaaatgttctctaatgtaaatttggtcaaatcctcttatcctgtccttaaataggatctgacatgtgcctttttaaaaaaacacatgtgacacacttgcactcaagcgctaatttcagctcgcttaaacgtgaggtagaccatagcgctaattaagcgtgagttaggctgtcttgcttaagcgctacatgatatgtgcttaagtttgaggtttaatctttctatttgtatatgaaaaaatatttattagaaaacaccaatctcctaaatagatattcatattctaaaaaaaactgacgcatgattagaagatatcctaagcatccaaaaaaaatgtcacttttttttattaaaacaataagaaataaagaatataaaatgaaactcttgtaggatctgaataatcaatgctcttacaacattggttaagaaatttaaaaaaaaatatttattgtaaaaatcataagaaaaggtaaacaaaagtcactaccaatgtaatttgtatatcccaataaaaatctttttctttttagtttattaattaatattctaaaaatactggttaacatttgtcattcttgtatgtaatgttgtagagaaattattaaataattttttatttttacattttcatgatctcaattaacttttgtaattaaaaaatggttctttaattaataataataaattaaacaatgattgtgtatataaacactcacttaaacaatgcagtgtcaagtcaatctgttataaacttgtcaattaacgttggttttactttggagaacctctaatgaaaattttcattttgtataaaaatattaatatatttaataccgtgtcaaatagagattaacgagacagaatgaagaaaaccatgtaataacttcttttaatgatgcgtgcatagtgattcatcactcaagcaaacacttaacggtactgaagcacctaactttcgtctctggttcgttagttagaagcatgagcgggaactaaccttagattggcaaaaaaaatgcgtgctatgttcaccttctattcaaatctccaaccatcgatcgaacaacatgtacgtacatgctcctcacttttttctcaactattgtgcttctcttcctctttcattttttcaatgctcctatgggaagaaccaaagtctccaccctctttgccaataaccacaacaacaattacatgcttccttattccaacaccatacgacaaactcttgtaaacaggccaaatacccacaaagaccggttccccttttcaccctttgaattattgcggcgccttattcgttcaagtattccttaccatatcttcttccattttcattcacacttctctctagctagttattagttactgttatcttatatactgaagtatttttatttttattttttttttggttttctacttatccgggttgagttcaattgcattgtaggaaaagtagatgtagactcaaaaactaaggaagaggagaaagtctactcttggttatacaccttggcccagtcagacaaaaacctggttttcgagtacgttaggtccactgagagaggcaagtatctgcactctgcagtaccttgtgaattctacattgatactgaaaaaaatgtctactttccgaccatataagacaatcttatccatgtgttatatgattatgtttaacttatttatattttattttatgtgttgtcgctctaaagttagaacttataactacgtagttcatacaaactatccaaaatccattaagttgatgctagtgggtcttggttgcatgtaaactagactgcagggtccagtgttttcagcttttcatttctgtgaattgtgatcactgaattaaataccaccctctagttttgtgccatatgaaaggtagtatttttcaattctgtgcaggcttaagtttcacagaagccgataggagactgagggaaaatgggccaaatgttccacttgagtattcctttccaagatggtggcatcttctatggaacgctcttttccatcctttcattatcattctgattgttttgtcagttctgtcattcattacctgcgacagtccaaatggatttatcatgctcatattggttttcatcagtgtcacccttcgtttctatcaggtttttctacattaattagttggttgcattgaaacagtggaattagtacttctcttcccttcacttcactctaattccgacctttgtttgtgtctattaggaatatagcagctcaaaagcagcgatgaagctttcggaatttgtaaaatgtccaataaaagttcaaagatgcgctggtagagttgttcagaaagaacttgtagttcaagttgatcagagggatgtagttccaggtgacattgtgatttttgaacctggtgacctctttcctggagatatcagattgttatcttctaaacaacttgttgtaaggtgtgttatgtcaaccggaaaatcttctggtttagtagattagagattagtgaacacttgtattcttcccattgccttttcagctaactaaattatcacatggtgatttcataccctgttaacagccaggcatcactaactggggaatcatggacaactgacaaaactgctgaaatcagagaagatcacagcactcctttattggatttaaagaacatctgctttatggtgagttagtaacacaattccctattttgtattttgtttccgttgacgttatagcttcattttaagatgtagccatcaaaaatattaaatttccgatcagagatagtctgattgaatggagaattttgctgagaaatgattagttattaacatcacagggcacaaacgtggtatctggtactggaactggcctagtgatttccactggatccaatacttacatgagcaccatgttttcaaaagttgggaagaagaaaccaccagatgaatttgaaaagggtctcagacggatattttacttgcttatttctgtcattctagcagttgttatcatcatgtttgtgataaattacactacatctcttaacttgagccaaagtgttctttttgccatctcagttgcatctgccctcaatcctcagatgcttcccctcatcattaacacatgtcttgcaaaaggagcacttgctatggctaaagacagatgtatagtaaaaagtttaacatctatacgcgacatgggatcaatgtaagtataaattcacattgaaaatcaactgattgatgacttggacactaaattcatatgcagttgcacacatttgaaccaacttataataaaatatgaattcaagtttccattcttacccagctttaactacgctttcccctgtctctaccatcaaaatcaaagaaagggaaaaagagaattggaacctacaattaatgattagatcagcatgcgttttaattttgcagattaaactagtggaaaccagaatgtaaaaatctatcattattgttgattaattttgaataaagaaagatcagcaaggcacgttcttaacaattatcaagacataaatataggaattatgtattagaaacattatgaataaatatgaacttgtagtaataaacagagaaattgataagtcggtctaaattgtgttctaacttctaatcaatttggctaattgtatacgtggtgctaaacttctagtatatcaattattgatgcaactgcatcattaacaatgaatgaaaacataaggtccaaaaatattgcaaggaatatatgtcttgttttaatccaaatatgcatctttctagcaaattctttttctgcgtacttatatttttaaatgttgcagggatattctttgtattgataagacaggctcccttacaatgaatcatgcaatcatggttaatcatcttgactgcaggggtttaccccaagaaaaagttttacgctatgcctttctcaactcttactttaagagtgatcagaagtatcctctggatgatgctattctagcatttgtatattcaaatggattcaggtttcagccatctaagtggaggaagatagatgagattccttttgacttcataagaagaagagtatctgtcatcttagaaacagaaggcggacactcacaattctttggcaggttcctggtaacaaaaggagcactgttagaagtattgaaagtttgttcttttattgagaatttcgataaagatgaaatctctcccttctcttcagatgattatcagcagattttaaatctctcagaagatttgagcaatgagggattaagggttatagcagtagctataaggaagctggaaatggtgtgtcttttcttcttgcatcatccaaattgggcgtacatttctcttcatatattttagatagaacactcactaaaaagatcacattgtcaaaattattctcttaggtgaaattattttatggttcatgaccaccacttatttgtagtcctggtcaatctttatataacacataactaaggttttttattttttcaattaacgaaaaagagttaataaattcagctacgtgtcaaggggaaattagctaaactatagatacttagcagttgtaaactatacaataacttcttattattgtagggaacggtcctctcatgttgattttttacatgacaacacgtgtctatctctctcatcataagcattaaataggcggaatcttattagtatttgtgaatattaatggagatagttagaaacaaagtttccacacaaggttatgtaaaaattcaatacgagagtgtgaagatgtgtcactatatctagctgtcaagattgaggataaaacatagctttgataagttagttggtggccaacaactaacagttttcagtttctgtttttagccttttattcttgatagttagtgcaccatttactgctatatatgtgagaggtgctgcagaaacagagggtggtatgtgcagaacgtgaaatcactttgtagtgagtgagggagtgctggtgagtcacaaacacagagagtgaagattggagtgtatgagagatagagtgaggcttggagttcttggtgctgttagctaaacagtggagaatcaagcaagattctattgtacacatatctttgtaactcttgatccataatagataagtttgcttctttctccnnnnnnnnnnnnnnnnnnnnnnnnnnnnnnnnnnnnnnnnnnnnnnnnnnnnnnnnnnnnnnnnnnnnnnnnnnnnnnnnnnnnnnnnnnnnnnnnnnnnnnnnnnnnnnnnnnnnnnnnnnnnnnnnnnnnnnnnnnnnnnnnnnnnnnnnnnnnnnnnnnnnnnnnnnnnnnnnnnnnnnnnnnnnnnnnnnnnnnnnnnnnnnnnnnnnnnnnnnnnnnnnnnnnnnnnnnnnnnnnnnnnnnnnnnnnnnnnnnnnnnnnnnnnnnnnnnnnnnnnnnnnnnnnnnnnnnnnnnnnnnnnnnnnnnnnnnnnnnnnnnnnnnnnnnnnnnnnnnnnnnnnnnnnnnnnnnnnnnnnnnnnnnnnnnnnnnnnnnnnnnnnnnnnnnnnnnnnnnnnnnnnnnnnnnnnnnnnnnnnnnnnnnnnnnnnnnnnnnnnnnnnnnnnnnnnnnnnnnnnnnnnnnnnnnnnnnnnnnnnnnnnnnnnnnnnnnnnnnnnnnnnnnnnnnnnnnnnnnnnnnnnnnnnnnnnnnnnnnnnnnnnnnnnnnnnnnnnnnnnnnnnnnnnnnnnnnnnnnnnnnnnnnnnnnnnnnnnnnnnnnnnnnnnnnnnnnnnnnnnnnnnnnnnnnnnnnnnnnnnnnnnnnnnnnnnnnnnnnnnnnnnnnnnnnnnnnnnnnnnnnnnnnnnnnnnnnnnnnnnnnnnnnnnnnnnnnnnnnnnnnnnnnnnnnnnnnnnnnnnnnnnnnnnnnnnnnnnnnnnnnnnnnnnnnnnnnnnnnnnnnnnnnnnnnnnnnnnnnnnnnnnnnnnnnnnnnnnnnnnnnnnnnnnnnnnnnnnnnnnnnnnnnnnnnnnnnnnnnnnnnnnnnnnnnnnnnnnnnnnnnnnnnnnnnnnnnnnnnnnnnnnnnnnnnnnnnnnnnnnnnnnnnnnnnnnnnnnnnnnnnnnnnnnnnnnnnnnnnnnnnnnnnnnnnnnnnnnnnnnnnnnnnnnnnnnnnnnnnnnnnnnnnnnnnnnnnnnnnnnnnnnnnnnnnnnnnnnnnnnnnnnnnnnnnnnnnnnnnnnnnnnnnnnnnnnnnnnnnnnnnnnnnnnnnnnnnnnnnnnnnnnnnnnnnnnnnnnnnnnnnnnnnnnnnnnnnnnnnnnnnnnnnnnnnnnnnnnnnnnnnnnnnnnnnnnnnnnnnnnnnnnnnnnnnnnnnnnnnnnnnnnnnnnnnnnnnnnnnnnnnnnnnnnnnnnnnnnnnnnnnnnnnnnnnnnnnnnnnnnnnnnnnnnnnnnnnnnnnnnnnnnnnnnnnnnnnnnnnnnnnnnnnnnnnnnnnnnnnnnnnnnnnnnnnnnnnnnnnnnnnnnnnnnnnnnnnnnnnnnnnnnnnnnnnnnnnnnnnnnnnnnnnnnnnnnnnnnnnnnnnnnnnnnnnnnnnnnnnnnnnnnnnnnnnnnnnnnnnnnnnnnnnnnnnnnnnnnnnnnnnnnnnnnnnnnnnnnnnnnnnnnnnnnnnnnnnnnnnnnnnnnnnnnnnnnnnnnnnnnnnnnnnnnnnnnnnnnnnnnnnnnnnnnnnnnnnnnnnnnnnnnnnnnnnnnnnnnnnnnnnnnnnnnnnnnnnnnnnnnnnnnnnnnnnnnnnnnnnnnnnnnnnnnnnnnnnnnnnnnnnnnnnnnnnnnnnnnnnnnnnnnnnnnnnnnnnnnnnnnnnnnnnnnnnnnnnnnnnnnnnnnnnnnnnnnnnnnnnnnnnnnnnnnnnnnnnnnnnnnnnnnnnnnnnnnnnnnnnnnnnnnnnnnnnnnnnnnnnnnnnnnnnnnnnnnnnnnnnnnnnnnnnnnnnnnnnnnnnnnnnnnnnnnnnnnnnnnnnnnnnnnnnnnnnnnnnnnnnnnnnnnnnnnnnnnnnnnnnnnnnnnnnnnnnnnnnnnnnnnnnnnnnnnnnnnnnnnnnnnnnnnnnnnnnnnnnnnnnnnnnnnnnnnnnnnnnnnnnnnnnnnnnnnnnnnnnnnnnnnnnnnnnnnnnnnnnnnnnnnnnnnnnnnnnnnnnnnnnnnnnnnnnnnnnnnnnnnnnnnnnnnnnnnnnnnnnnnnnnnnnnnnnnnnnnnnnnnnnnnnnnnnnnnnnnnnnnnnnnnnnnnnnnnnnnnnnnnnnnnnnnnnnnnnnnnnnnnnnnnnnnnnnnnnnnnnnnnnnnnnnnnnnnnnnnnnnnnnnnnnnnnnnnnnnnnnnnnnnnnnnnnnnnnnnnnnnnnnnnnnnnnnnnnnnnnnnnnnnnnnnnnnnnnnnnnnnnnnnnnnnnnnnnnnnnnnnnnnnnnnnnnnnnnnnnnnnnnnnnnnnnnnnnnnnnnnnnnnnnnnnnnnnnnnnnnnnnnnnnnnnnnnnnnnnnnnnnnnnnnnnnnnnnnnnnnnnnnnnnnnnnnnnnnnnnnnnnnnnnnnnnnnnnnnnnnnnnnnnnnnnnnnnnnnnnnnnnnnnnnnnnnnnnnnnnnnnnnnnnnnnnnnnnnnnnnnnnnnnnnnnnnnnnnnnnnnnnnnnnnnnnnnnnnnnnnnnnnnnnnnnnnnnnnnnnnnnnnnnnnnnnnnnnnnnnnnnnnnnnnnnnnnnnnnnnnnnnnnnnnnnnnnnnnnnnnnnnnnnnnnnnnnnnnnnnnnnnnnnnnnnnnnnnnnnnnnnnnnnnnnnnnnnnnnnnnnnnnnnnnnnnnnnnnnnnnnnnnnnnnnnnnnnnnnnnnnnnnnnnnnnnnnnnnnnnnnnnnnnnnnnnnnnnnnnnnnnnnnnnnnnnnnnnnnnnnnnnnnnnnnnnnnnnnnnnnnnnnnnnnnnnnnnnnnnnnnnnnnnnnnnnnnnnnnnnnnnnnnnnnnnnnnnnnnnnnnnnnnnnnnnnnnnnnnnnnnnnnnnnnnnnnnnnnnnnnnnnnnnnnnnnnnnnnnnnnnnnnnnnnnnnnnnnnnnnnnnnnnnnnnnnnnnnnnnnnnnnnnnnnnnnnnnnnnnnnnnnnnnnnnnnnnnnnnnnnnnnnnnnnnnnnnnnnnnnnnnnnnnnnnnnnnnnnnnnnnnnnnnnnnnnnnnnnnnnnnnnnnnnnnnnnnnnnnnnnnnnnnnnnnnnnnnnnnnnnnnnnnnnnnnnnnnnnnnnnnnnnnnnnnnnnnnnnnnnnnnnnnnnnnnnnnnnnnnnnnnnnnnnnnnnnnnnnnnnnnnnnnnnnnnnnnnnnnnnnnnnnnnnnnnnnnnnnnnnnnnnnnnnnnnnnnnnnnnnnnnnnnnnnnnnnnnnnnnnnnnnnnnnnnnnnnnnnnnnnnnnnnnnnnnnnnnnnnnnnnnnnnnnnnnnnnnnnnnnnnnnnnnnnnnnnnnnnnnnnnnnnnnnnnnnnnnnnnnnnnnnnnnnnnnnnnnnnnnnnnnnnnnnnnnnnnnnnnnnnnnnnnnnnnnnnnnnnnnnnnnnnnnnnnnnnnnnnnnnnnnnnnnnnnnnnnnnnnnnnnnnattacttgtgacgtaaatatatctccattttttagtctataacagcataaatcacatgtgaataaaacctttttaatttaacataaaaataaatacaaattcgactatatttatataccttttttatacaactatactcaacaatttctttacattagcatctatagtcaatcttgtgttaaagaaagaatttgaaatacccatcatacttgataattttttttaaaaaaattaattagttgtattcgatgtcttattttatgtcacaaaatagatattattaaaaaagatttatctactcactttgaaaacttttcactatacaccattgtagtataatcacaattggattgtttgaaaggttgtttaaaagatgggaatcaatgtcaatagcaaatttatcccacattgcacatatgatcctattacctctatttgatagaaaaatgtaatttaattagttaataatttaatatatgtcattttaaatattaaaaactatggaaaaagaagaatttattnnnnnnnnnngtttttagccttttattcttgatagttagtgcaccatttactgctatatatgtgagaggtgctgcagaaacagagggtggtatgtgcagaacgtgaaatcactttgtagtgagtgagggagtgctggtgagtcacaaacacagagagtgaagattggagtgtatgagagatagagtgaggcttggagttcttggtgctgttagctaaacagtggagaatcaagcaagattctattgtacacatatctttgtaactcttgatccataatagataagtttgcttctttctcccgtggatgtaggtccttgtgactgaaccacgtaattgctttgtgttcttcttctacctattgttctgtgtatgctttaattcggtttctggtatagctttgtacatgctgctgttgtgtgctctgttttgctgtgtttctggtttttctggtttcttggagatttaagttgcaggttccttaatccacaacagagaggataagagaataaggagcacctcattagctgtggctgactcactttcaatttcaatttacgtgtgacattgcagccgcaaatatgcgaaacaagtaatggaagcaagagagaagaagaggatattgaaagagacatggtgttcatcggcctcataacgtttttcgacccaccaaaggactcagcaaagcaagcactgtggcgtttgtccgagaagggagtgaaggctaaggttttaactggtgactccctctccttgacaacaagggtgtgcagggaagttggcataagcaccactcatgtaataacaggtcctgaactagaacaacttgaccaaaatactttccatgagacagtccaaagagccacagtacttgctcgtctcaccccaattcagaaacaacgagtggtgcaatccttgcaatcaattggaaaccatgttgttgggttcttaggagatggagtgaatgattcactagctttagatgctgccaatgtaagcatttctgtggagtcaggtgtagccattgccaaagacatggctgatattatcttacttgagaaagacctcaacgtgcttgttgcaggagtagagcatggtagactcagttttggcaacacaatgaagtatgttaagatgtcagtgatatctaacttgggaagtgtcatttcactcctcatagcaacactgttattcaagtatgagcccttaacttctagacagcttcttactcagaatttcatctacagtgtgggacagattgcccttgcttgggacaagatggatgaagagtatgtaaagacacctcacaagtcatcagagagaggcttgtccatgttcatgttgtggaatgcaccagtgtgcaccctttgtgatgtggcaacacttttgtttctttggttttattacaaggcttacactgatgtgactcagaagtttttccattcagcttggttcattgaaggtctcctattgcagaccctccccatccacttgataaggacagagaaaatccctttcatacaggatgttgcatcttggcctgtgattttctccactgttgtgacatctgcaattggaattgcacttccattcacacccattgggaaggtcatgggattctcacttatacctctctcatatttcggatttttggtgcttctttttctggggtattttacagttggccaggtggttaagagactttacatattggtttataagagatggctttgaatatcaaaacattcatctgtttagtcgcataaaatgctactgttataaagtcaatatcaagtagaaacttttcgtgtcatcaaacacatccaacattgctgtaatcgtaccctacaaatttcaaaacaataggaattacattcatgaatgaataatacgtgcattaaaattttgtatactatatttagctaatttcagatagttgtttatgttccgtccgaaattccagtgcttcctgtcatttttctatttgtgctatcagttcttgatccgcttatcaccttcagacaataagcatctatcaaaacatgtggaacatttgaaatcttttacttgtctgcatttgtatgagttgcatattgtcccaggccatgtattaattaacaaaaccggtttagtatgtactatttgataagaaaatttagtttgttagtcactaaaattatgtactagagattattcagatagaatttaaaaaattaggctaaattacttagaacgttgaacaagaaaaaacattcataaaatgtaggaaaaggtcctaccgggagtcgaacccaggtcgctggattcaaagtccagagtgctaaccactacaccatagaaccgtgtgctatatatttcctatgatgataacaaatacaagatgataatagtgtcttaaaaaaaagatgcagccaatagaaaaagaatttgagatccatgcaaaaagcatatgaacattgtcactctaactattcgtttatttattttttaatagatccactttcttccttatgatgtgctgatttcgctatttaaaagaataaaactttttgaaaggagtaaaaatgtaaaatttttagcaaaatgttgatccccattccccactaacattttgtcaatagaaaatctactttagattttgtgggaaaaaaaaaacaaagtaagaagaggaaacgttgagaataatattgcaatcaattaaaacaatgaagtaaatgataaaataggtttcaacaaaaataaatataaaaagtaaaagaggacattgtaaaaaacagcagtattaaatttgagtagcacgacaagaaaactaattaaaaaaaaaaaagagtagaagccatttagttgcgctttaatttttttgtgagaagtaaagttataatctttagagtaaattgttcaagccttccttttattttgtagtttttacataaacctctcattttataaaaatatgctataattaaatcccgaacctttgtttttatagcatgctacatttaaatatagaatcattgtttcataaatcccgaacctttattttattacatatattgagtcactatacaaaaataaaggtttttttacgttgaagtgtagaatataaatccctcaaaaattttgtcactgctttaatccttgaaaagattgttatcgtatgaatatatcctttgaagatttatttagtcgctcatcaaagattttattcaccactttagtcattattcacaggatccctttggtgaaatttaacatctcttctctcaaagactaacatgattatattttaaaactttgaggaactaatttaatgataaattaaatctttacaaaactaatttggtaataattttttaagaagactaaaatgatagtatttttatttcgcttagtaaaaacaaattaaaagattaatacagtgagccacgtaagtctaaggatgaaattttaagttttatatggttgaaatacttgttaataaaccttaaaaatgtatggagtttcatgaaaggacaaatatttgggatccactagctagtaattctaagaaagagacacataaaatatagatagaggaaatggatttagcgtttaatatggatgtcttgtaaaaaaaattagtcatcaattttagtataatttataagattgttacttacatggtgggtgtaattgaaaaatagtaaatgatgtttaatacaagttttttgttttttttttttttttnnnnnnnnnnnnnnnnnnnnnnnnnnnnnnnnnnnnnnnnnnnnnnnnnnnnnnnnnnnnnnnnnnnnnnnnnnnnnnnnnnnnnnnnnnnnnnnnnnnnnnnnnnnnnnnnnnnnnnnnnnnnnnnttatgaaaacaagttcaatgcacaatctgagtattataaatccattggatggcatcatgtttcatacaagttaaccaaacatagccaaccaagtttgatgcatgattaggcaaaaaaagagggaggggttatagaataaaagagagagcatccatattcatatccgcaaactcatgttgaaacatacaaaacagtggtcaaatttcccaaacttttcatataattgtatgatttgtatcactatatacgtaaagcatatagataattgctgtaagggaagacagacagagacatatgtggagtagaggcatcactgctttgctttggataaacaaacgttcatcctccatcaacagcccttgatctttaaagtggacctttcatcctcctaaattagtgctttacaatggaagagttgaactctgactcctagagtgtctggagaacaaaaacttggtgttatgtgaaaaagatcttctcattctcattgagacggagaccggcctctttggcaacgcacgtccaattgaagccaacttgttattaatagtagttgttgaagttgaactcccactaccatgcttctcatcagcaacaacactcatatccttgttacttgaataattcactttttcaccacaatgatgggtatctaaatccaccaccacatcacgaaataacaccattgaataagcagaagaagaatccatggaaaccgatcttctcagaggatgtgtttcctcttccacttccactgccgaagacacatcatcttcaaccctctcatgatcagaactctgcacgcgggcctcttgatgatcagaaacgtttgaaaccgtgtgattattctgatcaacggctctgatcacatgcgcgccgccagtttcgtcgcgtagcacaggtgcacgacacaaggggcaatttttgtgagaccggagccacgtgtcaatgcaagggatgtggaaggcgtggctgcacttgggcaacaacctcagactctcgtcgtgttcgaactctccgaggcaaaccgaacactcggtgccgtctatgatgccttcgcctttcttgtatttgaataccgtgatagagtctatgagggactgttggagacccaccgtacggatgtaccatatcgggtggacaaccgccaactcctccacgtcatcatcgttatccgaactcggaggagaatctccgttcaaatcgagcaatatggggccgtcgactcttctgttttggttattgcggctatatcttcttgagtagaagtaccttatgagtacggacacggtgcagagaaatatgatgacgccaaccatgcatgccatgacaatcatcgagagttgaaaaacatttctgtgatgttctttaagggaaggtatcgtgaatttaggatgtggggtacgatcatggtgttgttgggttccattcttaggaagaggagccattaacggaacagaggtagaagcaggggtcaagtattctaatattctatggatgtggaaaatattgttgcatagagtgtggaatgattaaatggtaacatgagaaattcgggcttattttgatgggatgggaccatttcattttctattggagactcagactcactcgcgaatttacttagtgctttcttttttttccaagtccatggactttgtgatggtttccgcgttagctttaatggtggtggggcgttaccagattcttgtaatctacaatccttttcatcaaccaaactttctcttttttgttttttcataaataaaaaaaataggacatttttggttctcgctttattttatttttttaaaaaatagtttttgactaaacaagttatttgtgtaattttaaggtgattttatattaaatagtatagttgtataactataagtaaattacataattttttattataaataaataaatcattctcatataagaatatcttttttacacaataacataatttttgtcattaattaacgtttttctatgcaataaaaataaataagaaaaacaaaaccaatatatagaaaaagaccattcccatgcataatatataaaagtaatgtaaaaaacttattcttataaaaattcaaaatttgaattattattttgtacgttattcgttatctcattaaagttcattagctaaagacatgatataaatagtagattaaccnnnnnnnnnnnnnnnnnnnnnnnnnnnnnnnnnnnnnnnnnnnnnnnnnnnnnnnnnnnnnnnnnnnnnnnnnnnnnnnnnnnnnnnnnnnnnnnnnnnnnnnnnnnnnnnnnnnnnnnnnnnnnnnnnnnnnnnnnnnnnnnnnnnnnnnnnnnnnnnnnnnnnnnnnnnnnnnnnnnnnnnnnnnnnnnnnnnnnnnnnnnnnnnnnnnnnnnnnnnnnnnnnnnnnnnnnnnnnnnnnnnnnnnnnnnnnnnnnnnnnnnnnnnnnnnnnnnnnnnnnnnnnnnnnnnnnnnnnnnnnnnnnnnnnnnnnnnnnnnnnnnnnnnnnnnnnnnnnnnnnnnnnnnnnnnnnnnnnnnnnnnnnnnnnnnnnnnnnnnnnnnnnnnnnnnnnnnnnnnnnnnnnnnnnnnnnnnnnnnnnnnnnnnnnnnnnnnnnnnnnnnnnnnnnnnnnnnnnnnnnnnnnnnnnnnnnnnnnnnnnnnnnnnnnnnnnnnnnnnnnnnnnnnnnnnnnnnnnnnnnnnnnnnnnnnnnnnnnnnnnnnnnnnnnnnnnnnnnnnnnnnnnnnnnnnnnnnnnnnnnnnnnnnnnnnnnnnnnnnnnnnnnnnnnnnnnnnnnnnnnnnnnnnnnnnnnnnnnnnnnnnnnnnnnnnnnnnnnnnnnnnnnnnnnnnnnnnnnnnnnnnnnnnnnnnnnnnnnnnnnnnnnnnnnnnnnnnnnnnnnnnnnnnnnnnnnnnnnnnnnnnnnnnnnntgatgtattagaattttttttaagtgtgaagcttaaggaccaacaattattatttatagacattctattgatattctaccataaaaaatattcttagtagtcattaccattataatgatagttactaaaagtttaaccttgcaaattcatatcgttcactaaatagaattaagcatggttttaataaccatattttgagtttcaatcaattaaagcttattgtttttaacatcgttgcaaattatttttccaaaattacccccacttacttccttttatattccaaaactaccttcacctattttcttttatacatataaagataacattcttagttattaaaatacatatataaatatttactcttttaatgcaaaactattaaaatataaaataaatttttttattttcgtaattatcaccttacaactcatcccgacatcgtttttcacaaggctgaataaaggtcggggtataataggtttatttttattcctatctaacctgaaattttgactcaaatcatttatttatatatgaatccagtgagtaaaacctgagatatatggaacgaaactaggtcaatctaattttttaatataatatatcgattttaacattatatatatagttaaaacataaaaaaaagtataaaggtaaattaaggtaaattttataatatatagtttacaataaaaaattattataaatttaatattatattatacaaaacattatcaacacataattattaaaaagaattatacatttttaagagacattaatggtaaaccaaactaggacgacccgaaccacaacctaaattgattctaataaaacacacagtgtttattttcaaaactttaatccatccaaatcaacctcggtggttaggttttactcatccctagtttttaattgattaatagtgtgaaactttttatgttaatagcgaataaaaaattaattcataaaaattattaaaaaaatgagagataaaaaaatttcttaaattatcaaataattttattatttataccttaaaagaactacaaattaatataaaagagtgaaacgaaaaagaaagttgtataagaagaatactataaaaaaaattcatcttataagattatatcttacttaaggaataaatcaaccaaatacatttaattaaataagttagcttatcaattttcaactaccaaatttatcagttagatctttaaatactactttaaattcatcaaagaatgtaactccatatataatttacaataaattctttcactttgttttaaattcctacccataaaaaaaatactaccttaaatctctccttcaaaaccccgcagcccttcccgcttaatccccgttttcttctatcaggatcaaataatgcaggacgaaaccaaaaacatatagtcaacttaaaaacaaatctgcacgtcataacagtaatcaaataagagcatcgctttatgactgttgatagatcaagaatatgatatgttacacaagtaaaagtttacccaaaattgaccattatttcatttttttttcgtaataatgctgtgtttataaatcatatatgattgttgaaatccaatacctgtcaaatttaaatgtttaattttcaagtatctcatgatctgtcttggcggtgcccagttagtggtgtcaaaagaggaacttttcctgcaattgctaagccataagctttgagcccgtcgtactcagcaggatattttgtcattaaccttattgtttgaactccaagatctcgtagtatctgtcagagatttatcattcaattagttgaaaaataatgcttatgctgccaaaatgaaacaataatttacgatgaaacatgcatgagcgaaaataaattgttccgtacatatatgacggttaacagggataaagagacactaaattatatttattttgatttcttgttctggatgaaatggtaagaaaattgaagtcagatactaagacaagatatgtcaaaattttataaatactattgttatagtatccaaaagataaagatttcttgattaattaggaaatgacgactcaagataactatgtattaaagatgacaagaataatcaataatcatccaagaatttaaggttgtggaagttttgagaaagtgcaagatttggaattcaaatatcaagagtttgaaattcaaaatgttagttatcagaagttggatgcactttctacacctgtggactaacttataaacttaatatgaattgatttcaagatagaatcggaacatgtagtacatttcagttggttttaagatggaatctaatattttgtattacacacttccattattactagtaaatttatcatttgctgatctcaaatttgactttactgatatacattaccactttgtattcttttaattacttatttaaacagtagaataactcattttctcagaagttgattacttatttaattacttatttaatatggtgggtggtccgttatgatctaggatagattttaatatcatcttataagagtttggacctaactcaactcccagagcaaattcaaaggatgaggatcgttcccacttatatactttattttagcattatttctagtcaatgtgggacttgcgttttcccaaataatataatttatccttcacctcacatagaaacctcctacctctaacttgggaacttgtgcactggaatgcattctcgcactctgctgtactgggaaaatcaccatcttatctacctaccttccttccttctttctgcctaaggacacttggattcaacatatggagagaaaaaatgacaagccaacgttttattttacatgcatgcaaatattgacattacccatgtttcaataaaatgcaaggaatctccgttttatttacattattacaataaaaactgtataaaaattccaggcacacacaatcccaaaattcaatattaaccagatggatttcgaaatctgcaggtattactttgaacttgcgccagactcactcttactctctaattatagtgtacatattcaatgttatagattaatgtaggacttgtaatccatttgattcattttcatataaatcccaattaatgttttctatatatgaatatatgaacaacactatatatataaagtgatgtagggtacgtctttacatgtggcataagtggaatgtatgcctggacatggcatggaaagaaattaaaaaagagaatatacataaaaacaatggtaattaatgaaaggctgaaagctcacttggaaaatgtgtgcagggacatggaagagcaatgaaaattgacgaaagccattcagtgtctgatagatacggacaaaggtacgtaagataagaagagcgaacaccagagattcgttcatctgcaagatatggttccgcgattggtttatgtatatatattggtagctctgctgaggtaccacttgtctcttcataaccagttacacttacaaatccaattgccttgtttgtttatactttttacgttctttcctgaagaagaattttctacgtgacctttggtaagcaggaatgtgaaaatgtaaaaatttgctttggtttacaaagaaaatcattgtcatgataggaattagcgggtctagtatattctttttcgttcacaatagtcactgtttgttttatgttcaaccacaggtatctagaggtcatcctgtttaaactgaaacaacttaagttcatccacacatttagtggttcacaatactcatgtttgacatcttattcaaagaaaatcaagcattaattatttcaatcaaatatacaagtacccattaatatgtaattttcatattatcagattcatcaaagacaaattcaggtgtttatattagtcttcaataacatattttcttataatattcttttactgatcctttttaatatttaataaaaaaattatcagttttttttataaaaaaaaaaaggtattcaacaaaaatatacacacttgatatttccaatattataacttggatgttgagattttcactagagcttaatggggaggcaaaaaaaaagtttttcaattgatgtggtgatctcattgtcatatcctgagtcctacccctaactacctagaaaggcaaccgaggttagtataaatgccatttccgcctctgagaagggcaatgtcagtggttatggaatgaccaccctagttaaattccataccattgccaattgtaaatatatattgaatttttcttggtacgactttaggacatttaaattcccgaatgccgtgagactatggttaaatatttccaatttagcactctcttagaatcatacatagtttattcctagaatcatttacatttgtccaagccaatgctttagagttagagatttacaggaaatgcataacttggacattagaaaatgcaaattacagcatgccatgcctcaccggtcttcaggattgcgttaatttacctgcaccagagtaatgtttgtaactttctgttgatttcaaacaactttcatatgacgctcaacttatgtttatgtttcaggtcttggcagtagtagtactaacatttttttattgacaaatgttagttgttaattgttaatttttttttgttagtgaaagaatcaaactcactatcttttcctcccttttttctccttctatcaccaagttataactccgtggtactaacatgttaactgcaacagaattcaaactttgtgtaacattcttatcgttctcttttatagacatgcataattgtccattttgagatgcatattacttcattttcatatatgaggataattttgttttttttctcaactttaggtaaattttataagttgaaatttctggcactgataatttaatatttgattattttccccctcggtgagctcatgcccaatgagatgctgattcggattaggaactgcataagctcaaacttacatagataatcgttgtaaaagatcatgccttatttcggcatttgggcaattgtattaaagtaattcaactgtagtgttcaggtatgacaactgagaactatcaaaagttgtgatgaatatctagacatgtaaattatgaaccttgtcttggtgttattgtaaaatgtcacaatcactgtcactgaacatttcatatgacttggatacaaagtagaaatgtattatcagaaaatacactacctttttttttaatcttgaaatcaagtccatttcagctttgctgttactcttgtttgtttaagttcattttcttgaaatcaaatactttagacaatgagaaaagcagttgaatagaggaagaagaataaaggtatgtttgaatgtctgttcaagatgtggtgcatgaattccaaagtaaatataatggcccacaaatttcgttttgcaaaataaagggtcatggatgcttcttggaaatggaggttggctcaaacttaggtttacaccagaaatccaaacacgcactaattggttatacaacagatgctacctgaaatattctccaaaagtatttttctgtctttttggcttattgaccttggtgcatatgtggcgtgtgccatttttatgaaacaaagcatcctgtctagcatcgtagacctgaaataaggattaaagtatgtggttttatttccttacatgttttataatgtgaatgtctcctgaatcagcaatataaaaaacgacatttcaagtgtggaggatcaaatgcatgcggccttatctccaagagtagagaagaactcgtaatcatgagatcacaaggctgaaaccttattgttccacctaggctcatcatcttcctaaattagcaatataatcaaatatggaatgtcttgtttgtgttcccctacatatagactgttacccaacttgttcaaaatttcaaatggatgtattagtttgtttaaatttagaaaaagaattttttaaaaaatatttttttagtaagtcgcttcttaaaataagtataaaactattttaagtaaaagtaatttatatagacatattaaaaatgtaaaaggttgctttttttattaaaataaatatttattttaacaaataaatttaaacaaattttcctcacataatcagtaattttgttaagaggataaaacagataatgggattaaggatcattttcactagtctatataaacaccaagacaaaggaatgatcattggtggaatgagcttgaaatgtaaatataacatccaaataaagaaaggactatggttgatgggaaaaaaatggatgtcttggtactctgccttattgtgtacggatttcattaattatacattttgcatttcataaatggatcatagtggctataggtatcggattcatttcgtttatttatgttcattgttttgctttgcagaaacgaatgacaaatggttggtaggagatccatcatgttattctttaaaaaccttaattagtgcaatgcaaactttcttccttttagttcaatgtattagtaaagggataactgctctgattcttgaacacttgaatctcaatattgttttaatgttgttgctatggcttctgcattttattttaggttattgactttttcattccgttaataatgttatgtggtgatgttatttttaactgatactttttctcccatcatactagttccatttgtatgtttttgttctgcaatgatttttttgtcttatgatgacagagtcaaggcttaatgagttgactgctactgatgtgatcaagaattagttttataaatcttgattttacaaaattgattttgcataaaattaaaattgaaatgaattgatttatgttagaaaaaagctattccaaaaggaagtatagagtaaaactttgtaagaatctctcaactcaatccaaaagctacaaaggacaatatttctggtatccgaaagctgttaaatgttttgaggtgatcatttggttgtcatagtaaagcatatcgacccaaattgaaaggtttattaaccaaatgttgggaaacgaaagggtaaatacgggccagattttcatcaatgaaaaatcgaacaaatcacaatagtgaatttgagacgatactttaacttaacattaatgcttatgtttatgaatagttgttttcaattgtcttggaagaaagagagagaaaaaaaacaataataatatcactcttatgaaaaaggaagccctcctcgtcaagattctgttttctttcccgtaacttttgcttattctttctttgatttggatagcactcacaagttagaaaagagaacaaagttgcttaccactaggtgttatgcgctgtccgacaaagcctctcacctaatcaaaatcaagccttctttttctttgatggtggggggattcatctattaatttctcctttgtttttctcttcgttgtgtatctttgttgtattccatgcacagtaactggtaggcccttaccaaaccaaaaaggcctctctctttcttactttctaaagcattggaactaatcaaaatcactttaatgaaaaccatgtgattggctgattgatcatttgttggatcggtgtaattcactagttaactaaggtggtgttagctttgtttcccccccccccccccannnnnnnnnnnnnnnnnnnnnnnnnnnnnnnnnnnnnnntcaaagtttccctcttcctccatgcaacctcaaattttgtctctccacagcgtaaacttacactgtcttatgtgttcttgtttgtacgatcagacaagggacggggggcaacgtttttacgcattagcaaaggttgtgtgggtcctaagtttactgtcttatagaagaagttgagactaatatggcggccaaagattttgctaggagtctagattttggacatcaattatgtttgaattttgcaaggtgtgaatacagcccatgcagtgttgaaaaatgaaaatcatgcaccctagactagaactagcttttgcttcctaaacaaatcttaaatcacagattctgactttgtagaaagaactctctacttgcaagtgttccgctttttgcagttctacccacgatggcgttttatctacctaattgggcacaccacttttttccacttatgatcaaatgtctgatattgtttgatagcagaattttaattttgatgaaatttggctaggaaacgtgataaacgtttggctgcttcttctagtttatggaaaatattgttagtattactttatatatatatatatatcaagcgtcaaacgaatgcattggatagattttaaattgaattatactaatatataataggaggaagtttcttacctataataattttacaaagttcgagagtcattgtttctcttgaagaaaagttgtagtctagataaaagaaaaaatatattcataatctgtaaaaaatatttttttcttgtgaagaaaaaaaaaatagattaagagaaaacgcaccctcttgcgaagttagaaaagaccgtcaactttaaccagattttatataatgaaatttacatattgtctatcaacattaaaagtttgaaaattgaacccaagtctttgatagtgtgagttctagatgtgttaacccctacacactattatgtggaaaatgtattaaaaatgtagtctatgcatgactcatttaataaaaaaatgtttaaacattgaacccaagtcatggatagtgtgagttctatatgtgttaactcctatttatagactaatatgtgaaaaatgtattaaaaatttaatctatgcatgactcattgaataaacaattaaataaaaatccatcccgtttaaagtatattgtcttttatttataaaaaattagttaaacacattcatgtatctaaatgttgtaaagtctaggatttgtcccttaaagtcctatgctcgaccaatgaactttgaattacttaacctaatgtattataaaaatatgttaaatgattcatcattcatccaattttattttatttttatgcgtattcatccaattaaatatagtgatctagtcttgctaatctattttattttttttataattggacggattggttaaatttatatatggatgaatagaatagttagtaaaaaaatggactaaattgtcacccgacacaattattcgtttgctgaaagtgagagttcggagttccatacctataacctctactttatgggttttgttgacaagagcagagtatataataagaacattttcatataaaaaatgatagaatcgtggttttatttttttattttttttccagcttgtattaggagagtgagggcgagccctggcacagcggtaaagttgtgtcttggtgacctgttggtcatgggttcgaatccggaaacagcctctttgcatatgcaagggtaaggttgcgtacaatatccctcccccttacctgcgcatagcgtggagcctccgggcactggggggttacagtggtttttttgtattaggagagtgcttaacaaccaaatcgggaagttaaacccagctggagaagtgggattcgtcagatatccattaaaaattattagtgtttgaaaacaaacagtgccttacccagatgcttttgaacaagtcagcgacacgaataattatgtcccagtgaccatgcaggcttattcttacgcaatcttaggatagggttcacgttctatctgggcacatggattcatgacatatagacatgtcattgtattcacaaaaatgatgccccttgtcggaaatgctctgtttctctgttcttatattgtgtttgcctaaatcttaggttcacgaaacatattgcttcggaagcaaagttctcctatagttgtctacaaattggacatgtctgttccccccatccaaggttttgagctccctgcaatctattcttgtggctatgtttggttctgcattaggattgctacacccaaacccgcgtttgagcatgtgtaacatgatttagttagggaaaaaaaaaaaaaaaacaattgtaatttggatggtttaactaggagtagcttatgagttactgagttagccctttgccctgataaataatcgagaaatgctagtaacattaattttcttacactttctcagtgatttagaagtgagatccatcataattttaatttataataaattttagttaaatgtgttaaaaaaatgttgtcagcatttttcaaaataattaatattaaaagagcttaaatccaagatagatgataatgtgcctcccacaaaagcctgagccaatgtttgtgtgtctcaaaattggatctctaaggtagatgttgaaacttaagaatactatttatgaagatttggacgcttaaatccgtgaggggtagaggtagagttaagagacaattaaggttgaggtcatatattgcttgctattaggtcatctttgcatgtctttctaatgatgtgataagaaaaaaaatgaggaatatctgttatctgttatcagttcttcacccttaacttgcctgaattctagttttagacttttcaggtgttttgggtttattgaactgaatttgaccaagactaggttgtgtttgaaacaattataaacttattttttaaataaagtattttatttcaaatttaatatttagatttagcatttacagtttaattgtaaaattaaggtcatttaaaattaattttttgctatctcacccaaacaaatacttacatttatataaattcctaacgattcataatctcgcacatgatgaacccatggttcaacttcgaagtctgtatgtctatgaggccgaagtatttgcagtaattatctctcgaacatttttgttgaatattaccccgaatttaatgtgagataaaatgctggaaacttgaaaacattgtatgggccggatcagcttgtaaaacggttattttgtttgttatgtttctacctcgttatttaattcactgccatgctgggttgggtcactatcggcctgcctgctcaatatttattttaacatttcataaaagaagctcaaactgtgaatattttttaaaaacttaattaaaatatattgacggtgtaaatattttttacattatctctccattatttttttatttaaatttttaaattttcatttttagtcaaaaacttctcaaattgttattattaaattgttttaaactttctttcactaaaaggtattaatcaaaattccaaaggtgccctaaataaaaaatatatataatattttctcgctcttctgatcttaatttgacattctactaaatcattcaaaattcattaaatttatatcaaattttaggaacaagaacattaacatacaaatgagttgtggatcacatttcaactagaagttgttaacttgttatatacctacatcaaagcaaaatattaaaaaatttaaggatctaaactcacccacaatgtaaattgaaggtaaaaaaatgaagtcaaaattaaggcaggtaaaattgaactgaattgttcactctccagttttaatacaaatgaatatcaataaaatctaactcaattaattaaatgaaatttataaattattataaatttttaacactatttataatttctatgaatgaaaaaacaaataaaagagtgtcaaatgcgatcttgataaccccaaaaaacttattgtaaatcgcaaagctggttctcacgctttcaacccgatgaagtcctcacaagtcacaacagtttccgttcccgtggggttatctatgccatggcccaccacacacgtgttgctaccattttacaaaactgggtcccattttggacataaagtatgcatattttctttttgatttttgtttttttctatgggagtagggcccaaggagtgatgggcatacttttgtgccaaaactcgctttctcccattctattcatgcttgcctgtcactggtcggtaactgctttgaaagggcctgaaattgcgtagaaaggagcacattagtacaatgctggacacaccacacaatttaccacatgtgccatatgtttaggggaaagtgtggggatctcttgcactttgctttcgcaacatttatcaccatatatgcctagctagctttccatttgccatgtaaaaaattcttattcaggaggatttcccattgccatatgttcttcatgatactctctagattcttgaattgaagaaggtgctgtctggtgccaagttatgatcatttttgtaaggaattgccaatgtatataaatagactccaaattaaaatataacgatcgtttttataaattgaattaaatttatataaataccaatggagtactcttttttcaaagggaataaatgtgccatgtacggggaaaacgtcaaataccttatgatttgtgagttgtttatttatttagatcatatgaacatggacctttagtgaaatgaaggaaaatagcgagggtcggttcaactggtaaacttaagcttcgtgacaaaaagggttgcatggttgttgaaggttttcattggcgcctgtcaattgcgatgtgctaacttattcaccttttaattacttttcatgaaaaaaattagcaaagtaaattatgttatttaactgttttactatgtggaatagtgaattatggagtggtttactaagcttgagatctaagagagaagaagataaatgcattctcgtttgtttgattaatctatgtcgcacatctaagagagaagaagttttttttataaataaaaaaactaataagtatataaaagataataataattctataaaattaaccttagtattaatattatattaaataactaaatgacacttattagaagtattagtagaaaaaaacaattaaaattccattaaaaaccaaatataacacttattttagaatttttttttcaaatatgtctaactcaattcatttatcaatatccacaaattattataaatttatgatatttgaattggattcctaaatgtaaaaaatgtaaaatatataaatatatgttacataattattacatagcgatagtgatgattttaaaaaatgaaataacaattgttttttaagtctaaagtcaaaatttgttatatttgtaaaatctaaaaatatatttaatctaacaaaatattaaatgaatgaatgaaaatacatgctaacgtaaggaaaggagacttgtgtgattcactggctagagcagcgcgtgatagtagtataatagtattattactacgctgacgtaacgcaaaccttaagccggcttaaatagtggacgcaagctgccgaaagccacgccgtttccattttcatctgtccacactgtgcgctcctcgaggaaacggtcgaaaaaactgaagcctaaccggctaacccggtaccccaaaaagttgcatttgggttaaatttgggttcatttcataaccaaccgcagtagcagtcacctaaccccggtcagattctaacccgccttggtttatttaaagacacaaactctcatcaacccctggcctgtgaacttgttcacccttccccttctccttacttctcacgctccttccaaaacactccctttctcttttcccttacgacccttcttctgtgtgtgatgatgtagatagagaataaaaagagaccagtgtgcaggaagaaagagattggtcacttcttgtgtggctttgttttgttctgtgtgttggaatttgttgatgggtgaagagggagaagaggtgtcaagagataaggaacaacaacacatgggagtttatggaaatgagtggtcgtttagtagttgctgtgcaaattggcgccgtttaagacaccagaattcctgttccatgcctccttttaagtgaaaaaaagaaacatcaaaacaaaaacgtgttctctctcagcttttcttcttgagatcttaatatacattgactaaaagaaaaataaagggatcaaatttaagttccttgatctaataagatccgtgcttttgtttgtactactcatgaagagacttggcagttcggatactcggggtgctctcatgacgatttgtccaccaacaggttaattgaaaaaattgaaacttcggcttttaactctgtttccatgatgcgtgtttcatgtttgtgccttgtcttgtctcaacttttttcacgatcaaccatcccaattactcaaacctttcctatttttatactaaaattccttattctgttttttttttgtgtgtgtattgcatcacaactcatcatcatgttgaattatgctctgtgttcgtttgtttcaagagacaacaacagttacagttacactaaccatgattatgtcttgatttgaacagacgaacacagtccgaggaacaaccacgtgtatgggaaggagttccagtccatgctggaaggactcgacgaagaaggatgcgtggaagaaccagggcaccactctgagaagaaacgacgactaagcgtggatcaggtgaaggccttggagaagaacttcgaagtagagaacaaactcgaacctgaccgaaaggtgaagctcgcgcaagaactcggcttgcaaccaagacaagttgcggtttggttccagaaccgccgcgccagatggaaaacaaagcaattggaaagagattacggtgtcctcaaagccaattacggatcacttaaacttaactttgacaccctccaacaagacaacgaagccttactcaaagaggtaatttttacactggtagcttaagatgtgtatatatatatatatatttatatatatatatatatactattttgatctcatcactggtcgatatgggatcttcaacaagtattgaaagtttgtttgattgttttgttggcagataaaggaattgaaatcgaggctggtgcaagaagagaacgacaacaacactgaaagcgatgtttcggtgaaggaagagatgataaccactctgcaggatagtaacccgctcggtgaagccgccattcctggatcggactcgaaggagttgagttacgagtgtttcaacaagagtgatgaggtgggagggggttctgtattccctgtggatttcaaagatgggtcttctgatagcgactcaagcgcgatcttgaacgaggagaacaacaaccacagccccaacagcaacgcggcgatttcgtcgtgtggggttctgcaaagtcactggcttttgtcgtcgccttcttcttcgtcgatgaacaactgtttccagttccagaaacagtaccagacgtcgacgcagtacgtgaagatggaggagcacaattttctcagcgccgacgaggcctgcaatttcttctctgatgaccaagcaccaactctgcagtggtactgttcagaggaatggagttaagaggaagaagaagacgcttaattaattgagagcattttgcagggtgtatagtaattggatggagagagaaactttgtaaaaatgaaatggtcaaggattgaagaagagagggaaattgaagagcttgagagaaaggagaggggggctgaagcacgcatggcgtggggtcggatatgagaggttgatgacgataaataaaggggggtagtaatcatcatcatcaatctctcggccgtgcgggaaaaggggggtaatttatgaataataataatgattaggtcgtaattaagttctatctagtgagtaatgctgtaaaaaatccacaattcacctctgcttccacctttctttctatctctcaccagttttatcggcttttgtatttttatatctagattaatttcttttatcaaaaatctaagtttttcatattggaattaaatatttatggcattttaaatattatttacatgcggttaactgtttatatattattttttaacacaacttgaattttattttgataacttatattaatatttattgcaaaaacttattttgtaaactatagagagattttttttttattggcatattaaaagtatttaaagaattgtatttgtgatttgactttatttaacttgactttaagttttatgtacactaaatactttaagggcataaatgaattataggactgagaaacaggaaaaatagaaaagtaaaaatgtgttgttgaaatcattttaaatatatagtaaattatacgtaaatattcttaagattttgtgaaattacacatctaatctattttttctactcctgtatatcgtaaaaacatcacattgtgtcattatgttcttctacgagaaaggttgatgtaggctgttttgttatttggggggcaatttttttaagaaattactaatttgagttactttttaaaaaattatccgattaatagtaagttgtgagagtctctcacgactttgtgattaaagtcaagcacattcttactacttctgaaatgtttttgttttcctttttttgtgtagaagtaataaatataggtnnnnnnnnnnnnnnnnnnnnnnnnnnnnnnnnnnnnnnnnntgtgttcattattcatttatttctactttatagttgtttgtttcatttcatttaagaaaaatattttgttttaaaattttctttataatactatttttaatttatattaaaagtagtgaattattttttatttcaaatattattaattattatttgtgtaaaacagaaggtcataatcatggtaactaaaatatttgaaaacaataaaaaaaataaagaactaaaaaaatacaaataataaatgattatattagaaattaaaaaataattcatcacttttttaataaattaaaaatagtattataaagaaaactttaaaacaaaatattaaaaaaacgaaatgaaacaaacaactcttcgataaaaataaatgaataataattactttaaaagtcttacctctatttatgacataaaaataaaaataactaagaaaataaccttttaaacaacttcaaaacataaataagagttgtacttatatatatgacttcaacatggaaaaatataaaaaataaaagcattttagaagtcataagaatgtgttcaattttaatgagaaagtcgtgcatgannnnnnnnnnnnnnnnnnnnnnnnnnnnnnnnnnnnnnnnnnnnnnnnnnnnnnnnnnnnnnnnnnnnnnnnnnnnnnnnnnnnnnnnnnnnnnnnnnnnnnnnnnnnnnnnnnnnnnnnnnnnnnnnnnnnnnnnnnnnnnnnnnnnnnnnnnnnnnnnnnnnnnnnnnnnnnnnnnnnnnnnnnnnnnnnnnnnnnnnnnnnnnnnnnnnnnnnnnnnnnnnnnnnnnnnnnnnnnnnnnnnnnnnnnnnnnnnnnnnnnnnnnnnnnnnnnnnnnnnnnnnnnnnnnnnnnnaaaaaaaaaaaaaaaacatttcagaattcgcaagaacatgttcgactttaaccagagagttgtgtatggcaatcatgacttatccctgattggataatttttcaaaaagtacccccaatgggtaatttctcaaaaaaattgtccctcaatagtaaaaaatccgttgtaaatgttcaaaaaatagaaaaaattcagataaagaaagaatgaatatttaaatattacttttttggtatctatatttataacattttttttagttttatagttaaaaacatctcatattgaactcaatagtcatcatgttttttactattttgatccttgtaatctaaagttgtttaattttatttgcgatgaatgtgaattaaatgggtcatgttatattcgtttaaaatgactttaatcgatacttgataacgataatcaaatgagtaaagaaatgcaacttttggaaccaaaataggatgctctaaactataaagactggaaggaaagtgaaagttaccacaactataaggacaaaaaaataattaaaccaatnnnnnnnnnnnnnnnnnnnnnnnnnnnnnnnnnnnnnnnnnnnnnnnnnnnnnnngtttatgagtggaaaaaatagtgaaaaaaataaggatgaaaatatttttgtactaattaaaacatgatattttacccaagtactttccaacataaaattgctagtttaaaaaaatatgggctaaattataattttgatttgtgatttttatcctcctatatttttcatgatttaagttcctatattttacaaattttacaatttcgatctaatcatcaattttgcattcattttttcttttattttgtacattttaatcaattaaattatttctttatgatatattaaataaatt

SEQ ID NO: 3 - DNA, 365842 bp, Glycine tomentella
tgccactgtgttgggtgctttgctacattgccacatgattttctgcttcaggaactgtttggaggggatcaaattcaataaagaatgtccgaatctccatcggagcaagttcaaccacgaacttcgtaggatcaacgggtcctcctctcaccacctttggttcttcagtggagccttctaccttccaatctagcttcctcttttccatttgagctctttcttgattagcagacaaactcgtctctgtcactttattgatctgaaaggttgagttgtcaaaaggaaactatgcatgagtacataatgtgtgaaaaaaactaacttggagtagttcgccatcactcttaccatcttgttaggaaacaactttttcaattccacacttgccgttactgagtaatttttgtcctctccgatctatatatgtaaataggcaccaaacatcaattcaagaatatagggtatttggtgtcttaatgcaaagcaaaatatttgagagagaataaagataatggaaaaagttgtaaatcttgatgcatgaaaaatatcataaatcattcatagctagattacaaagttctttgcatgggtaaactgttattgatctctaacagttatatacataaatattatttccattattttgatagaaattgttgaaatatgaacaatgaacactctttttcatacatacagattgaaacccaaagggttcattatatacaactaattctaatattctagaatattccacaacttattctaatactctagaatatttcacaattaattctaatactctagaatatttcacaactgattctaatactctagaatattccacaactaattctaatattctagaatattccacactccccctcaagttgggagatatatattaatcattcacaacttgctaattaaatcctcaaaggttggcttgtgtaatcctttagtaagaatatccgcagtttgctctttggtaggtatatatgacaaacatacactaccatcctccaatttttctttgataaaatgacgatcaacctccacatgtttagttctgtcatggtgaactggattttgagcaatactgacagcagccttattatcacaatacaatctgataggtagggaataagagatcttcaattcctcaagaagtctttttaaccagattccttcacaaatgccatgagctagagctcgaaattctgcttctacactgtttctggcaacaactgtttgtttcttacttctccaggtcacaagatttccccagacataggtacaataccctgaagtggatcttcggtccattaccgagccagcctaatctgcatctgtatagatttcaaccatcctcttgtgtcccctttgaaagagcattcctcgaccaggggtgtttttgaggtatttgagtattctataaactgcactaaggtgtttttccttaggagaatgcatgaattgactaaccatgctaaccgcaaatgcaatatcaggccaagtgtgagataagtagatcaacttccccaccaacctctggtactgctctttgtcaacttctttcccatcttcaattcccaatttaatattaggatcaattggagtctctgctggtttgcacccaaacattcatgtttcttgcaacaggtctagaatatatttcttctgagttaaagaaatttctgccttactacgagcaacctccatgccaaggaaatatttgagaactccaagatctttcagttcaaactgatcagctaaacactgcttcaaagagtttatctcctcacaatcatttcctgtgacaattatgtcatcaacataaacaatgagaatagcaatttttccaccatcagaatgtttatagaatagagtatgatcagtctgagcttggaggaatcctcttcctttcatagcttgggtaaacttttcaaatcactctctaggggattgtttaagctcataaagagacttcttcaacttgcatattgatccgtctcctttttcaaaaccaggtggtggatccatataaacttcttcatgtaaatctccattcaagaaggcattctttacatctaactgttgcaagggccaatcaaggttggcagcaaatgataatagaactcggatagtgttaagtttgacaactggggcaaatgtttcttgatagtttatcccatgagtctgagtgaatcctttagcaaccaacctcgccttatacttgttgatgctattatctgcattaaattttattgtgaacacccacttgcaacctactgttttctttcctctgggcaatgctacagattcccaggttccattttttttaagtgcatccatttcttcaaagacaacattcctccattttgggtcatcaagtgcttcttggatgtttttgggtatttttgtactgtctaaaatagtgttgaaagcaggaaaacctggggataacatttcatatgagatatgatgagaaataggatgagcagtacaagatctggtaccttttcaaagaccaataggtaaatttaggtaagttgcatcagtgtatttaggtattgggttgttgcaactaggactcgagtctgaatcttggcagtctagaggctcctgaagtgtttttcccctgctgtaaatttttccccatttaccaggggatctctagtctgtggcatagtagctcgtcctatctcctgctcaataactacccctgtctccaaaggcaaaggtagaacaacagactcatttggtttccaagatttatcttcatctaccccaatagactccccttaaagagaagtcgaaggaaaaaaggattgtgtctcataaaatgtgacatccatagaaacaaagaccttacggagaaaggtgagtaacatttgtaacccttttggttaggaggataccctatgaagacacttcaaatagacttaggatcgagcttgaacctttgatggggaggaacatgtacaaaagccacacagccaaacaacttgagaggaagggaagaatgagctcgaaaaaaaaggaaaggcgtcggtaagacaaaataaaggggattgaaaatttaggacacgagaaggcatccgattgatgagatatgatgcatgcaagacagcttccccccatagatagttagggacatgcatggtaaacaaaagagttcgagcaacttcaagaagatgtctattttttctttcagccaccccattttgttgaggggtgttaggacaagaactttgatggagaataccatgttgggtgagatagtctccaagaacagaattaaaatatgcagtaccattgtcagttcgaagaattttgatagaggtctggaactgagtttgaatcatagcatgaaagtttttaaaggtggatgcagcatctgacttatcctttaaaagatatacccaaccctagaatgatcatcaataaaagtaataaatcaacgagcacaggagatattttctcacgggttgggccccatatatcactatgaatcaaggtaaatggagaaaaatcatgatgaactctaggaggataagaaacacgagaatgctttgcaaactgacaaatatcacaagaaaaagaactaggttttttattgataaataagttgggaacaacttctgaagataaaagaaatttgggtgtcctaaccgacgatgccacaacaaaacatcattacaatcatcagtcaaagataatgagtggtgtgcaaaaacttttgtttcattaggatccttttcaaaatagtaaagcccttcttcctctctagcactgtcaatcttcagccccgagttctgttcatgaaaatcacaagcatggacagagaatttaacaacgcaatttaactcagaggtaagtttcttatagaaatgaggttacaagtaagagagggaacatgaaggactgagttcaaagtaatgtgttcagaaattttaatggatccctttccagcaatagtagagaagttgtcattggctgttcttattcgtgacagttgatagtaaggggtataagaacaaaacaaggttgcattaccagtcatatgatcagaaacccctgaatcaagaatccaacgattactacgatcagcatggaatgtcgtaccttgttaagcaacatgactagttgcttcagcagattgaggcatcaccttctgaaatttttcatactccgccttagagataaaaacaccatcagaatcaggagaggcacgaagctcctcactcgtattattagaagagacttgataagcacgactcttgttctgccccttttgtttccagtttggtggtttgccatgaatttcccagcatttttcatgagtgtgaccacccttattgcaatgagtgcaccaacggtcagtacattttgaatcaacagagtgacgagccagtattttttgtaacaagggcagatacatcagaggacttagagtccttgtcacccaacataactttccgacgaagctcctcacgtcgtacctcggaaaaagcagcagcaagagatggtaatgggttctgccgcaatattcttccacgaacatcatcaagatcatgattaagaccagcaagaaaatcatagagacgccttttctcaacataatttttaaactttgaattagcttctaaacattgaagatctgctgcatcataaaggtccaactcctgccacagggttattaaagcaagaaagtattcagtaacggtcatcccaccttgacgtaagtctctcaccttggtattgagttcaaaagcctgagaagcatttcctaagtcagaataatattctttaacagcgtcccaaatttccttagccgtatcaagaaacaaatatgtttgactgatgtcagattccatagaattagtcaaccatgtcatgaccaaggcattttcagtcacccaatcatcataaccgggtttaccttcaacgggtttttcctttcttccatcaagataccccatctttcccttcgcttggataaacaacttgacagattgacaccattgcacaaaatttttaccgtttaaatggtgtttggtaatttgcatagcaggattgtctccagaaggtgacgaatattgaaggggagaggcaccagaagaaatgccggatgaagaagaagaatccataagttactatgaaggacaggaacaaacgcaattggaggtgactagatagtgtttatggaaaatgacagagagagatgacttaaggtttttcaaaaaaatgggtttcagagttgcagaacgataataggaaaacctgctcttgataccatgttgaaatatgaacaatgaacactctttttcatacatacagattgaaacccaaagggttcattatatacaactaattctaatattctagaatatttcacaactaattctaatactctagaatattccacatctaattctgatactctagaatattccacaactaattataatattctagaatattccacagaaatgcatgcatgtttgcatttttatagcataggttaaatgcaagtaaaacaggtcgcagaaaaaatctttccaatcatggttaagaatataaaattgcagtcaagcaatccttagaagatcattttgaaagggcaggagaaccaaagattatgaaaattacaacctcataaaggtgagccaatcttaggaggacttttccatttttaaattcctgcattcataaaaacaatagatacacatcagaaataaaaatgaggtaaaatattggaaggcatcttaaccttcatcttctattttctctataaatgtccctattgttctccctttcatacctggagggttaaaagagcaatgttgtcaggtaaactgtaggaagaatctatgccagaaaatgtggatggactgaaatgcaaccaattatccccatcctgcatcacaagtggaaaccagtaatgacaaacgatttaaccaccttaattttttctttggggcgggggggatctaacttcattttacctgttctgtgaaggccaacagcaatggtgaatataattcctggccaactgtgcgacgccacttagcaccttcacctttatggtcaattctaaggtacagttttccatgaatctggaaatatcatataaacttgtaccattaataaacagtaagttggtgagaagatgggagccaaaatccaagtgggttaggagggatctattgatggattggaggcaattattattaggaattatggatacaaagtaacttaacttgaattagtaattcagcaacagttctgtatttggaagttcacaatggaagttattcatggaaaataacatatggcagttacatatcaggattatatctaattgtaggatgtgtaattaggaaactgtgttgtcatttgcagtttgtgggaagagaatactctctgtaggagacttttatctctgacagcatgtatattgttgtattatgtaagatttatgtgcccagtattgtatgctttaatttttattagtctatcaattagtgttcgatcagtttggtccgacttgccagatcagtgggaagggatatttgtcaggccagcacattgatcatttgaaaatggatagtttctgatcatgtaaatttattagagaaacaagtggcaggatttgcgaaataatgtgttgcaaatggatgagaagattggaagcatggaagaaaggcttctctttgagatgcaaaggctgttcaggaagagaatagtggaggaaaatgatgattacaatcaaaaggaagggaactcttccagctagggctcagatttgaatttccaaggtttggatgagcattgtatggcagttaagaaagtggagctctcgcctgtcatcctttaatggagaagatcccgtggaatggttcaatctttttgagagaaacagaaaattatctcagttgagtgaaattaaaaacgcttctgattccaaggtttggaggaatttgagaattcatgaggaagtagcaacctcaaagcagttaggttctgtagaggattatatttagaaatttgaactcttctcttcataagtaaataggctgatgcctgaggagcaaattttggcgggaggacttcaaccagatatcaagtgcatggtccatacttttaaccctaagtcccactttcaagccatgcaattggctagaaatatttataaaattcaacctgagattagcaattacacttggcagtctaagaattggttacgaaacagtattgatgtggacaagacagttattgaagtccttgggcacaaggctaatttttaatcaggtggtattgatgggaaccaagattttaggaaggattgattgatggatttaaggcagttactattaggagtctatgtgatataaaataactactgttgtatagttattataagacaatattacaaaaaaaaaccttaatactgagagagttatgagagagacttttagagagagaaacagtgggaggagtagagtgaataataggtttaggtatcgtgagagatattgggagagagctcaggggagatcacgtcctattcctgatggggtcaggtatactcagaacaactcggaggctgtggaggaagaacgacggggtctttattcgaaaaactggagggatgcggcagacgtgtcttctttctatttcacacgttttcctgaagatatggtcgaaagagatttgtggtttgtattcaagaggtggggagatgttagggaggtttttattgcaaaaaataggaatagaaatgggtgtaggtatggcttcgtgcgcttcaaaggagttgacgatgtcggcaaacttgagaggcagctagataacttggtggtgggaggtcttaaaattcatgtgaaccttcctaacatgaccgggagcggaagatgcgatcaaaactccacatgaatgaaacgaagcatagggagttatggaggatcacgtggttcaaaaggtgaaaggaaaagctaaagtaaatatggaccaagaggttttggcggatcagaagcccatacctttcgtccagcatcgtaatcactcgtacgcacaagccatttcgatgggtaaccatactagaatgaagagatggcccatgtatcatggccaagcagtggtgaaaccttcccactcgtctgttcagtttgccatttccatggataaccgtaaatggtgttgtgaagcctgggtaggtagacttttgaaactgtcggtgttcgataaggttgaagaagaatttatgtgggacggaggagaggaagttaaacccaaatatttgggagacgacatggtacttctgtctagtcatagcgattccaaagcggcagagatgtgtaaggaagcagacgcaaatggttcgtctctgttctattcgctggaaaaatgaaatccagctatgaagccagggtacaggctggtcagggtattatgttggggtattccattgcatgcgtgggatagtgagtatatcaaatgtatcgttgctgggataggcgatatggtggtattggatgatgacacggacgaccttaatcgtcttgatagggcaagggtactaatcaaaacaccgtggcaaccgtctatcaaccatttggtagtcgcatccattaacaacgtggaataccgtattaacatcgttgaggagacatgttctcaactctgcaaatgtccgagggcgagatatacatcatcatcggaggtaatttcgtccgacgatagcatgagcggcatggatgaaggtttggaggttagtcacgtggccgagactccggcgatggtcatgacgtcgtccagcgtcagggatgaaggccttagatgtgggaaagatagggtaatacccgcggggcaaggcgcggtgaaagtaccgctgggtagtcaaaattctgacaataggagtaaagcaacggtggatggtaggtgtacctcagctgacaaacggtctccttttttcatcgaaaagggtttggcttgtaacgacccggctgcgcgtcagacggtaggagccaacttggcagatgcggaaacggttatgggagagagggacggaaacgagctagaaggtgtcgcgcatgccgggtacgggattgatgtcaataacactgctacaggtatggatgagagggaccctgataggcactggaccagccagaggaggaagaaagaatgaaaagaatctgaatctttattgaatgctactcacagttacacaatcttgagtgaattcgaggttcactcagcctcccaatactctcagcttacccgctaccttcgctcagccccttacctcctatttataattcctcaccctcccacaattagtgtaactaactatttaaacaaaatatcactaacagctactgaatattactaacaacagtccttaacaacaatcctagatcctatcaataccctccccttcaagatggaccttgtccccaaggtccaggtgaggaaaacagcatgtatcttcaatcaggatctccttcatcttcctcttccatgatcatcaacctcagttgcttgttcttgcacacatgtgttggatgatacctctcctcgcatgtaaaacattctcctttcctcattttctcctccacttcttgccggagacaaattatggaagatccttctaccttgtcttccattattgacctgttgaacaacagcttctacctactgcccctctttcccagatttctgttctgaacaatttggtttctgaccttgatagctatggctataacttctgcccaagcttcccattactctattttttcttcaatctgtctagccttcatcatggtctctatcaaagttttaggttcatgtaacctaacctcagttccaatctcctctctcaaacccttcaagaaaacttccattaaaaacttttcactcaatcccttaccagccccaacatgtctctcaaaaagcccaatataattctgcactgaatcttcttgcttcaaagaaagcaaagcttgaattgggttacctaaattggaactctgaaatctctgcaccactgcattcttgaattctgccgaagattggttcaaactccatgactcccaccattggaaccaagaaagagcctcgcccccatggctacaagaattgcatccaatttctcttcctcctgcaccccttggagccaaaaatatttatcaattcgagagacccactccactgggtcatctctgacaaaaaccgacaactccatcgtcctccattgtcgcgccattccttcctccttctcgccgttcctccctttcttttcatttcggcgaaccggttcctttctatcgaccctctccaggacgccgtttcctccattttcgatttctccagcgttgctgccagtttctgcagcaattcttccattgaactcaactgggtctcgatcgcaacttggtacaactggttggtttcatgcgattcctccattgctaattctagtgcttcgattctggcctccattttgttgttgttcttcgctgccattaatgacccacagccccaagaaggagctctgataccagtgataggcactggaccaagcagaggaggaagaatgaaaagaatctgaatctttattgaatgctactcacagttacacaatcttgagtgaattcgaggttcacttagcctcccaatactctcagcttacccgctaccttcgctcagccccttacctcctatttataattcctcaccctcccacaattagtgtaactaactatttaacagaatattactaacagcagtcctagatcctatcaaacccacgcctgcaaagatctcctgctcccactgagcagctagtgggtagcgaacatctcaaggctggagctggttcgggtgttgcagagatggaggcgcgagaagatgttcctggagtgctggagaatgacaggctggaaaaaggaaatattggggggacccacacctgttgtctgctcataagccggggtcacgtgaggaactatcgactttgggagttggggtgtcagggggaagacatatgggacaagtcaacaatttccaggctgtgatcaacagtaccgagttgggccacaattcttttggcccaatttctacttggaaagtttattccagaggcaaggggtgcagaaaggatttgaagcccactttatctaagtaccctcattgtggactcacccctcagcagtccgtggataaaggtaaagaggctgttcctggagcttctccgtctttatcttctggtagtgggctaaaagatttagctgagtggggtgaaaggcagctcgaaaacaaccataccccagtaacaagtcctacaaagcgagaatggagtaaagatgctcatagtgaatgggaactagctaagttgctgggcctaaattgcaatgaccagattgcagtgattaatgaaatatcatctatggaggctagagacatgcgcgaggttcagtgattgggaagtagctctgggggaatatgaagatcatttcatacaacactagaggtctgggagggggggttaagtgggcagctattagaaatctggtgacaaaagaaagggtggacatgctatgcctacaagaaactaagaaagaaagcattgataggaggttatgtcatgcattgtggggtgaccctaattttcaatgggaatgttcaccagcttgtaatagggctggtggtttattatgtatttggaatgaaaaggtgtttaaattagagaataaggtgataggtggaggttacatatactcggaagggaaatgggtagctgaggacactaaagtcagtattatgaatgtgtattcaccatgtgaggtttctctaaaaaggattttctgggaagatatcaagcagttgaggtgtgcacatatggcaggattatggtgtataattggtgatttcaacaatattagaaggcctcaggaaaggatgggaatctgccagagagccattgataatggtattgtgaaggaattcaatgactggatagatgccctggagattgatgacgtgccctgcctcggttgtagatttacatggtatagaccgaatgggaaagctaagagtaggctggatagagcccttgtgtctgctgattggctcacaaaatggccatctaccactcaactgatttcggacagaaatttctctgaccactgtcctgttctgttgagatcttcgtttgttgattggggtccaaagcctttcagggttctggactattggcttcaggataagtcttttaggaagactgtttgtgagtgctggaatgaatctgctgttaatggttggggggtatgttttaaaagaaaaattcaagcatctgaaattgaagttgaaagcctggaacaaatcacaatttgggaattctcaaaagaagctgatgtttgttgagaaggagcttaacagaattgaaaaagatggggatgatagacagctgaatgacaatgagattttgagaagaaaacaactacaagaggaactttggtttgctgctcaatcacatgcagcaattctaagacaaaaagcaaggaccaaatggatcaaaaaaggagattgtaattccaggtatttccatgtgaccgtaaattggaagtgtaaaaataacttattgcctggtgtgatggttgacgggtgctggtgtgaggaccctcctagagtcaaagcggaaactcaatccttttttatgaggaggtttgaagattctgtcagggagagaccaaacttagatggtgttagaatactatagtatgtataatagaataagtcccacatcatgtatattgcataatggtttctgtactgtttaatataaatcactccctgcgtgatcatataagacacacaattctccaatctcaagttggtaccagagcccactgattaggtgttatctccttccttgtcatgcgtccttccggcaagcccttgtccgccgtgcgtccttctagcgagcactcatctgtcgtgcgtccttccggcgagtccttcactgccgtgtgtcctttccggcttgttctcgatcgtctcccaccgttcggatcaccgtctcagctgccagaaccaccatctcagccaccggaattctttttccgacgagtcttcatctgaaaccacccaggaaggatcgtctccgtctgatttattttctatttatcaaaagttttgtgctgaaatccttaatcagtttcatactcctattcgtattttgcgtagtgataatgctaaagaatgtctctcacactttttctgagtttttggctaaacagggaactatccaccaaactacctatccacatactccacaacaaaatggagttgtcgagcgtaaaatcgtcatttaattgaaacagctcgtactcttcttttgcatatgaatgtccctcttcgattttgggctgatgcggttattatctcttgcttctacatcaattgtatgccctcttccattcttaataatgcagttccttacagtcttttgttccctgatagtcctttgtatcatctgcctttgcatgtttttgggagtacttgttttgttcatgaccttactcctggtagagataaattaacatctaaggctttcaagtgtgtcttccttggctacccccgtttttagaagggttattgttgttactctcctaatcttcgttgtttcattgtgtctgctgatgttacttttcaggatcagcaacctttctattgtacttctccttccgtgtcacaggtttctcacattcttcctttaccttttcttgatgtttctattccagttacagatggcaatccagttgaggaaccttctcctgtccatgcttctctagctcctgctcgtcccctacaagtttatcagtgtcgtccccagccagctttggatgttgcacccccttctgactcacggcctttgccacttgcctcgcctcctttggatcctgcctcggacactactccttttgcctcacgcataggtactcgttctacccgtaatcctcatcctttatatgcctttttgggttatgaccgaatttcttttccacattatacctttgtttcgagtctttcttctgtttctattcccaagactacaggtgaggctcttgcccatccaggttggcgccaggctatgctagatgcaatgggtgcacttcattctactggtacgtgggagcttgttcctgctcctcctggaaaatctttggttggttgtcgctgggtatttactgtcaaggttggtcctgatggccatgttgaccgtctcaaggctcgcttggttgccaagggttttactcagatcttcggccttgattatagtgacaccttctctcctgtcgctaaaatggcatctgttcgcctgtttcttgcccttgctggtattcgccactggtcactccttcaacttgatattaagaatgcctttctccatggttacttacaggaagaaatctacatggagcaaccgcctggctttgttgctcaggggagtctgggttggtgtgtaagcttcgtaagtccttgtatggcctcaagcagtctcctcgagcatggtttagtcgtttcagttttgctgttcaggcttttgggttggttcgtagtgaagtggatcattcagtctttcataggcagacatcttctgataagtgtatctatcttttggtatatgttgatgacatcattattactggtagtgatcaacctggtattgaccagttgaagcaatacttgtttagtcaatttcagacaaaagatcttggtaagcttcgttacttcttgggtattgaagtggcacagtctagacagggcatttccatctgtcaaaggaaatatgccttagacatcttagaggagactggtatgttggggtgtaaaccagttgatacacccatggatcctaatatcaagttattgcctgaacagggggagccattatctgatcctagtccttatataaggttagttgggaagctaaattacctcactgtgactaggccagatatctcgtttgctgttggtgttgctagtcagttccttgattccccatgtgattctcattgggatgcagctattcgtatcctctggtatatcaaaagagcaccaggaaaaggtttactatattcggatcagggacacacagagatttgtggttactctgatgctgattgggcagggtcaccctcagacagacgatctacttcaggttattgcatcttctttggtgggaacctaatctcttggaagagtaagaaacaaactgttgtagctcgatctagtgcagaggctgagtatcgtgcaatgggtgtcactgcttgtgagctcatctggttaaagtagttgattaaggaacttcatctttgtgcacaacgacagcccatgactcttatttgtgacaatcaagccgctctacatatatcctctaatcctgtttttcatgagagaactaaacatatagaaatcgattgtcacttcattcgagaaaagattcagtcaggggaaattcaaacagcatttgtcaactccaacgatcaacttgcagatatcttcaccaaagctcttaggggtcctcgggttgaatatatatgtgataagctgtgtgctcacaatatatacacaccagcttgagggggagtgttagaatactatagtatatataataggataagtcccacatcatgtatattgcataatggtttctgtgctgtttaatataattcactccctgtgtgatcatataagacacaattctccaatctcaagtgatggtgttaattttaggtccttggatcagcagcataacgatatcctaatggcacctttcgatgcaagtgaggtgaagaaggcagtctgggcttgtggaagtgagaagagtcccggccccgatggtgtcaactttaaattcatcaaagaattttgggatgtatttaaagctgatttccttcgattttttgacaaatttttcgtaaatggagtattcccaaagggtggaatgcctcttttattgccttgattcctaaaggtcatgatcaacaggggttaaatgattacaggcctatctccttattagcttgtgtatacaaaattgtggctacagtactgtctactaggctgaaaaaggtattgcctctcttatcgatcaccgtcaaccagcttttattgaagggagacatttgttacacaatgtgctcatagccaatgaagtggtggatgaggcaaaaaggaagaaggatagatgtcttgtgttcaaagtagattatgaaaaggcttatgactcagtgagttgggagtttctgttttatatgatgagaaggatgggttttggttcgaagtggattacatggatcaaaggctgcttaaaatctgccactgtttctgtgtaagtcaatgggagtcctattgaggagttcactccacaacgtggtcttagacaaggagatcccttagcccctctgctgttcaatatcgttgctgaaggcctcacgggattgatgagagaagcacaaaagaaggatcagtatgaggggtataaggtgaaaaaaaattggttgatattagcatcttatgtggaatattctagagtattagaattagatgtggaatattctagagtattagaattacttgtgaaatattctagagtattagaattagttgtggaatattctagaatattagaatatgttgtggaatattctagaatattagaattagttgtatataacaaaccctttgggtttcaatctggatgtatgaaaaagtgttcattgttcatatttcaacatggtatcagcaggtttccctattatcgttgtgcaactctgaaacccatttttttgaaaaaccttaagtcatctctctctgtcatttcctataaacactatctagtcacctccaattgcgtttgttcctgtccttcacagtaacttatggattcttcttcttcatgcatttcttctggtgcctctccccttcaatattcgtcaccttttggagacaatcctgctatgcaaattaccaatcaccgtttaaacgctaaaattttgtgcaatggtgtcaatttgtcaagttgtttatccaagcgaagggaaagatggagtatcttgatggaagaaaggaaaaacccatagagggtaaacccggttatgatgattgggtgactgaaaatgccttggtcatgacatggttgactaattctatggaatctgacatcagtcaaacatatttgtttcttgatacggctaaggaaatttgggatgctgttaaagaatattattctgacttgggaaatgcttctcaggcttttgaactcaataccaaggtgagagacttacgccaaggtgggatgaccgttactgaatactttcttgctttaaaaaccctatggcaggagttggacctttatgatgcagcagacctacaaggtttagaagctaattcaaagtttaaaaattatgttgagaacaatagttgtgcttatcaagtctcttctaataatacgagtgaggagcttcgtgcctctcctaattctgatggtgttttcatctctaaggctgagtatgagcaatttcagaaggtgatgcctcaatctgctgaagcaactagtcatgttgctcaacaaggtacggcattccatgctgatcgtagtaatcgttggattcttgattcaggggattctgatcatatgacaggtaatgcaaccttgttttgttcttataccccttactatcaactgtcacgaataagaacagccgatggcaacttctctgctattgttggaaagggatccattaaaatttctgaacacattactttgaactcagtccttcatgttccctctcttacttgtaatctcatttctataagcaaacttacatctgagttaaattgcgttgttaaattctctgtccatgcttgtgattttcatgaacaggactcgggactgaatattggcagtgcaagagagaaagaagggctttactattttgaaaatgatcctaatgaagcaaaagtttttgcacaccactcattatctttgactgatgattgtaatgatgttttgttgtggcatcgccggttaggacacccaaatttcttttatcttcagaagttgttcccaaacttatttatcaataaaaaatccagttctttttcttgtgatattagtcagtttgcaaagcattctcgtgtttcttatcctcctagagttcatcatgatttttctccatttaccttgattcatagtgatatatggggcccaacccgtgagaaaaatatctctagtgcttgttggtttattacttttattgatgatcattctagggtatgttaggtatatcttttaaaggataagtcagatgctgcatccacctttaaaaactttcatgctatgattcaaactcagatccagacctctatcaaaattcttcgaactgacaatggtactaaatattttaattctgttcttggagactatctcacccaacatggtattctccatcaaagttcttgtcctaacacccctcaacaaaatggggtggctgaaagaaaaaatagacatcttcttgaagttgctcgaactcttttgtttaccatgcatgtccctaactatctatggggggaagctgtcttgcatgcatcatatctcaacaatcggatgccttctcgtgtcccaaattttcattcccctttatcttcccttcctctcaagttatttggctgtgtggcttttgtacatattcctccccatcaaacgtccaagctcgatcctaagtctattcgatgtgtcttcataggatatcctcctaaccaaaagggttacaaatgttactcacctgctctccgtaaggtctttgtttctatggatgtcacattttatgagacacaatccttttttccttagacttctcttcaaggggagtctattggagagatgaagataaatgttgcaaaccaaatgagtctgttgttctacctttgcctttggagacaggggtagttattgagcaggagataggacgagctactatgccacagactagagatccccctggtaaatggggaaaaatttacagcaggggaaaaacacttcaggagcctctagactgccaagattcagactcgagtcctagttgcaacaacccaatacctaaatacactgatgcaacttacctaaatttacctattgctcttcgaaaaggtatcagatcttgtactgcttaccctatttctcatcatatctcgtatgaaaagttatccccaggttttcatgctttcaacactattttagacagtacaaaaatacccaaaaacatccaagaagcacttgatgacccaaaatggaggaatgctgtctttgaagaaatggatgcacttaaaaaaaatggaacctgggaatctgtagcattgcccagaggaaagaaaacagtaggttgcaagtgggtgttcacaataaaatttaatgcagataatagcatcaactagtataaggcgaggttggttgctaaaggattaactcagattcatgggatagactatcaagaaacatttgccccagttgccaaacttaacactatccgagttctattatcatttgctgccaaccttgattggtccttgcaacaattagatgtaaataatgccttcttgaatggagatttacatgaagaagtttatatggacccaccacctggttttgaaaaaggagacggatcagtatgcaagttgaagaagtctctttatgggcttaaacaatcccctggagagtggtttgaaaagtttacccaagctgtgaaaggaagaggattcctccaagctcagactgatcatattctattttataaacactctgatggtggcaaaattgttattctcattgtttatgttgatgacataattgtcataggaaatgattgttttttttttttttttgatcagcaaaaataatatatatatatataaaaaaaaaaaaaaaacagtacaaggagtactgctgaagatacaaaacagcgggatctactcaaaactttgatggctttgaaccaaagccgacgaagttctgacagatcgcacaaaaagaaaacaagacaaaatacagctgaattagcccctccccaaaggtgcgaaacactgactcaagttgctagaccaatagttaaaagggatatcaaaaccatcctctaggttcctcagccacgaccagcaaaagaagatggcatcttccaaaagtttgtggccattataagattcattgtgaaaaaggatttgatttctatgcttccaaatacaccatgttaaagctgcccaccaagttagccacctagatagagctttcccccttaaatgacaaaaggaggactgtctgtaatgctcctttggattacaagagtatacccctatgatgcctacccaagcccatgattcccagcacataggtaaaatacaagggcagcgaaagaatagatgtgatgcatcttcctcagaattattgcaaaggggacaaagagtgactggtatatctatatttcttctcctaagattgttccttgtaggtaatctatccttcaagagcctccaaataaagcacgctactttggatgggattttcaatttccataaactcttaaaaacttcatcctgaaagtgactgtcttcctccctgctgagcatatgataggcgttttcaccgagtattctccgctggattctcccgtccaaatccatgaatctgcttgctgctgattaattaccaacccattgatatcttcgaagaatcttatggccaactgaatctcacactctctaaaaggtcttctccattgtagctgccattcccacccatcttgattttgattgcccatctgctgaatgacatgtttttgttgttgtgaaatctgaaaaagtctaggatatgtgaccttcaaggaagtccggtgttcattccacgaatcttcccaaaatagtaccttactgccacacccaatcttccatctaaggccactaaaaaaccaaccatcaagctgaacatttccggagaccaaagataaatctctccaccatatggaagctgatgataacctcgaagaggcctgtagatgcctccaatctccgtatttggattccagtattttagcccataaggcttccgactggtgaaataagttccaacaccattttcccagcagcgcctgattgaaaacctttaaattcttgatacccagcccccctttctcctttggaaggcacacagaaacccatttcacccatggaattttcttctgatcatgattagagccccacaagaacctcctctgcatcctttccaatttaattatgacctgcgccggtaccctgaaaaaagagaagaagaaaatagggatagaattaaggacaactttaataagtgttacccttcccccaaaggataggtgtttgtgtttccacatggctaattttctctcgcactttttaatgattggtccccatgttgaccccctccgcggatttgcccctataggaatgcctaagtaggaaaaaggtacagacattacaccacaattaaggaaactagcagttgcagctacccactgatcgtccatcccgaaagcagcaaggttgcttttattacaatttagcttcagccccgacaccatctcaaagcttttcaacaacacctttaaggttttaacatttgctgaagttgctttcccaaagaaaatggtatcgtctgcatattgcagaatgctgatctcaatgtctttggatcccaccttaaagccttcgtacagacactttgtttgtgcctctcttagcatccccgtaagtccttctgcagcaatgttaaacaaaaaaggagccagtggatccccttgtctgagtcctctccgaggttgaaattctgatgttggactgccatttaccagtatagatatagtggctgatgttaaacaccctttaatccaggatatccatttagcacaaaaacccatcctcttcatcatgtacagaaggaaatcccagcttactgagtcataggctttttcgaaatctgccttaaaaatcatgcatgatttattgctcctcttagcctcctcaacagccttatttgcagtaatgacattgtgcagcagttgtctcccctcaatgaatccagattgtctttcatcaatgatgataggcatcacccttttcagtctgttagcaagcaacttagccacaattttatagatacagcctataagggagataggcctatattcatgtaggctttgtgggtccaaggtcttaggaatcaaagctaagaacgatgcattcaatccttttaaaaatgtgccattggcatggaattcatccataaagcgaagtatatctggcttcaagatctcccaaaaagcctttatgaaattgaaattgaacccatccggcccagggcttttatcacttccacagctccacactgcttcttttatttctgctggctcaaagggggctgacagaacaatgttatgctgtgggtccagagttgtgaagtgaaccccatctaatttaggtctttcagcattcaattcttgatagctctctttgaagaattgcctaatcacctctttaacccttgctggctcttgtatccagcagccatcaattaatattccttgcaacatatttttccggcgtttccaattgactgacaaatggaagaatcgtgaattacagtcaccctcctttatccatctggacctagctttttgccttagcaaagatgcattagcatttgcagccacccagagttcctcctgaagttgttttctccttctaatttcatcttcagtcatttgtctgttttctgtttgtaattcaagattgttcatctccaattctaaggatctgatcttctgttgaatattttcatattgttctttattccatatcttcaacttctgtttcagcaatttgagcttctcctttaagataaaacctccccagccaaaattcctataagaattccacacctcagctatgacctttgatagagatttatcctgtaaccagcaatcaaggaacctgaaaggctttggcccccagtcaacctgtgaagattttaacaaaataggacagtgatctgagtaattgcgtttcagggctatttgatagcacccctgacagagagtcatccagtcagctgatatgaaagccctatccagcctacttttggctaacctattcggtctataccaagtgaattttctcccaattctaggggcctcctccacttctagttcagcaatccagtcattgaaatccattagggatcctgcatattggtaattctgtcccaagcccatcctttctgatgatcttctgatgtggttaaagtctccaataatgcaccataagtctgcaggaaatgctctcctcagctgtttgatttcttcccacaaagcttttttcaaagttgcatcacaaggtgaatacacattaattactgtaatttttcttttttcagacaataggaccccttccaaatatatataaccattgccttgcaaccttttttctaccagaaaagtttcctcactccaaatacatagcaatcctccagctttattaactgcacgctggaattcccacgccacatttgaatcaccccacaaagcttgacaaatagtctttgtaattgtttctttcttggtttcttgtagacatagcaagtcagcttgttctttacccaccattttccttattgaattccatttgacccccctccccaaaccctagtgttgtaagatatgatcttcatgagtccacctcctctcctcccctcctagaaatctcccctttttctgttgactccaaagccagaattctactgatgatatcctccttggtgtgactagttaccccaaactgttgagccatagcccagaaatcatcttgtttgggtgttgtaaaggatgaaatagagtctgtgtctgaattcacaatttgctttaatcccacctctctgctagccccttttagtccactgtcacccccaggctttgtgggtgatttgtgcctagataataaggtaatttcttccttccttatcttgacaggaggtgtttgctcctttttcccattgaggcccactttttgatcactggttgtatttacggctgaatggattctattatcgtgcataggaaatgattgtgaggagataaactctttgaagtagtgtttagctgatcagtttgaactgaaagatcttggagttctcaaatatttccttggcatggaggttgctcgtagtaaggcaggaatttctttaactcagaagaaatatattctagacctgttgcaagaaacaggaatgcttgggtgcaaactagcagagactccaattgatcctaatattaaattgggaattgaagatgggaaagaagttgacaaagagcagtaccagaggttggtggggaagttgatctacttatctcacactcggcctgatattgcatttgcggttagcatggttagtcaattcatgcattctcctaaggaaaaacaccttagtgcagtttatagaatcctcaaatacctcaaaaacacccctggtcgaggaatgctctttcaaaggggacacaagaggatgattgaaatctatacagatgcagattgggctggctcggtaatgtaccgaagatccacttcagggtattgtacctatgtctggggaaatcttgtgacctggggaagtaagaaacaaacagttgttgccagaagcagtgcagaagcagaatttcgagctctagcccatggcatttgtgaaggaatctggttaaaaagacttcttgaggaattgaagatctctcattccctacctattagattgtattgtgataataaggctgctatcagtattgctcaaaatccagttcaccatgacagaactaaacatgtggaggttgattgtcattttatcaaagaaaaattggaggatggtagtgtatgtttgtcatatatacctaccaaagagcagactgcggatattcttaccaaaggattacacaagccaacctttgaggatttaattagcaagttgggaatgattattatatatctcccaacttaagggggagtgtggaatattctaaagtattagaattagatgtggaatattctagagtattagaattagttgtggaatattctagagtattagaataagttgtggaatattctagaatattagaattagttgtatataatgaaccgtttgggtttcaatctggatgtatgaaaaagagtgttcattgttcatatttcaacatcttacaatatgctgatgacactatcttttttgggatagcttctgagaaaaatgttagatctattaaggtcatgttgagaggctttgaattggcatcggggttaaaaataaactttgctaagagcagttttggggtgtttggcatgaatgaacactgggataacaatgttgccttgcatctgaattgtagacagctggttgtccccttcttgtacttgggtatacctatcggggcaaacccaaggcgatctgtcatgtgggatcctttgattaagaagtgtgaccgaaaattagctacctggaaaaagtagtacttctcctttgggggagggttacattgattaagtttgtcctcaatgcaatccctattttttcattgtctttcttcaaggtcccgaagaaggtggtaaagagcttgatcagaattcaaagaaggtttttgtggggtgatagtcaaggtcaaaggaaaattgcttgggttagttgggatgtgatttgtcaacttaaggagtgtgggggtttgggtattaaggacattactacgttcaattatgctttacttgggaaatgggtttggaatatgttccatcaacaggatgagttataggtgaatgtgttggagtcaaaatatggaggatggaggaacttgggagtcaatagaagggttggaggagaatccatatggtggagggatcttggttctgtttgtaattcaaatgaggaaggatgcgggatcataagaggaattgattggaaggtgggctgtgggtgaaagactttattctgggagggtacatggaagaatgtggggctgtcacttaaggacaaatacccaagactgtacctgatttccaatcagcaacaacaactcatccagcagatgggctcacaaatttctcaggagtgggaatggcagtttcagtggagacgacctttcatggaaggggaggtagattcggttatcaagttcttagaagagttacaagggtcgatggtacaacctcaactacaagatgcgtgacagtggggggctcatccgagtggagtgtacaccgtggggagtgcttataatttcatcaacaaggattggacttctctgaatctttgtgaagtgtacaagatgctatggaagataaaagtccctactaaagcattatgttttgcttggagacttattagggacaggttgcctacaaagctgaacctgagaagaagaaatgttgaactaaatgatctaatctgtcctttctgcaggaggtttgaggaggatgcagcacatttattttttagctgtgataaaattcggccaatctggtgggattcattgtcttggatttctatctacaatgtgtgctcagtgaatcctaaggaacatttctgtcaacattccttctattatttcagcgggctttgtgggcagagatggctaacgtggtggatagcactgacatggactatttggtgccatagaaacagaattattttccaaaatgagcctttcaacagtcacaagcttatggatgacgctatatttatatgctggatgtggtctaagaatctggagaaagggtttaatattccgcttcatgtttggtcctgtaagctgggggagtttttttgttatcagtggagggtataacatatagatttagttacccctctctgttttgggggtttctcttctgtttcagctagatttttggcaccttaatccatgccttttccatgtattaggttgccaaaggtcttgttttggtttgcttcttctgtttttgttttagtactacttgtactgtctctccttttttctattatttatatatatatatatatgcatatttttgccgatcaaaaaaaaattataagacaatattacacagtaaaacatagagattggttgtctttgtgcgagagaaggtacttttaggaaaaatcatcactaattttgtcagctccaaagaccagctggtagacatgctcacaaaatctctcaagggcactcgagttgacaatatttgtaacaagcttggatcatgacatttatgctccagcttgaggggaagtatcgaatatacattttggtatgatttgattgtgtagataaaattagggatttctctcattattattcattattgggtttccttaattatgtatcattacagattataaataaagcttttatgtgtgaggtacaacacacagaaacagtaaaatactttacatttatagaatttgtatagaaagtgtgtcttaccacataaagcctttatttataatgaacaaatatgatcaatccaataatgagagtaataaggaataaatccctaattgctatctaaaaatataaataagagaatattatgtaatctaacacttcccctcaagctggagcatatatgtgatatgagccaagcttgttacaaatatagtaaacctactaaaaagagaaaaggcagttctagccatgtggttgtaccgaataaatgatggctcggcagcagtcaacggaggcccacagttacgacggatactgtttacccgtgaaaagagcacgcattgaaagtgtgagatgcacacacatgggggcatgtgtggcggcagacggttgcacggttgcgtcgtgggtcatcaaacacaggcgacgatggtcgcaggtaggcaccgacaaaagggtgtcgggaaggctgctaaacaagggtaaaggcgcagtgcggtactgttcaccacaatgagggcctgggcgagaaaaaggacgtgcgtgagaatgcatcagtggttcttcaagacaatgtcaatggagcagcatagatcggaggaaggaagatccgtgggttactggctggaaaggtcacagagcttcggccgcggccactgctagtggccagaaaagcttaaactggttattgaaaagaaacggcaagtggagcgcccaccggagacagagtccctggtgagacacgatttttgtgatacctcaccaaagaataagaataatctgctctggtaccatatcaactttgtatagaaactgtcttggatgaccccacaaagcctttatttataatgagcaaataggatcagtattgattacataggatcaatctaatagtaagagtaataaggaataaatcccttttctttatcagcaaaataatacgtattatattaataaagatgagtacaagtggtacttttctatgtacattgttaccctactatgtataatcctaaggagccattatacttcctaatagtgcagtattgcaagaattaggaatccataagactatataggtctttgtacccctccacaaaaagtatcctataaaacacaaaaagtatcctataaggaataaatccctatttgctatctaacaataaataagagaatattatgtaatctaacagttattctgcattagaaactgcacgatgccaaatattcacagaaaaaaactgatggcagctaggattacatctaatagtagggtgtataattaggaaactgtgttgtcattcgcagtttgtaggcagagaacactctctgtactctgtaggagacttttctctgggacatcaagtgtattgctatctgtgttcagaagtattgtattttatttgtattttattagtttatcagttggtgttctatcatgataattgcaaattttaaaatatctttaatgtgtgttgctagcaggctatgaagcaccgatactccaatttgcctcatgtatctatatcggatatgtatccgatatgatactcttggatacttcaccaatacatgtccgtggagtatccaaacctatgaagtagcaataattcaatttgcttcacgtatccaatgtcgatactctttaaatactttgtcgatatgtattggtgaagtatccaagattttaaagtattttaggaaaatccaatacaactacatgaaacacttgtatgtataatatatgaacatagaatcattatccctcatgaacaaaaaatataaattgttctctttatgaatatttcaagaagaaaagaaattgaaagtatttttcctataggtaaataatagaaagtaatttatgatgacaatgagctataattttttttgttcttactaatcttcaggaaatacatttttaatttggactagcagaattgcaattatatatttaatatgttacttttatgattttttatacatttctaaatacgcatattacatgtatagtatcctatatatttttgaaataatcatggtaccatatctgatgcgtattgtatccgatacatgtatcatatttgtgcatcatagttagcaggtcaggatccataggcaagaaaatggtatgtatggagagatcattaaaagaaaagtgtgtacttgcactatgcaagacagcctccatatctctagcagtaaaagttaataaaatgagacctctgagcatcagaaaaaagtcctcacaaatggaagacataaccagaatcatcatgaaagcaattgtaaatggatttgttggaaagatatacttaactgttaggccctcacacttatcagcaacacaaactgtttcattgagtacctcacctacacctcttgcatcatcatgaagcaacctcctaacaaaatataaaaccaaatcacagaacaaggaaatgtcaatcattaattattattccattacctatatcctatgtagtaaagcgcaaaagcaacttgaactttaagtcactagatatgaatgacaactataaccaacctgtggagcatcagctctacttggccatcttctaagctggaaccaccaactgagcggtccaccaacacagagaattccatactactatcttgtacatatattcctaaattgacctgaaagaatggtgaaaaaccataatattaactaatatccatttgaagatagagcagctggactaaaatgcagaaatatctatgacaaacaaatcaacggccataagaaataaaaatcatgagttacaagtgaaacagagagctcaaatcaatgattgacaattaaataaaaatgtgaaaagaacaaaattcatgagaagaaaattcatttgctcagaaaaagaaaattgtagcagataataaaataatccatacataagaatgtaccacagtgccagaatttaatataaacagaaaatagaaagatggatagtgagtcttcgattaaacgaaacatactgggtaatagtttccagcaatgggttggttcacttgtagatcccagtctgtcctgaaatctcgaatctgcaaaacaaattttaaaaaaaaaaataaaagtcattaagaaaaaaggaacaaagctagaggtaagccttctcaagaataatacaaaataaaaacctaaaactagagatcgaattgtctaacagggcatcccaaagcatatctatacatggaaaaaaaaatgattaggaaaaacaccacaaaaaagtcaaaaaataaccctatcccagatgttgtctagaatgttttcttgcaaattctagcattcctttcaagccaaagtcatcagagaacagagaagagcatggccactgaaattagcttcttaataaaagccaaaacctgtaaaattgataaagagaaactgatgcaactacgacagaccgaactctcaaaaaaatcccaaataatctaattttaaagaaaaaatttgctgcagaacaatgcaaaaaaagatgattccctgtttccgaacaagaacaggacaatgtacacatgtcaggagacaaagcagtgagaggcctgcactttgtcggatgttgtaacgtaagtgttaagcctaaataaagtctcttcacatttcatccacccatcattaagatgggtctaggtcaaggttttcctattaattaaattgtatgttgctcttccaaaatatcaaagtctccaatccacaattagaatattttaccatgatataaggccaacagagataatataatcaacaatctacataatttataatagaaagacagcaaacaaatttaacacaccctcttaatgaagtcacgtccattagaatctgtgtagaatgtcttgttggtcttcattgtagttttaaattgcgtaataatttctttcccaatgccatcatccacaggaataggcccaacctacatatgtatatataaatctaagatgcaacttctcaactgttcctgagcaatataatagaaatgaaacaatcatttgctcttccaatcagataacatggaaggtaacctactgtgaactcaatttcagcatgctcttttgccttgaatatcctcgtaatctgtatatacagaaaacaaaataagacttccgtgcttaagctgcaagaaaatagatgatcacaagatatacaacttctaattttactaaaatttgtgggggcaggggttgctgcaggatatggaagtgatgcgtgcgtgaatgcctgtaagaaaatagttcatttaatggttattttaaccataagttacctgggatacccatgaattgagctgttgatgtacttcatccaatattggaccacgcaggacagtaaaagatgcctgaacacaaaccatacaaaataaatataaattattctctggattggccataaactaaaattatcatcaaccattgaatgttcaaaaggcaaagtttgtaacctgatgatctgatttaatggaaaatgagccatttggacgaaatacatatgccccagaagccttaagaaaaacatagtttgcaatcaaaaatattttgattagtttcagttcataatattatagattaaagtaagaaggtggtcttatcataggggcatagtgctaagaagaatacacagtaaaggaaaaactgaaaaggaacaaaagaaaatgaaaaaacacatacaatatagagcattaagttaatcgtctgactgacaaatgcaccatctatcctgcatcaagaatgggaagcaagcattctttttttattgttgaaagagttatttgttaggttattgtgagtatataggcttgactctagtgtactttgtaccgcatgtactaaactctcaacttagtattttatatgcatggggagaccatgctatacagatcatcccattacagcataattctcttctctcctctctctacatagtatcgcaagtatactagggaagccaccaatcatgtagggcatctgctttccaaaaagaaccctaccagtcagccagggctactggcaggtcagaaacttgtatgatagctagttcttaatcaagaaaccaaccagatctgaaaaccacaggtgtggcaacaatcaggtgtaggtgctgatctagagcaaaaccgctcccgttttcgtaacatagaggagcatcttgctggtctgaagaaagcctggtcatgtttggggcttttcttaggtgttggtgctatttttggagcaattcagtcagttttctggtgctgtttagtgaaacaatgttgtgtttgggctctattttttgtgatctctactacatttacaaaaaaattaagaaaatatgtgtaacaaagaaattaaatcatctggctaggactaccaaatagaaaagacaactatattcattaaaaaaaaaaaaagaaacatcttcctactaacaatgtaattgaagattaaggcagttgatatatatagaaatttcagtatatatgtaactaactacctgaggatctttgtcggtcccatcgtttccagaataataactgtatgattgttcaactgatgttgtaaccttcaaccaaagccaaaataaaataagaaacttcagcattactcactttatgccttaagcaaattgaactttaaaaatgttgacatcaattatcagataacatctgatcttggagcataatgagaagacctcaactagaaactgttagatttcaacttaaaaccaattggcactaagtgaagttgtccaacagatatataagctgcaccccaagaactgaggcaggcaatgtgggactttctaacaaacccctccacagatacctgccaaaacagacgagcctactagaataggcaagaactaagatgggctataggttctgataccacgttagatttcaacttaaaaccaattggcactaagcgaagttgcccaacagatatatataagctgcaccccaagaactaaagcaggcgatgtgggacttcctaacagaaacactaataaattcatattgaaaacttaccagagttctactgtttacatagtgagtcagtcttccttcattttctgaataaagtagctttaaattcccttttccaacttctatgcttttattagtacttccttctgatctgtatatcttggagatagttgaattatgacctttgtcattcaaagagttataaaagtttgagttagtgagtgttactttcagctcaactttaccagtacatactacagactagagataagtaaacaaagttaagaaaaaagtaatatgatatatcacttacttgattgtttagagcttgacactatataggtgctgaaaccaaggggaggaacagacactggaaatgcaagccaaaacttgagtttgttgcccccaggagcttttcctatatatgctctgacatagtgttttctcatagtcaaagtagcattagacagaggcagaatctgagactcaattttattcccagaaaaatcctgaacaaaaacctgtccagtggaaacctgtggcaaatatgttctggagtcagtcatgcaaatcataaattagggtctaaagtgtttgaatagttataaatatggaaatcattaacaatttaatcaaagaaatttgttgaaataccatatctgatgtgtatgcacatgctgtttcttttagcatgctcattggatcatgggtgcattagtacataaattaatgaagatcagaggggatggaaaaacatataaatgaaacagaggcatatgaatgcctatggatccctcaattagctcattccagtcaaactagaagaaaataccaaaataaaaatatgtttttctcatcatctttaagccttctaatgcacacagaaaataaatggctgtactaccgggggccctagggaagtcagaattgtggtccttcaagaggcaaacaaatagctcaaaagaatccaaatttcaacaatcagttaattaatatctttcaagactaaaagatgtcacaatcactaagaagaaaatgacccaaccaagtacttggagcatggcagcaaccactgattttgaagtgatggaaaaattcattttttactgcccatacccaagtccaatattgggaaaaacccaagttccacatcagctaaagatagtgccaagatagagtatataagtgggggcaaccctcaccctatgaactagcttttggggttgagttaggctcaaacccacattctaagatccaataagaaataaagtaaaataaataaattaccatttaaagaacttacaggaattcgaattacatcttccctcttccaagcaagaggattataaacaacaatcacctaaaaaaggaatacaaattgagagaaacattttaataagaaagattctatatagtcatgatcatgcaacaaatcaatactatccttaccaagctctttccattaatcaatgtagcttctgctggaggacagtaacttatattaagaagaggacactgccaacagattcacaaaatttagtgtcaaatgttaatagaatatgagagagagagagagagattgagagtgaggaagatcttattattcaacccaagtattgaaaggttacatgctcagattatatagagctcaactaacataactgaactaactgtgtaataactaactgtatttagttagttagttacaacagctgtctacagctgtactgacagctatcagtcataacactgagaaaagaaaataacccatcagagtaggtatactctaataccccccgcaagctcatgaggagttggctgaaagtttctcaagcactctgagcttggctctgtagacagaaaaggtggaaggtgtgagagctttcgtgacgatgcctgcacactgatcaatagcaggaatgtgtaccactggaaccagatcagtgagcaccttttccttgaacaaaaaacaggtccaactccatgtgtttgattcgagaatgaagaactggattataagccaaggccactgtgctagtgttgtcacaaagaatgacgggagaggcatgagagaccttgagttcagaaagaagagacaaaatccaagtaacttctgctgcaactaaagccatgctcctatattctgcctcagtgttggaccttgcaacaacagtctgcttctgggaccaccagaagatcaagtttggaccaagaaagatggctgcaccagatgtgaacctcctgtcatcaggatcagaggcccaatctgtatcacagtatgcatgaatgggaaagggatgcttggtagacataggctgaaattgcaatccccgtgatatggttcctttgagatatctgagacagcttcccaatgctgttcagtgggtttagacatgtactggcacaccttgtttactgaaaaacagatttctggtctagtgattgtgacatatttaagtgccccaaccacagatctatagagtgtaggatcagaaacatccttagaaccagtcttagtgagtttgcagcctccaaccataggagaagaaatgggatttgcgtcttccatgttggttttggaaactagatcccttatgtatttggattgagtgaggataagagacccattaggcagagatgagacctctattcccaaaaaataatccagcagacccaaatcctttagagaaaacacaggattctactttgaaacaagtgactttataaggctggaattatttccaatgatgataatatcatcaacatagactaggatagaaacaacagaattctgctcagaataaacaaagagagagggatcacttgctggaggaaaatttgaaaagaagagtagctttaagcttgtcaaaccaagctctgggggcttgttttaagccataaatggctttgtgcggtctgcacacaagctctttgttggaggactcaaagcctagaggttgagtcatgaagaattccattgaggaaagcattgttgacatccagtggatgtagaggccagttatatttgagagcaagagagagaattaacctgactgtgacaggtttaatgacgggaaaatgtttcattgtagtcataacctagctgctggtgaaatcccttggcaacaagccagagctttgtatttatttactgtcccatcaggattttccttgaccctgaacactcacttgcagccaatggcttttctggaaggaggcaagtcaactaaggtccaagtgccatttctgagcagtgcatcatactcagccttcattgcagcaagccaagttgggtttgaaagggcagattagatggttttgggttcaaggtgagtgagaagtaatgtgggattgacgcttgacttaacaatgacagacttggcacgtgtacacatctataggagtatagtatactcctataacatcaagtgaacattgccaggtctaacaagggaaggctgtaaagggggttcagcattaaaaggtggtgctgaaggtgaatcgggtggtgtgggtgacccaggttcagaggctggtattggtgaatcaggttcagtagagtgaactgtagttgcatgttcatttactggtaaggatggagaggtattttagctgggtgggtggttgctggaatcttgagtaataactgttgtgggagtgggttgtgatggtgtgagtacagtaacagtagaggtaattttaggaggttctggagtaatcaaggaagggctaggaaaagagttttacagggaaaattagacttcattaaaggtaacatccttggaaatggataccctaccatcagctgcaagacactgatagcctttgtgagaagtagagtagcccaaaaagatgcactcctgtgacctatactgcagcttgtgcttgtcgtaaggttggaggagagggaaacaagagcagccaaacgccttatggaaggtgtaatcaggtaatttctgaaacagcctttgatatggcacctcattgttgatgtaagaagagagaagctggttgataagatagacacttgaagtgaatgcatgatcctaataatgaagaggcatgttagcttgagagagtaaagtgagaccaagttccaccatatgtcgatgcttcctttccacaaccccatttgggtgatgggtgtgaggacatattaatctgtgcactgttcccagatcactaagaaacttggtgaacggtccaaactctccaccccaatctgattgggcagctttaataggaagattaaactgagtttgaaccataactttgaattgtttaaaaacttccaatgtttctgatttggttttaagtaagtatatccaagtaaacctactaccagcatcaacaaatgtaatgtaatacttaaaaccagaaggagatgaaatatgggcagggccccacaaatcagtaaatatcagttcaaaaggagttgaattgaatgatttagaggaagaagatggaagtctatgtgttggaatataagcaatgaacactctttttcattcatcagattgaaacccaaagggttcattatatacaactaattctaatattctagaatattccacaacttattctaatactgtagaatattccacaactaattctaatactctagaatatttcacaactaattataatactctagaatattccacatctaattccaatactctagaatattccacaactaattctaatattctagaatattctacactccccctcaagttgggagataaatattaatcattcccaacttgctaattaaatcctcaaaggttggcttgtgtaatcctttggtaagaatatccgcagtctgctctttggtaggtatatatgacaaacatacactaccatcctccaatttttctttgataaaatgacgatcaacctccacatgtttagttctgtcatggtgaactggattttgagcaatactgacagcagccttattatcacaatacaatctgataggtagggaatgagagatcttcaattcctcaagaagtctttttaatcagattccttcacaaatgccatgggctagagctcgaaattctgcttctgcactacttctggcaacaactgtttgtttcttacttctccaggtcacaagatttccccagacataggtacaataccttgaagtagatcttcggtccattaccgagccagcccaatctgcatctgtatagatttcaatcatcctcttgtgtcccctttgaaagagtattcctcgaccaggggtgttttttaggtatttgaggattctataaactgcactaaggtgtctttccttaggagaatgcatgaattgactaaccatgctaaccgcaaatgcaatatcaggccgagtgtgagataagtaaatcaacttccctaccaacctctggtactgctctttgtcaacttctttcccatcttcaattcccaatttaatattaggatcaattggagtctctgctggtttgcacccaagcattcctgtttctagcaacaggtctagaatatatttcttctgagttaaagaaattcttgccttactacgagcaacctccatgccaaggaaatatttgagaactccaagatctttcagttcaaactgatcagctaaacactgcttcaaagagtttatctcctcacaatcatttcctgtgacaattatgtcatcaacataaacaatgagaataacaattttgccaccatcagagtgtttataaatagagtatgatcagtttgagcttggaggaatcctcttcctttcacagtctgggtaaacttttcaaaccactctctaggggattgtttaagcccatagagagacttcttcaacttgcatactgatctgtctcctttctcaaaaccaggtggtggatccatataaatttcttcatgtaaatctccattcaagaagacattctttacatctaactgttgcaagggccaatcaaggttggcagcaaatgataatagaactcggatagtgttaagtttggcaactggggcaaatgtttcttgataatctatcccatgagtttgagtgaatcatttagcaaccaacctcgccttatacttgttgatgctattatctgcattaaattttattgtgaacacccacttgcaacctattgttttctttcctctgggcaatgctacagattcccaggttccattttttttaagtgcatccatttcttcaaagacagcattcctccattttgggtcatcaagtgcttcttggatgtttttgggtatttttgtactgtctaaaatagtgttgaaagcacgaaaacctggggataacttttcatacgagatatgatgagaaatagggtgagcagtacaagatctggtacctttttgaagagcaataggtaaatttaggttggctgcatcagtgtatttaggtattaggttgttggaactaggactcgagtcagaatcttggtagtctagaggctcctgaagtgtttttcgcctgctgtaaatttttccccatttaccaggaggatctccagtctctagcacagtagctcgccctatctcctgctcaataactccccctgtctccaaaggcaaagatagaacaacagactcatttggtttccaagatttatcttcatctaccccaatagacaccccttgaagagaagtcgaaggaaaaaaggattgtgtctcataaaatgtgacatccatagaaacaaagaccttacggagagaaggtgagtaacatttgtaacccttttggttaggaggatatcctatgaagacacatcgaatagacttagaatcgagcttggacctttgatggggaggaacgtgtacaaaagccacacagccaaacaacttgagaggaagggaagaatgaactcgaaaaaaaggaaaggcgtcggtaagacaagataaaggggaatgaaaatttaggacacgagaaggcatctgattgataagatatgatgcatgcaagacagcttcccccccatagatatttagggacatgcatggtaaacaaaagagctcgagcaacttcaagaagatgtctattttttctttcagccaccccattttgttgaggggtgttaggacaagaactttgatggagaataccatgttgggtgaaatagtctccaagaacagaattaaaatattcagtaccatgtcagttcgaagaattttgatagaggtctggaactaagtttgaatcatagcatgaaagtttttaaaggtggatgcagcatctgacttatcctttaaaagatatacccaacataccctagaatggtcatcaataaaagtaataaaccaacgagcaccggagatatttttctcacgggctggaccccatatatcactatgaatcaaggtaaatggagaagattcatgatgaactctaggaggataagaaacacgaggatgctttgcaaactgacaaatatcacaagaaaaagaactaggttttttattgataaataagtttgggaacaacttctgaagataaaagaaatttgggtgtcctaaccgacgatgccacaacaaaacatcattacaatcatcagtcaaagataatgagtggtgtgcaaaaacttttgtttcattaggatccttttcaaaatagtaaagcccttcttcctctctagcactgtcaatcttcagccccgagtcctgttcatgaaaatcacaagcatggacagagaatttaacaacgcaatttaactcagaggtaagtttgcttatagaaatgaggttacaagtaagagagggaacatgaaggactgagttcaaagtaatgtgttcagaaattttaatggatccctttccagcaatagtagagaagttgtcattggctgttcttattcgtgacagttgatagtaaggggtataagaacaaaacaaggttgcattaccagtcatatgatcagaaacccctgaatcaagaatccaacgattactacgatcagcatggaatgtcgtaccttgttgagcaacaagactagttgcttcagcaaattgaggaatcaccttttgaaattgctcatactcaaccttggagatgaaatcaccatcagaattaggagaggcacgaaactcctcacttgtattattagaagaatccataagtcacctcaaactaaaaaagagaagaccttttttttttataaaaaaaataggcttcagagttgcagaatgataacaggaaaacctgctcttgataccatattgtaatataaatcttcttattcattcattcagattgaaacccaaagggttcattatatacaactaattctaatattctagaatattccacaacttattgtaagactctagaatattccacaacttattctaatactctagaatatttcacaactaattctaatactctagaatattccacaactaattctaatattctagaatattccacaaatagtcaatagcatatatcagaaagcaaaacagttaaaagcaacataaaagaacactcaaccaaaagcattttcagtaggataaaataattcctttgtcgtttatttatatcatttttattaaaggacaaaaaaaaagaaataggaaaccttatcagctaagaaaggttaaatgtagtgaaatatgtaacattttcccgcatggaaaggggggagtttaaggaagaaattatgttgctgataaaaatttggcatgtggcataaaatgaaatcatatacttttgatttttaattggctgccaagtcaaaatataacagagtagtagttaatttatgattgattcttccattaaaaaattaaagaaacttatgctatgactatagtgcattgcctgctggaagtctgtcactggattcatcctatacgaacttaatctttggtttaccaaggaagcaagtgcagatgcaaccaacctttctgcctgaaaattaagttgtaaaccatataagttgatgtttatgatatcaatactgaaacagaaaattattaatatttacctcttcatatcccattgagagtcgcagtgcataatcagaagcaacatgctgcctttctgtgccactaactgcatcatggtgctgagcaattgctaaagcatcagctaatgcatcagtatttggtcctgtttcattcctccctttaaaatattccaattgccgtgctgcctaaatgtcaatagaagaaaagcaatgaatgtagcccaaacaaggaaaaatgagctatgagagcccacaagcacttaacaaattacttcataaagtaaaagaggtcaagattctacctgatagtaagcactcatgaatctcacatagcccttcaaagctggcctacttgtaaaatatccagtccaatatgcatttgggtgatctgcatacctaaaatattgtgccttgaattcaaaattgacatctctaaactatgtggaagctttgaagggaaggaagggatgggaagggaagtaaatgaaggggattctcaaaagcttatgttagtgttagaattaagcacatataaaatagatcttatcacatatataatacagattagctgttattaaagactgattcttagttgattaggtaattaattcctgtacattagcccttagaattagcatcagattctgttgtgtagaatgcaatacgaattataaatatacacatgtggactgattatcacacaatttacgaaattctatatgaccacatctgaagtagaagggaagaagggacaggtcacaaagatgctgacctcagcatagataagtattgcagaagattagaagaatagcaatggtagcctctctactaccgagagtagaaaggaaaagacactaatattttcttgaagtaaggtcatggacaaaacattgcaaccacagacttggagcgaaacagagtagagggcatgtgttggaaacaatagagtgaggtacctggttttggaggataaacgttacgagggtattcaattgattaagatatcatgaggtaagtatggaattgcccaaaaattaagtggggcattgtagcccttagagttaccattagactccactgtattgaatgttgtactgattatcaccatacatgtttaaactgattggtcacacaatttaaaaaattctatagcttaaactattagatgaaagctcatggatagctttattatatttagcactcttgtttggatgtttgagggaaaaaggttattctcttcctcttgttagggagttaaagttaaaagtaggagaaatgacagttatgtcccttatttatttaaaataagttatttccctttccttcaaatttcttcctcttgtttgggagttaaatctaaaagtaggagaaatgacagttaaatcccttatttaatttaaaataagtgatttccctttccttcccctcattaaaaaacttccaaacagaagtttgtcaattccctccccttcccttctccctccttacctctaattccaaacataaattgagaacggaagtatccaagataaactcacgggaagaaatcatcaactttaagaggccaatactcattagctgcatattttgcatcagtgtagatagatggtgttgaatataatgcattgacacgtccatcctaagagagtatggcacaaatggcaagtacaagttttaactcaaaggagctaaaccaggaagtgtcatcaaagatgcaaaacaagaactcagggaaacatttcagacacaattgcaagcttgagtacctgattgacgtagtgaataaacttatccatctgcctgaaccatgaattagcatattgataacggaagtctgtccccattgcccacataatgtgatttgttttggtcacattagcctagaaacaagtagaaaatctagtctgtaacaaccgtgatatacaaatactccaattcaaacaacataaaaccaattaaaatatatgtatcaacatcaacatcacctttaacccaatcaaaatatatgtataaaaataaatatttactctcgtaaatttactgcattatcaggcttttcaaaggctgtggtgttatgttatagattatgaaaaatataccttgcaaaaatgtataaaactttaactaaaagcaagaaaatttgcttttgagagcatctaaaaaaagtacaaaagatggataatataaaattaaaagggtaaatggttaaatagggaaaggaaaactgttacaattaatagaagctgaaggtttttaggtaattcatattctttatcagccatagctcctttaagatgcatcttctaggtgtcaaaaagatcctatgacaattttaaagcacaagaagttcctaaaaaatctttgccaccaaaaagtatattttttttgtctcttctgtaaaaagcaacaaatcaaaaaacactgcatttctagtttactaattagaatataaattgcattcttaagcctccattaactagcattcttaattagaatttatataacaaaaggaagaggttcaattgtcagccagacctcacctgagctaaggcagcagatacaaaatcgttgaccctttcttgaacattatagtcaaatagttgaatgtcatccttttttaatcaaaaaaaaaatgtcatccttcaaattaattttacatgaatcttagaagagtattaaacattttcttccagtaaattttaaataaataaaagaagactacctgaataggaggggaaacatcatttatctcaaatgtgaaaccatcaggaggatcataatgcctgggaaatatcccagtaaatatctgcaatgaagttagccataggaataattattgtaagaactgaaaagaaggggaaaaaattacttgtaagtagcaacagaatcattaggcaactaacttgtgaagaagagccaagagacctggaaccctgccaaataacctcaagagtcttctccttcaatcgcttagctctatcttggtaatcaattctagcaaaaaaatgtgaatcgaatcctagctgcagccaagacacaatcacatagggtttgcaaattcataatgacatgccacaacttcaatatgattgtgtgaattacacataagagtacaagctttgattgactagaagtgaaatcaagcatgttatgttggtaattaatacagataagtttccacatggttcaattataataaacatacctcagcaccaagcaagtaagcctgaactgcagaatggccaaatgggtcaatctgccaaccaactcttggaaccttaccaaattcttctttgataaattgatgcccaagagtggtctggtcaattagatcaatgtaatgcggggtggcctcatcatgcatacacatacccccatttcttcaaaaacaaaatcaggaaccaaaacaaaacaaaaaacaaaaaaacaagaataagaaattactaatcagattcaaaagtcatcgacttaagcatcatatatgcaaattacaaattaggcaaaaggaccctcctaaaaaatccttcacctgcaagctaaccattatctactgcaaccttatatcatagacatgaatttgaaaagcaataactattaactagcttcagaaagaataacataagatagttacattacatgaattccaactgacccgagttgacaagctccttgactttaattttcattgctttactttgctgtctccaccatctctggaaaaatgcctacccataaaaaaataaaaagaaaaatcagcactcaactaaacccactatcacttacttcttgccctttaaaaaaagaagttaatgaaattaaaacatacacgctcaaaaaatgcaagcatggaaagttagcaatatctactcatgtatcataaattagaatacacaactctgaaactcactctctcaattagacattcttaatattttctctcttctttcctttgatggtgtatttcacacattacgctggcaactaaccaaacaatttctatcaatcatttccctggttatcaattgtggaaggcggaatatggtggaagaccaaaattctatcatataagcatgccatcgcagcttatggcaccgccattgcagcttatgacaccgccacagcaggcctcctttcacaaatttcctatgaaggtggggtcaaaaaacgccacgttatagcattatggcagtcctataatggttatttaataacattgatcatctcaaaccaccttatctttacaagtataattgtctttttaatcatttatgtcttttaatctaacctctttcattcctatctttaaattaaattttaataattattaaaagaaatagttcattataaatccaaaatacaatttagatatccaagacatgaactttaatataatttatatattcaatattatttatttactatgaattttaattatacattaaaaaaagttatgttgtgcaaggcaactaaaatacttagatatgactaattaccatctcaacgtagatgaacttccgattcttgtcctccaagagagaagatatcacagaatccagtacgttctgcacacatgcaccctgcaaccagaaatcaccttcaaaattgtgttcatacaatttctaactttgcagccaaaaaaattacagaataaaaaaaaaaagacagacagacccgaatggagttgttggctccaacgtagtactgatccacggtcttgagccacccaacatcgtcgtgggagtgaggtaccaagtgcacgtttaatttgtctgggactatcctctgcgttgtgttgtactctatgtactctgattccgcaacccaaatcgccgccaccaaaacggcgaataccactgccaccgcgttgaccatcattgctgcctctgggttactgaactcgccgattttgctttatattattactattattactgaatgaattgccaactgtggagtgcaaggaaagacataacaaatggtccactccatgataattaaataattaaataatatataatatatatactatatacaaagtaaatcctataattatatctatgttttatatttatatcctatataatatttatttcctataattatatctatttatgtcaccaaacaattcttgcttaatcattacatactgatgtgttttcgtctctttcccctaatgaatgcacgaatcgcattcttgtgtgacagaaaattgtgttaaaggttgacctacatggtgataggatcaacctataaggatcttcgttatggcgcaactggcgctggtagccacagcagaaaaccctgtgaagggtgtggcgctgatggcgccagacccactggaaagtggcgcctggagcgccatgcccacaccaggggcgccaggttggcgctggaagcgccagtttttctggaggttcacgccaggggcgccatgattcccagccagctctggtagcgccagatgtggcgttgggggcgccatacgttctggatgttggcgccaagagcgcaagagtggcgccaggagcgccgcatgtcggtcaggggcagtatttaagggccaaaatacgaaattcttggcattttcttcttccttcttcttccccacgacctgaacctccattggagagcacccaagctttagaaaccttagtttcttgacccaaataccttctttgaaacaccaaacttgtgagaattatatagagagcctttatccttcatcatctttgcttgaaaacccctctaagtgagaatctctttccaagggaagttctaagaactcgagctaggcgaggaattgcggcattttaaggacacccaggctagaaggcgaggtcctgaggcattcctcatcaattttgaggtaagaaattcgagtttctccgattaatttgtagtttggggttttctgtgaatagtgacccatatgagctggggctggaattagcccagggtcctatagagaaacttgtttagaatggtttagtgatgaaggattagctttcagaattcaagttagtggactttaaatcttggctctgtggtttgcttatgtggcttttgtgataagtcactaattggatatatgccatgatagagcctggattatgtttgttctgagcatgagaggctagcggaatggtgccttgattgaggcttagaccgttccagtgatatattgaattacgggctattgtgagccagagctcaggcatgtgttgtactttgagtctgtgatgactcagatgttttgtatgcatccctgatggaccttgaagggtctgtgagtagcctagtaagggcttgacttgattgaaccctaggataggggaattctgatatgatatgtttctgtacttggatgcctgtgaattggttttgacatggatacatgccttgattagggcctgacactgagagtgtcggtggcgggagccacaaaatagggaaagaactgcagagcgaggctttgccaggtaagttcagtgtccctgggatgatttctcatcttgtgtgccacaccacactccgggggagtggtggtcatattcatgatgcatgcatttggttgttgcatcctcataatgatatgtgtgtgcatctgtgcttgttatgcgatataattgtgatagatctattggccaatagatagatatggacctccctaggagttgatggtttcctcctagtatggttggctcatggttgaggtagctccaagggaatttgtttcccacaaaccatggggatagaagttgaggtagctccttctattctcggaggtaccatatatgtgcatccatgcgaagggttagcacccaatgggatggcacaggtgtgaattttcggtcttacactgatttaggtgttgaggtagctccaccatgtttggatgtgtaatatatattgttatgagggccagagggccaagccagtgggccatttgcttgtgattgcctgatgtatgtatgctggagagtgggccagggtgaaggaggttcctccaaggaccctgagcttactgagatgtgtatcgcaccccgtttggggatttatctttacaggtgactcttctggaagaggagagcagtcttagggcaggaggccctagtggagacatgtctgcttggccggtggcagcagagggagcttgaaggctcagttttgttttgtttctgttttgtacccttgataagggctggtgtgtgtacacctgagttatgtatagtttgtataccctcggtgagggcagttattcttttgtatcaccacggtgtggtgaagacaatgatgtatatatttatgtacaaaactattgatgttatgatatgagactttcctcctgagtatattcctgatgtatatgtttatctgcctatgtttaagtatgagaaactggatcagtaggggtgtgtatatctgtcttgtgtgtgttttatgggttgtacttttattccatacataatgaatcaagaaaagagattatttgcttccgctgagttttatattatgtttttattcgcttaactgatattattaatgataacgcaccggaggcctacggggtgttacacaaccgaaaagctttgacatgttaaagtgcatccatgcacactcattaacaaaaggtaaaaccaaaaccaatatattcaatataactaacaaagaaaagctagcaatatgaccaatcgtcgtatgaaggtgatttcaaaagaaaaatagggccatataacaataccaatcaggaaaggatacattccaatcataaaacaataactaccacaaaacaactaggatgtgtgtttcaataaaaaaatccagtgcttatgtgaataagcttcccctgaacaagttgagagttcagcaaagttcccttgaacctatcaaacttgatcaaccactaacaactaatccaaatgtgggtggatttggtcaggggttgtggaagttaaaatcacataataataagccagtataagtaatgcaaaaatccaaatatagtaaaacttgcctacaaataaggtacaatataagtcaataagaatgacacaagtttaatctacttctacctaccatcatgtgaatgagtaagggcatattaagtgttcaaccactgcaattcaaaagctttctatatattcaattcctactctaataaatattttcaacaactcatcttcacaagcatagtccatttctaatcatattaacacatcaaatcatctcttttctctaacaatcacatatattcacaggtttttcccaattttttttcatttctttttaaaaaaaacccaatttttaactgtgcaaagcttgttacggattacaggatccgtatgaactttacggattggataatccgtatgactcatacggattatccaatccgtaatgttcatacggatcctgtaatccgtaacaagggcacggattgaccaatccgtaggtgttccacggtaacaagggcacggattgaccaatccgttacctaatccgtggaacacctacggattggtcaatccgtgcccttgttacggattattggatccgtgacctccatgcccgaccaccagaccatggacgacgattgaccagccttaacatatagagaactcaccagggtgacggcatggactcaagggttcaccaccaatgcaatgtgattgccgacaaagctccaacaacgtccaatggtgtgtcggagaagaaggaaccgaaaacgaagaaggaaccgaatgcgctcagggaagaaggcaaactcaataatgctgcaacagagggattagcacagcaaagtgaatggggtcggggaaaaagaagttggtgccgccggagaagaggagaagaaaatcgaaaacggccaggagagggaagggaagaagaaaagcttttcaaaatattatatttttttttaaattaaaggctatattgggaatttcactatttaaaatgttgtatgagaaattttttatggtgtaggaagctcatcacataaggcacatatgaggcaacaaggaaaagatgaagtagctggagagagaagaggggctgcatggatcccaaggagaccaaagggaccaatcaagggactccatcagagaaaggaagagactccttaggtagtctcactcttccttcatagtctccttctttcttttgttatttcctctcatctcttcctatttttcttctttttattttcgttttcactcttcttttttatttttgtgggttgttatttacttcattaagagaaatgtttgtgatttgttatagttagattcgttggttttgattgtgcttgatttttttctttctctccttctatttctttcttttttttcttttctgttttgagttttccggtcacctctacggtcgccaccgtggccaaccaccgcgtgccgtcaccaccgaccgccctcccaccaccggcctccatggtggtggcctaggaagttgggaaatcatcaaagaggtgaaaaaccctatttcccgcagctttgctgcagctgctgtgcctagacgaaaatatgcatcgggcacaaaaaaatgaaaattgctttttgcaccccttttttgatgagttcacacccctcttattttttaattattattgggcctagcccaaatggaaaaaaaactaatttacttttacacctcatttctgttgggcctgacccactttcaaattaagggacatgcttcatacaccattccattttctcctacaccatttgagcttttcataatacccaaaatgcccttaatgaatcaaaaaatatatataaacgtccagcaaaataaatgagagagaggtgtgagttgttgtccatttcgatccattttttgagcttcgcattgcttggaatcaccattggtgaggtttttggaggtgtacgagctgcagttggacgtttggtgtcgccagaaaggaagcgcggaggttgctgttgaggtaagtggttttttcagtcgtacggattcgataatccgtaaaattctggtgtatgaagtatacggattatacaatccgtacaagccttatggattactcaatccgaatgaactatacggattatataatccgtatagttcattcggattgagtaatccgtaaggcttgtacagattgtataatcagtataggtcgtacggattgaacaatccgtatggcctatacggattatacaatccgtaattgcaatatgtttaaaaattacataaaaatgaaatgtaatttgaaaattaaaagtttaaatataaataatgacatatgtatataaagattgtgattaatatgttttaaatgtaagtaaattttgtgtgtttgtgattaatatttgttgaatgtttttattgttttgtcatataatcacttgaggtgatgatactgattgtgtgttattacgaataattaatgtattgtgtatgacatggattcaattagcattacatcaaatctagtgaataatgaaagaggaatataagctgcttgcattagattgtataatatataagttcaaaattagtttgaaattgaggaattgttacttaagacaaatggcttgtcccaattcagtcaggcttttgtattaaatgtttaatgaatatgatttgtgtgtgggattataatgttagtaaaggttacttaagacaaggtatgttaaattgtttttttttgtcagaatggacagcgatgagtggatgtacgagagtataatggatgaagatatttacatgaatgaagaagacattggagcagactctgctgacgttgaggacaatgactgtttgattgattgttctgcagcgttccaaacaaatgaggtgattatgttgatgacttaaacataaagtatatgaatgtagttaaagttgttaaatgagtatgttggaaacattaaatatgaataattcttttgtgtaggtgtttgaatcgcgtgatgccgtattgaagtgggctcgttttgtggcgtctgagaatggttttgtggctgttatcatgaggagtgacaccaagacagggaaaataggaagaacgtcttttgtcttaattggttgtgaaagaagtggaaagtatagagcatggaaaaaaggtttcacaccagcaacaacaagtagtagaaaatgcgagtgtccttttaagctgcgggctaaaccaatcgcacgaagtgaagggtggatggtgaaggtaatatgtggtaatcataatcatgcactggccaactcattttgtggacacctatatgctggtcaaatgactgatgaggagaaaaacattgttgctgatatgactagggtgatggtgaagcccaaaaatattctgctaacattgaaggagcataatgcagataatgtaacaagtttgaaacaaatttacaatgcaagatatgcatatcggacgcgtacaaaaggtgctaatactaaaatgcaacagctaatgaagcttcttgagcgtgacatgtatatacattggcattgattgaaggatgaaaatgttgtgcgtgacttgttttgggcacatccggatgcagtgcaattgagcaatgcatatcatatggtgttcttgatagacagcacttacaaaacaaacaggtataggctacctttgcttgacatagttggtgtcacaccaaccgggttgacattctctgctgcatttgcatatttagaggcagaacgtacgaacaatgttgtgtgggcccttgaacggtttagagggatttttttgaagagggaatttttccctaaggtcattgttacagacaaagatttagcattgatgagtgcagtcgagaccgtttttccagatgcaaccaatttattgtgcaggtttcacattgacaagaatgtgaaggcgaaatgcaaaacttatattcgacagcagaatgcatgggattacgtcatggaagcatggggaagtgttgtcgactgtaataaggaaaatgaatttgatgattatgttatgaagtttgaggttgcatgtgctccgtggccgacgttcgttgattatgttaaggacacctggttgactcctcacaaagaaaaatttgtgacagcttggacaaacaaagtaatgcattttgggaacacaacaacaaacaggtaacatttcgtgtctttatttttcattccaacatgtttaaagtcttcacaattaattgataatattgtaaattgcagggttgagtctgcccattggaccttgaagaggttactgcagaatagtcttggtgatttatgcacggtctgggatgcaatgaacaatatgatatccctgcaacatactgaaatcaaggcatctttggaaagaagtacacatatggttggacatgtttttaaagtgacgttatacaatagactcattggcatggtgtccaggtatgcgttaaatcaaattgctgctgagtatgagagggtgtattatgcgagagaaaacccatctcgttgtggatgtgtgcttagaacagtgtatggtttgccttgtgcatatgagttatataagtatgttcttgcaagcattccaattaacaacgttcatgtgttttggcggagattaaatttttcggataatggtgaagatgaaaaccaagttacaaaaataacactaaagtcaaagcttaaagaaatagcgtttcctgataagaattccatgtgccctccacctgctaaggtcaaaactaaaggtgctcaaaagaaaaacatctccaagcacgaacgttcgacaagaagggacccgtcttacttcgagtatgtcgatgagttacattctgtgcagaacagttgctctacacccatacagtgcagctcctcatcggatgttctaaataggaaccggatggttcctatgctcgatcaatttcatccatttatgcacaagtttattgttgacattactgatgtcaaagctgatggaaattgcggatatcgagttattgcttccttattgggttacggtgaagaggcttggtcattagtgcgtaatcatctccttaaggaacttgcacaatggactgatcaatacattgcgttgtttggtgggacacataggtttgaaatgttaaagcggtccctattagttgatggattgtcgaaggtgtacatttgttttttattttatttaacattatttgccaaactgttatatttggaatgcatgttatattaactcatgatttacaggtaacgatggagaagtggatgaatatcacagacatgggtcatgtcattgcatcaagatataacatcatcctagtatccctgtcacgacagcaaagtatgaccttttttcctcttaggggccaacctcctacatatccacgtgttcatcgagttttgtgcattggccatgtgtttggcaaccattttgttaaggtaacacacacaatactttaattccaaagtatggttaaagtttaatttatgggcttcatgatttttgtaacaatttatttgaatcaggttactctgaccgacagttgtccattaccgttgacggcatgtttgtgggctagtcactgtaccaccgaagctcagcagtggccttaccattacgtagatagaatgcaattgtatagcaaatcgattacgttacgcaagaatatgttgatttgggaaatgtttaaacactcagttgacaattgaaatgtatgcgtttacttctttaatgcatgtcaatcagtaaaaacatgttgtgtgtcttaagtaagtaaagaacgaagtaagtgtctgatcatgaactatactttaatatcgatcaaaatatatatgcatcaatgtccaataaatgactgctaataactcatctgtcaatccaggtaaaatgtatacaactcaaagcctatgctactcaaatatatgtcatatggaataatcaatgtacaacaaataaatagatcaaagcatatgctaatcaagatgcctcctctgtggtcggaaacttcgtcgacctcgggtgtagacaaggccatcctcagtcacgcctcgaacatgctgaagcagctgctgtatcatgctccatgcatctgtgccttctgtcaccatcatcatgtcaagcatatgctggaggccctctgcaacacgttggcacgcatgctgcaaataaacaatacaatgtggttaagaaattgaacatctgaaatggaacaataaatacttatcaaataaacaataaataccaaggcatgaagtggtctctgctcatgtccaccactgggtggctcagaagaacgaccatgtccatccatggctggatcagacgaaggaccaggtccatcaaagggtgcatcagaaggaccatgggaatgggtgtgggtcggtgcacgctgaggcagtggtggaatctgggaagtcgcctcctcatacgcagatgaagtcatgaatggatgtgaaatgcggaagaaccaccccatgtatgcagcaccatagtgacctggataatcaaccaagtctccggtgtcgacaatgtgctctgcaaagtgaacccacctgtcttcaatggcctccacagaaggaacatctgccacaggctggggtggaatatgctgaacatcaccaaactggcgaagcaccctctcaggtagatacctagtgacctgaggaccccatctgaggaaaccggagaataaactgatggactgaaactccctgtgcggtcgatggtcaacgtacggtgtccaacaaatatcagacggtgtcaacctatctatacgtctacgataggtggccactcgtaaggccttcgcactcgtccatctgcaggatcgaggctgcctctcgtcgtagtgctggtcagcaggaacattttctatcgtaggaaaatgctcgtatatccaacactaaaaatttaaaagcatgcaaatcagcaaataatggaaacaaaagacatataaaatatggttttctgattatacacatcaaacgatattagtacctgtaaaagcgtgatgtatcctgtaagatgcttcccgtgatgctgacatgcgtagctcaagttctgatgcatgtgtatcagagcagccgcaccccaggcgaatcccgcagatcggtcgaagtctcgaaaggcctccaagaataccacggctatatgtgtggcactcttgttggcgaacaatgtgcagccaacaagatgaagtagatatgccctggcggccaaaatccactgcctcgcctcgaccttcgcgtaatatgtgtcctggagccatgatagtctgacataaggcccatgacactgagatgtctctgctgcagcctcctccacattgacatcaagtaggtccaccagcaatgtcatcgcctcgcccacctccaggtgctcgaacgagtcgaatgtccccataacagggagatgcagcaatgatgacacgtcatcaagtgtcaatgtcatctcgcccacaggcaggtgaaacgaacatgtctcagggtgccaccgctcgacaaatgcggatagcaaccccctatcacctgtctccactgagcatccaatcaatggactgaggccagtggcagccacaaagccctctatctcaggtacaggcttcccaaatttaatgaccttacgaccatgggaagcaagcttcaactttgcacaatcctgcatttaacatattatttaaggtaaaacattcatgaataatcaaatgtatgacgacattcgactatgtgattcaacatgtcaatacctttccggcccagacgcgtacggccacatgatcgcgaaacccggtcagcaaagatgaatcctttggccctccaaggaaagattcagacactatatcctccctgaccggatcaccctcctaagtgaccggatcaaccgtctccacatgtggttcctgcacgataggaacatcgtcaatagcaacacccgccctacgacgacgtgcagatgcagtgggcctacgccgctcaggggcatcatgtcgatgacctctcccatgtgtaatatcggaatcatcaggacggtgtccaacaggccgacgcactcctcctctcgtcctagccatgtgtaatctacatccgcatagtcactcagtgatcaaagaatagttgtagtcgtaagtgacatggtaaaaactcatttcaagatgtttgtttcctatctttcaacggaaacatgaactatcatgacccttgggcccttgggtttaacccctatatgacaatcttaatgagcttccaacggaaacatgaactaatgagggttctactaaggtcaaacaaaacaaacttagtctcactagtaaacaatggacagaccacaactaactaagagcatcaatcttatatttttttagaatgctcaaaatttacatttagaatgtcaacacaaatacattctaacagggttccaatacaatcagcaaaaacattatcataggagcgatctatgtcagctaactgcaattacattatcataggagcacatgttacacatagtgatgttaatcggaagtatcacacaagtcgaactctaattaaaaccaaccaataaccatattccatttcaaatcatatgtacacttcaaattatctattttcactaacaagcacatatatattggctattttccttaattatttttcatttttttcctcaaaaatgcttttttttttttgcaaattgagactttacggattgacggatccgtatcccctttacggattgtttaatccgtatgaactatacggattatacaatccgtaagggggatacgaatccggcaatccgcaggctatgtagggattaggtgatccgtgaagggatcacggattaggtaatccgtaagaagattatggattggttaatccgtaacaactacacggattacacaatccgtaacctgcttacggattacctaatccgtgatcccttcacggatcacctaatccgtgcatagcctacggattgtcggatccgtatcccccttacggatgtccaggccaccatttccgccattgtcgaccaccacacaccaccaacgacagccagtaaccacccaaaacccagcacacacccacatgacacgcacaaaagacttgaaaacactaatgcaccaattaaaaacgaacgaacttacctcggactgacctcacaatgtcgagccgaccaaacggagaagacgatgtagcaacggtcaccacgagctgttcaacacttccaatgcaactggtatcaacaccttctgcaatgccggcgcagggagcttgaagggcgcagggaatggtgcgtgtacggagaggaaatggtgtggcaagggaacggactaaaatttgaaaattagaaggggaaagtgggaagggaaataaagggattgcactgtttaaaaatggtgtatcagaaaaaccaatggtgcaagaagctcacccctcaaattaaacatgaaatgctatttacaaccacctttccataacagcacccatttccctattgggccttgcccattttgaacaaaaggtgtattgctgtttgcactcattcgtttcataactgcaccccgtttttaagttgggcttggcccactttggggcagtacatataatgctatatacacacccatattcataactgcacacccctttatattactgtttgcactacctttttcataattacgcacccctcagcagttgggcgtagcccactttggggtagtacatataatgctgtttacatcccccatattcataaatgcaccattatctggtgaccaggcccattttgtaattaaacaatttctgccggttgtatcccctgcccttactatatgcacctctaattactaagtgtacccccacttctattctatcccttttctatttccactttatttatttgatcacgtaatgtttagtacgcgcttatgcttcatgcactccatgctgggtctccgactcgcttggtagtgtttcaataacacctggatagatttgtgaatatcatgttgggtctccgacttgcttgatttcatagagtttaccacaaattcaaaatcttgtctaaaacaacaaaaaatatccaaatgaaggattactcaattctcctttttctcaaaaattacatttttacttgagatcgcttcaaggtccaatcccttaagcaattctcaccgtttttttcttcaaatttcatgtcgtttcaaggttcaacgccttagcggctctttttcacgaaattaaaataaatctttcaaaaaaagataaaatcaaatcaacccaatcaagctttttcaaacaaaaaactacgtaagtctgatttcctcattgcacttggggatacgtaggagcgagggcaaactccttgtcgacctaaaaaacaaaaaaaatatatataaaatcttcttttctaaaattgcaaaaaaaataaatatatatatatatatatatatttctttttcaaataaacaaaaataaaacaagcatagtcatgttcataaggaaaaaacaaataattaaaaagtcattttatttttaacacactcgattaaaggctgtcgtcttcgtgacggacgagtggggtgctaacacctttcccgtgcgtaaacgactcccttatcctttttctctaagatcgtagaccatgccttatcttttggtttttccgacattttccttaaataaacgttggtgacgactcccatctagtttttccatttttgggaaaccataattcttttcttttttgggataggttgcgacaatatgaaatgtattttaggaaataattcaatttaaaatgtgaataatcaaaatgaacttttttttacataacaatcaaaatgaattttaagaatttaagtatggagattgctgtaaaaaacatggagttaaaaatataatgtttttcaaatttatcacaacaaaattgtcagcaccaaaaaaaaatgaatagaactttatgataaataaatgaatgaaattatattttttactcattaattgtataaatatcatcattattataaatttataaatctaataataagtttgtatgacatgtgttgaattcacaaaattacattatcttataagatttggactttggactacacttataaactacgtagtgatttagataacacatgtttcttaaatatttagttcgattataggtaacgtttataattattatgatggttaaattcgtccttttataaacctaaaatttaaatttttataatataataattttggaattaatgagatttaaaaatgtaacttttactatgtacatttgaattttaaataattttttacaaaattaaatttcatgttatttaatctttgtaaataatttttggtttgctccatcgcaaatcatttatttagagcaatagttcatgttaaaaacttatctagaaaagtatggttaaaacagattttatttacggcaatatcttaattgtagtttcatggactaaaataattgtgatgagaagttgtttccataaacaactgctatgtggatcttgatgttagataagctaagaaaagaggttcacatcaaattgtccatgtaacatttttgacttctcgcagttctcacactactacatgttacgtggtagcacttcactcaacattcttttagtcagaaccctcggtaggtatcccttttcaagacctcgaaaattagctctgtatgcttctaagattaatgattgaccccacaaaccaacacaaggcagagctaaccctccaatatgtaatttgttagttgtttaagagcttcatcctacatacagtttaatgccactaaactggtcctgcccccaaaatatcttgacataaactagttcgttattgagggattccaattccctgctatgctagaagcttaaggactgaagaagtttcttgagttaaacggtactttctaccctgagttggtcaaaatgttctacacttgtgtcaaagctagcatggatggtactctttgttcccaagtaaatagagttgctatggagattaatgcagaagtctggaatgttgttgttgagatctcctatgaaggagtcagataatttgatgaagagatagaaggatacaacaagatagacacctactgagaaatgttgcaggatcctcaatcagattagggactggaagcatgactggtgaagacacctaggtccactaaccatgcttaagtaacagatgaagaccttcaattggtgtatgggatgaagacagcaacacaactcaactggattctcatcattgaggagataatgatgaaatccaaaaggttaatcagttatcaattcccctgtgttgttttagtctctagatttattgactattttggggtggatgtgtccaatgagattgtggacaacaccacaaacagcctcatcacaatcaagcacctcaacaagttaggcttaatgaagaccccgaatgggtggttaatggctggagaacaagctccacaagagggtgctaatgaaggaagaggatgttgaagttggtcctgctcaacaacaatggacaccttttgaatccctaatgattcaaaagatggatgatataccgactctgcatcatgagcatagagctgaaacaaattcctccatggaagaaattacctctaggctagagaacatagagactaggatgactctcaaagattatgacaatctctagtttagttgatgtaacttcttgcttgtggctatggtttttatgctttcttattttcagttgttatttttgttgctttcttattttatgttttcttgtactgcactttatgattaatgaataaaactttgtttttttggttgtttccatcctccttgcttatcttgttctcactagtatattttgtctgtaataagtcaaaaggggtaaaaatgaacatatagaaaaacaggataaaggtgcaattaaattgttcattgctcttatatgaacttaatataaaattacctaagatagggggagcaatataatgaatgtacactgcttatgaaaagtatacttgacacttgttcttggcaaaaagcggaattgatttcagatttcaagtataaagctcctagcattcatcccttaaaaagtacatgaaggctaaatatgttcaatttgaaataatgtattccatttatattggtcaaatccaatattaaaaaattattattattattttactaaagtttggcataagccaaaaaggggagcttgttagatacagggggaacttgaagaagatcaagatgttgaggctatttgtctcagacatattttagctttttacatgtcattcaattgaagacatatgtaatttgttagttgtttaagaacttcatcctatgatcccttaaattgcataaacatcattcattgacatgcatacatgatttttatcaagttacatgatttctaaaaaagcttaaggttttcatgtttgcataagatgtcaagtactcatggttaagttttggaaaaaaccactttttacactgacttaatcgattaccagaatatggtaatctgttacttaagccaaaaagaactaattaatcgattacacggtaatggtaatcgattaaacagtacaaaacacaaaaaagtcttactgtgttaatcgattatcatctaatcgtaatcaattacattagcatgtttttgaagctagactgtctgtggtaatcaattacatagcggttgtatcttttccagaaagaacaaagaacactttaatcgattaaatatgatattaaatgattacttaagtgaaaataatcgattacatggatgatttaatggattacattcagttaaaacaattttctataaaaaaaattgttgggtcttttgatttgaacaaaatatcataatttgaaattttctgttgtcaaaagccttctgaatttgagagaagatacactgagtaacaaagctcttgtcccataattcaagagcatgcatcattgatagaattctttttggacaagatttcaaaggagtttcttggagagcttggtctgaaacttgctttctttcaacttgattccagattgctaaacacatgcattttcattctttggatcataaggttgtatctctcatctaaactctagttgtaattcgttttgacatttcaattgttaattgttattacaaaaggtttctttaagcttgtccagagtagggttctctagagggaagagtagagaaggatttctctatgttttgatcattagaagtctaaagggtgtttagatttcagttctttatctagggttgataaagagtgatcttttgtaaacttgtaaagaatagatttttgttaatagaggaactctaatcaaggtttggttagaagaaactagatgtagcttctcttgttgaggagtgaacctgtatagttcttggtattcttttaatctcttattgctttcattgattgctaatcttttggttaatcttttcaagatcaatagataaacattttctgctattgctttctatgaagggtaagccttgattaactgaaagtttgatttaaaagggtgtccttgtgatacgatccaaaatcctctgcttgtttcaaagaaatctttaaagaccctattttaaccaattcaccccctcttggttaattgtgtgtgttcatattattttcaattactactccaaatcaagcacacttaactattaagttcttaagagataggctaccaaaaagtatatgcatattgttggtataggtagtaccaattaattcctttaagtgatccttagttatacaatcacatatgtgcacagccgcctctagatccctttcattttggtgtgagtcgatcagggtgttacaacccacatttactgactaatatacattacatttttatctaacataaatgaaggaagaaaaactaaattaacaaaactctaactaactgaaatcacaattaactaattaacttaactaccaaatgactaaagcgcctacgaatgtgagaggttgtgcatcacacatcttaacaagtaaagatcccagctaaaacaatctcagagagaaaaaataaaagttgaattactaagtcaattacaaatgtgagaatacaactatttacatctcacaaatactctaactaactgagtccactcatactgactaactaattgtttacaataaagacataactacagtaagtatagattcaaatccatacttgagcgacgtcttcttgagcatatggattcaaatccatatgtttacacccctcgcatgtttctaacagtcgagggcatataaaatttgccaatgaggtcatgatattaaaaccttcatttggaagaaaattaaattctcaaggattggcacccatccatgttgctctagtaaataaccgtaaagaaattatatgtcttctactttgtagacatagacaaagaacttgcccgagcaaaaaggaaggcccttgcatttagaaagtccaaagggtggaaaaaaattgattaagtttttggaggcttgtgtgccctaacttcatcaatgatgtgacaagtacaaatgagactacgttgcatattgctcttaaacatcaaatgtcaaaggttgttaaagtcttgattggatggttcgtacacacaggactttgtactcaacaatcctcaattggaagagcaatgttgtgaacaacactttacacgtttcagcctacaaacagtgtcgatgataacctaatttgctaatataggtatttgtcttattcaatttgctctttacgaatgcggcaaatacctatattaggaaaattagactagtaccagcaaacaaatgagtttgcaatgcgtctatgtcaaacacaatgcgcaactcatttttaatattggccaatcttgctatgacatccagctatcatgcattcttgagtctccaacaaagacttcattagactaatgccgacattcaattaacttttcattccattgtgaattttttgtgctttgcatgcacaacttctctactcatgtcaaccatatcttgattttacacagacaattgcattgttgacaaatacatggattgattttgatgtcaagaatatggaggatcaaacagtttctatgtagcaggaaacgatgtaaggagcaaattaaatgtcgcagatacctataataggaaaattaggttgtcatcgacattttttgatgctccatattcttgacatcaaaataaatccatgtctttgtcaacaaatgcaattgtttatgtaaaatcaagagatggttgaaaatatgacataacaattttgtggaatcaacaataaatttaaatatagacaactagattagaagatacatctaagtaattgttgtaggttgaaacatgtaaagtgatgttgtcagcattgtcattcctgttgagtataaagtgtgtttgtgtggagccatccactcaagactttaacaacctccaacatttgatgtttaagagcaatttgcaatgcagtctcgtttgtaattgtcacatcattgatggagtcagggtgagcctctaaaatctttgtcaaaagctcattttctcccttttgacttgctaaatgcaagagactgaggtcacccctctcttttgttcaaacaagttttttgtctgtctaaaagtagatgatcattttttcacgcgtcttaaaaagtttattggatcctttatcttattttttgtgatctaatttgttcatttatcttattttttgttcaatttgggtctttaatctatctaaaattgacttcattaatcatttaaaagtaaatttttttgttcaattttctctttttcctccactttatttttaacaaaaaaacaagtttagatgattaacaactttaatcttaaatgaatcgaaagactatactgaaaaaaaaaaaacaaacaaataacctgtaacaccccgtgtatacccggtgtattatcattatgattaattagattagcgcttaaaaacactttaattaaacctttttatatagcggaagcataaaatcaaaaccatatttctcgataacattatgtatggaatcacaacccacataagcatcaacaagcccctgcttaaccagatcatacaaaccaaccataggaagaaacataaatatctcaaagatatacacaggaggaaacataacagaacaaaaccagatatatacagcatcaattatctggcacccgaggtgcacatacatgagatacaagcaaccgagtgctatctgatccctaggatccttcctcacacgaggacatacatataagcaacataaactacatgtacaacacatgtcttccctctacaggggtacaaaacataacaagatgctgagccgagctccaagcatacaaaacaccacaataagctgagccgagctccaagcgtacaaaacacatcaatagctgagccgagctccaagctatcctctgctgcccgaggccgagcaggtaccgtctctactggggcctcccgccctgagactgctcctctctaccagaagcatcacctgaaaaagcataagccccacacggggtgagataaacatctcagtaagctcagggtccttggaggcatctcctccaccctggctcactcaccatgacacaaatcatcagggtgtcacaaccatctgggccatcccggccactcacaacaatacaaacaagctatccaagctctatgtacggcggaccgagtcaaacgccgacctcagtgtgaaaccggaattcacacccgtgtcatcccattgggtgctaacccttcgcatggacgcacgtatatggtacctccgagcctaggcaatcaaccgcgacgggacacacctagctcttggtcttagggaatctccgcatcccgggatcgagtcaaccatgagcataccaaactaggaggtgcgcttccctcctagggaggtccatatatatcttactggccagaagatctaacatcaggcttaatacaatctcaagcacagatacaagcatgtatagtatgagtatgcaacatccacataatgcatgagtcatgaatgtaaccactactcccacggagtatggtggagcacaagcaagtgggaaacatccccaagggtccagaacttacctggcaaagccgagctctgcagttcttcccgtgctctgtggcccacgccactgacacccgtggtgtcacgccctatcaaggcacacacataacatgtatcaacatacaagccacacaaggcacaagcaatacggttcacaaccgctcacaatgaaaggactcacaatcctttcccaaccatcaaggtcatctatcctatggttcaacaagacttggcattcacaagccatcaccacaatagcctctcaaggccattcaaaccacaattcaaggccctagcatgttcacaaatggctaagcaactcagcccaacaacaacacatgcctcaaaaagagccaagaattcaacattcaccaaactcacatatgagagctaatcctacatcctcacaacattctaagcacatgctttaacatgacccaaggctaaaactagctctatcaaaagtgggtcactattcaccctaaaccccaactcacaaatcaagaggtgaatcttgagcttcttacctcaaatgtcgcaaggaagacccccggacgacttcccctagcttgggtactcacgaatcgtcgccgttcctcgctgagctcgagttccacgaacttcccttgagaaagggattcttacaatgagtgggtttgaggggaaagaaaggatggattcaagctctagaagtgatttccatcacaaaacaagcttaagggatggattttggtgagatatggtgaaggaatggagcttgggtgctcaacaatggaggtgggggtctgagaaggaagaagggagaggtttggggctcaaaatcgcgaaaatcagctttatatagtgggtctgcccgagctgcggcgctgatcgcgccactctggcgctgatcgcgccagctgcagacatccacggcgccatccgcgccagccccgcgccaagagcgccggcccccagaacctctggtgccaagagcgccacatcccgcgccaagagcgccaactcccagagcctcccatgccgtcagcgccaactccggcgcccagaacgtcaacctccagaggttcccgtgccacaggcgccaactcccgcgccaggagcgccaacctctagaacttcccgcgccaaccgcgccacacacagcgccaagcgcgccagttgggaaacacaacatggtctagcgccaccaacgccaccttggcgcccaaagcgccaaccatcagagaccatggcgctgggagcgccgctcccgcgccatcagcgccagacaccagaacttgtggcgccatccgcgccaccctggcaccaagagcgccacactccagaactgtggcgccattagcgtcgacctggcgctattagcgccgcaattatgcagaagaattctgcataaggttttctgcagaatcctgtgctaggcgcctcccgattcgcgtcatacgcgcccaaactcgcgccgaacgcgctagaacttggggttatcacataaccagaataaaattcttgcaaaataaaggtctaaattgaactaaaaattaaaaaaatgacaaattttaactttttaatgataaaagactaaacttaaaaaaaaaattaaataggttatttcaccttatttaaaatgtttttttagagagtacatcgccacaaattgctagtataaactattggacttacccacaagcttcgtttgaataaaaggcttcttaacaccaataataccctccctcaccctcaccctcaccctttgcctatataaataaaacaattctgtgtacggttccgtcagccactgcacccaacggcatcatggaagacagtttcagagtgcgagcagagagagcctttggttctcttccaatccccgcttcttcttccctcaactcgctctggtctctcacccaagacgaaatccaaaacaccccttccaatcgcacccccaaacccaaaaccaaaactaaacccgaaccccaaccctattcttcttccagttcccgggttcagctcgagaaggacctcaatgaattcgacgacgacgaagaagaagagccacgtggaccctctaaaccccctgattacgatgatgaacagtggcagattagggctggtattggccgagattgcaccctcgattacgaggtatgtaactttcatccctcttttattctcccccggccccccccccccccaaataatatttttatatatttattatgaactaacatcgtttaattataattttaaacccatttcgctcaaccaattagatgaccgaaattgatttcttttttcatttataatttagaactgcaatggaatcaattatttttctttaaattttgcatcttttttttttttttgtgtagaaaaattgggtagcaagaggaggatgtgaatgtattgaagaagtctattatgacggtgatggactaagattatatatttaaatttcaaatacaacaaaacatgtgaattaattggagcgggattttcaattgggacgttgttatttaagtttaataagttgttttatattattattattatttgtgtgagctccaatcaagaatttaacttgagagtattattttttttttcatttttgtgattcttgttgtgactaattgttactaatttttcatcttcaaagttgggattagtaaagaaaattgattgaatctcactttatgcaggaagaggaggatcaatatgacaagcaggctataggcaaagagaactcgggtgatcgcttgtatatgaaggatataaatgacgatggagttgagattagttcttgcaatgttttccccacttcgttcagagattttgtgagagacccgcgtgcaaatcatttggctgctaggattaggctgaagcaggatgacgaagcagcagctaaaaaaattgatgctctgcatgtctctgagaaatctgcaccagacattggtagtggtagtgttggtgatgctgttaacccgaagtcaatcttgagaagtaaggataatcctttggagcccaggccgcagaaacgtgttcggtttgattctgaatgtgacgatagaggtaatgatgatgatgatgttgatgggcatgaaggaaccagggatgttcgcatgaagacctcttcaatggaagatgctacagcttcggatcagttgtcaaagtcgcaagaatttgattcagcagttccagattacattcgtaatccttcaagatacacgcgttactcctttgatgattctccaagtgacatggatgacaaatcaaataaggaagcatgcatgagcttcctttcacagttgaaggggtcaaatgctgccaagggaactggatctctagcagatgaagctttggaagatcttccatcggtaacctttatatcaaagaagaaatctggtgatgccaatatgtgcgacagtgaaacggtgtcaaagccaaagcttgatgctggcatggaggccatgaatagaagagccttcgctgttggcatagctgctggtgactctgaaaacagtgacgcttgtgcaatggaggaagatgaaccagaagttgaagacgataaaaagagctcgcggaagttaaaccgccagtacaggaagaaagctcaggaggagcctgtgtaatggcgtagttagttcctagacttgcataatttgacattatcagactttacccttttccccctttgtttccctcagactagtgcgggatttcgtaaatttgtgggacgacatcatgtgccaagatttgcctatggccaagttcattagtttctagaagtagaactgctgtatgtataagcttcaactcaagcataatgatcagagctaagataagatgtgttaaaaatgtatttttctcaaagtatcaaatagtgaacagttggccagttgcccataatagcagttttcacttggtttatatttcaaagcgtttaattctctctttgaatataaatatgtgaaatgtagtccataattatttttccacaaacttaacattatgaaatattctctctttttcctaatagttatcgtgtaagaaaaaaaataaattttataataattattattttaactttttaatgtaatattaattattttttacttatattttttattaattatgagtaacaatctaaaaataattaataatgaaaagattaatattgtaaagttattattttcttttatttatttattatttttctttattacaatagtaatagaaaggagggagcaagtcggtcaagtataatttaaaccacatgatatattattattataataagtagttataataagcggtccagattctttattgattatcggttgagtttgttttgttcgattaacataattttttttcttttctcccacttaactcccctctatcggagacggttgcgtctcctcttcttcatcactggaagtagctcctccaccccttcttcatctccttttttcatgcattatatgctcaagattcatgtactcaaaataaaaataaactattataaaaaaaagccaccaaaaagaacaacattgaaaacaattttaatccaagaaaaaatggtgaagtttggtgtgactgaaaacaattttaatccaagaaaaaatggtgaagtttggtgtggtggccattttttgctactgatttcttcatgtgcaatccctcttagtgactactgatttttaatattttgctactgagttataatattctttttcattttttctaaaaaaatgagaacgaaatgaacgcggcgccgttccaaatgcttctcactctccctctagtgttagaattcacatgcgttaaatataccaaattaagaattgtccatgaactgcttgatagaatgacaaaatgaattggaatttctgaaattttgaagatgttgtgcatatgtgattgttgggcttaacttgcgtatggtagcagcgataagaatagatatgtccaccagagggagagcgaagcggtagcaagcagcacggcggggggagagggcagacagagagcgatgtgttgggaggaacgcccttctctaccaacgaacagagagtcacaccagactcaacactcaaacaatcaaaatagaataatgcggaaacgtgaacgatcaaacgcgagaaagaacaggagagaagaacacaatcaaaataactttacgtgggagaaaaccttcttcaacacgaagaggaaaacccacgggacctagtccagaaacaatccactattatcaataatggttacaaacaacctcaacagcctttcgctgagacactctcctcaccaacaatggcaacacactctcaacgagggttgctcactcaacctctcagagacactcacagaagaagctctcttttctctctgcactcaaaacgagaattctctccaccctctagtttctgaattctaccgcctccatctataaatgtcgtatttatagagaggaattaggtttagggatttcaacaccctaaaatggaataggccagggtcagccctcgggaattgggcccaagtcaacaaatcatttttcaacacattgggatttgaaccaaacattaaaaacggaaatatccaacatggtgcaagaggatagatgaagagaaaggatgaaccatgaaggtgtgatggccatggtggacagtgaaggtgaaggtgtggtggccatggtgaggaagtttgggtggccacagtgaaagtgcggtggccatagtgctgtcatccgagaaagaatgagaaaagaaagatgaaaacataaaaaattattaaaaatatttttgtttaatttatatttttttcttccgatttcgaacctgctatagcctgtcaaaattctgctacaccggtgagggagggaaaaaaatactacaccttagaatctgccgagcaagtcttttctctaaatatttaaatcttgacccttctcttttctaactttaagtgtagtccttgtaggtaaactcccttcattgttaacgtgaagaaactcctaacaacctcttttgcaaatatgctcgctcaattctaccgttaaattcacttttgtgcgcagcacgagattagtctctgaaggttcaagtggaacattggtactttcagtgttatctatgacgttgggagataccatgaaaatgatttgaattaagcaaggaaaatgtccctctacaacatgttagatggtaagttataccgacgagttcatcaccacttttttaagtgtttcgttcccttaaattcataatacatgcttgtttctgaaagttagcagcaaacaaaataagtaatattatgctttatcaaatcctagatgacaaaagttggtgaaagacattatgcaacatttattataccaacgttcaaattacaatgaaaagaataggggagctttaacagattataacatactctacaattctctataaagccttaaaggaactaatgcaaataataattttttgtttgaattgtagtgacatcattctatgtgctttcttgggaacgtgcttcatacaccatttctttttctcatacaccatttggtattttcataatacccaaaatggccttaatgaaagaaagtaatatataaacattaagtaaagcaaacgggagaaagctctgagctgctgtagttttggatccattgtttgagcttgtagcattgcttggaatcgccatttgtgaggtttttggaggtatgcgagctgtagttggaggtctggggtcgccggagaggaagcgcggaggttgcagttgaggtgagtggttttttctgcagtatggattcgataatccgtagagtaatggtgcgtggacgtacggattacgcaatcctataggtcacacggattgcgtaatccgtatgacctatacggattaaccaatccgtgtagctcatacggattgcgtaatccgtatagaaaaaaaggtttaaaaattaagtaaaaaagaaatttaatttcaaaataatagcttcaaatataaataaggacattttaattataaaaggtaattcatacaagatagatggagacaaacatcagaaaaatgttattatttaccgtgtatgtgtgtgttttcacatggtatgttaagttgtattttattttgttagaatggacgacgatgagtggatgtacgagagtataatggatgaagatatttacatgaatgaagacattggagcagaccctgctgacgttgaggacaatgactgttttattgattgttctgcagcattccaaacaaatgaggtgattatgttaatgacttaaacataaagaataggaatgtagttaaagttgttgaatgagtatgtttgaaacattacatatgaattattcttttgtgtaggtgtttgaatcgcgtgatgtcgtattgaagtgggctcgttctgtggcgtctgagaatggttttgtggctgttatcatgaggagtgacaccaagacaggaaaaataggaagaacgtcatttgtcttaattggttgtgaaagaagtggaaggtatagagcatggaaaaaaggtttcacaccagcaaccacaagtagtagaaaatgcgagtgtccttttaagctgcgggctaaaccaatcgcgcgaaatgaagggtggatggtgaaggtaatatgtggtaatcataatcatgcattggccaactcattttgtgcacacccatatgctggtcgaatgactcatgaggagaaaaacattgttattgatatgactagggtgatggtgaagcccaaaaatattttgctaaccttgaaggagtacaatgcagataacgtaacaagtttgaaacaaatttacaatgcaagatatgcataccggacgcgtacaagagacgctaatactgaaatgcaacagctaatgaagcttcttgagcgtgacatgtatgtccattggcattgagtgaaggatgaaaatgttgttcgtgacttgttttgggcacatccggatgcaatacaattgagcaatgcatatcatatggtgttcttgatagacagcacttacaaaacaaacaggtataggctacctttgcttgacattgttggtgtcacacctactgggatgacattcagtgctgcatttgcatatttagaggcggaacgtacgaacaatgtggtgtgggcccttgaacggtttagagggatttttcttaaaagtgaatttttccctaaggtaattgttacagacagagatttagcattgatgagtgcagtggaaaccgtttttccagaggcaaccaatttattgtgcaggtttcacattgagaagaatgtgaaggcgaaatgcaaaacttatatccgacagcagaatgcatgggattatgtcatggaagcatggggaagtgttgtcgactgtgctaaggaaaatgaatttgatgattatgttatgaagtttgaacaatatgataaccctgcaacatactgaaatcaaggcatctttggaaagaagtacacatatggttggacatgtttttaaagtgacgttatacaagagactcattggcatggtgtccaggtatgcgttaaatcaaattgctgctgagtatgagcgggtgcattatgcgggaaaaaacccatctcgttgtggatgtgtgcttagaacagcgtatggtttgccttgtgcatgtgagttatataagtatgttcttgcaagcattccaattaacagcgttcgtgtgttttggcggagattaaacttttcggataatggtgaagatgaaaaccaagttaccataacagatgagatggaagccatatctaatcgttttgataagcttgatttgtgtgaaaaaataacactaaagtcaaagcttaaagaaatagcgtttcctgataagaattccatgtgccctccagctgctaaggtcaaaactaaaggtgctcaaaagaaaaacatctccaagcacgaacgttttacaagaagggacccgtcttacttctagtatgccgatgagttacattctatgcagaacagttgctctactctcatacagtgcaactcctcatctgatgttctaataaggaaccggatggttcctatgctcgatcaatttcatccatttatgcacaaatttattgttgacattactgatgtcaaagctgatggaaattgcggatatcgagttattgcttccttattaggttacggtgaagaggcttggtcattagtgcgcaatcatctccttaaggaacttgcacaatggaccgatcaatacattgcgttgtttggtgggatacataggtttgaaatgttaaagcggtccctattagttgatgggttgtccaaggtaaaaattcgtttttattttatttaacattatttgccaatctgttatattatccatgcatgttttattaaacaatgatgtgcaggtaacgatggagaagtggatggatatcacagacatggggcatgtcattgcatcaaggtataacgttatcctagtatccctgtcacgacagcaaagtatgaccttttttcctttgaggggccaacctcctacagatccacgggttcatcgagttttgtgcattgggcatgtgtttggaaaccattttgttaaggtaagacacatcctaattaattcggatgcatgcttcaaatttaatttatcagattgatgatttgtgtaacaatttatttcaaataggtaactctggccgacaattgtccattaccgttgactgcatgtttgtggcctagtcattgtacaaccgaagctcagcagtggccttactattacgttgattgaatgcagttgtatacgaaatcgatgaagttatgcacaaaatatgttgatttgggaaatgtttagacactcagttgacaattgaaatgtatgtgtttacttgtttaatgcatgtgaatcattaaaaacatgttgcgtgtcttaagtaagtaaagaacgaagtaagtgcaacatcatgacggtgtccaacctatctatacgtctacgataggttgccactggtaaggccttcgcactcgtccatctgcaggatcgaggctgcctctcgtcgtagtgctggtcagcaggaacatttcctatagtaggaaaatgctcatatatccagcactaaaaatttaaaagcatgcaaatcagcaaataatggaaacaaaagacatataaaataaggttttctaattatacacatcaaacgatattagttcctgtaaaagagtgatgtatcctgcaagatgcttcccgtgatgctgacatgcgtagctcaagttctgatacatgtgtatcagagcagccgcaccctaggcgaatcccccagatcggtcgaagtctcgaaacgcctccaagaataccacggctatatgtgtggcactcttgttggcgaacaatgtgcaaccaacaaggtgaagtagatatgccctggcggccaaaatccactgcctcgcctcgaccttcgcgtaatatgtgtcccgaagccatgatagtctgacataaggcccatgacactgcgatgtctctgctgcagcctcctccacagtgacatcaagtaggtccaccagcaatgtcatcgccgatctccagctgctcgaacgggtcgaatgtccccataacagggagatgcagcagtgatgacacgtcgtcaagtgtcaatgtcatctcgcccacgggcaagtgaaacgaacatgtctcagggtgccaccgctcgacaaatgcggatagcaaccccctatcacctgtctccactgagcatccaatcaatggactgaggccagtggcagccacaaagccctctatctcaggtacaggcttcccaaatttaatgaccttacggccatgggaagcaagcttcaactctgcatgatcctgcatttaacatattatttaaggtaaaacattcatggataaccaaatgtatgacgacattcgactatgtgattcaacatgtgaatacctctccggcccagacgcgtacagccacatgatcgcgaaacccggtaagcactgatgaatctgaaggccctccagggaaagattcggacactatgtccatatcctcggtgaccagatcaccctcctcagtgatcggatcagccgtctccacgtgtggttcctgcacggcaggaacatcgtcaatagcaacacccgccctacgacgccgtgcagatgcagtgggcctacgtcgctcaggggcatcatgctgatgacctctcccatgtgtaatatcggaatcatcaggacggtgtccaacaggccgacgcactcctcctctcgtcctagccatgtgtaatctacatccgcatattgtatttcagacataacaattcgttcatatcacacaagtgtcatcaacactttgtcaaaaagtgttggacactcaaatctacataacttgtccagcttcatcctttactttcgaaatttacttcttttattcaatcaaactactatttggatgaaaatgtggacatacaaagcatgctttcaaaccatacctaatcaacttagatgtcttggtaaatattaacaaaactatgatcatattgaaaaattttcaagaaatttgtgtaaacaatggaaaccacaagtaactgtgcaaagagcatcaaagttttcaaaagagcgatctatgtcagctagctgcaataacaagttctcataattttttatcatatttttatgtttccatatatatatttattctaagttcagacaatatcatccttaatataacttataatgcataattatgatatatgtacattgccttagtcaataaatatttaacaatatatatacacatacatactggaatttgaagaatttaaaaatttcaatttatttcctgtttttaaatgtttgtatacaaaatagttaaaatagttttaaagtaaacaaacccttgcatgtgtttctaggaaacaattctatactattaaacattttttccttttgcaaaaggcagttactgttttccctagctaacagtacctttagattcatatgcatgtgtctcctaaaagttgaaatataaggaggggaaattgcatttttcaacacaaacaagaggaggagaaaaataaaaaagagacaaggcatattggtctttcctcatatatcaatggcataattgttttttttttaattacatcaatggcataattgttatgatctaggtctgtgactctggtatcatgttgctctccaatatatttcctgtttttccttaattatttaccatttttttttcaaaaatccatatttttaataaaatagattccctacggatttcacaatccatatcctgcttacggattgcataatccgtacgaattatacggattatgcaatccgtaagcatgatacggatccgggaatccgaacgaagtgcacggatcagtcaatccgtagatacttcacggattaggtaatccgtatgtagtttacggattctgtaatccgtaaactacatacggattacgtatttcgtgaagtatctacggattgactgatccgtgcacttcgttcggattcccggatccgtatcatgcttcccagctccttgccaccatttccgccatgcccgaccaccacgcaccaccatccacaaccataaaccacccaacgcacacgcagaacacacgcacaaacaccaaacgaaaatgcagccattaaacttctatcacttacctcccaatgtcgtgcccacgaaacgaagaagacgaagcacaccccaggtcaccacgagctgctgaacacttccaatgcagctgctgtcaccagttgcagcaatgccggcgtagcgagcaggaacggcgatggagagaacacaaaatggtgcaggaagctatcggaacaggaaacacaaaatgatgcaggaagctaaagggtgcgcgaagtgaagaggggaaattgattttcaaaataataagctgagggcaaatccggaaattcactgttttaatatggtgtataagaaaacaaaatggtgcaggaagctcatcacgctttcttgtactttgtaacttcgtgaacattctgagtgtataggctaaaaggatttcatgtcatcaaggacgattgcctcatgagtttaccttgtaagtatatctcagtgatttgcgtagagcctgtaagaagactttgttaagaaaacaacattaagtttggttttcaaataatagttacaaaaaaatttcataacataattcaatcctctttttcgtgtttagataaaggcttagacaaataaagggtcaagaaggaacattgaattgaattaaaaagggtatgttaataataaattttaactaatgatgaaaataatgctcaaaggagtatgtttgctagtattttcatcttacataattttcgctataggaaccataatctactttaacctaaacttttttttttctatcttttcaatttgtccagtcatcagttcaattaataatcaccaagttacatgacgacttagaaagtcatacactcatattttcaagcataataatctattatttattgtttttatttctttccataaagaaattcaacgaatatatgaacctggaaaattgaaacaaatcgtacaaaaaatataaatgcagtctatcaggcacacttaaaccgtaaggcaacctccaatatttgctatttggttcttttgttttttttttttttttcctcattttgatcgggtatccttcagtatttttagtgtctactaactagacagttaatacttttaaaagtatagtctccttatatctttaaataagggttaaattaattttttaatttcaatttgatctaattttttttcaggttcagttaaatcttccaatttaaattttaagggcattagaaaaagcatgtcatgccaatgtcatctcactaaattttacaaacattgttagttcaatttagacggtaagacgaaattaaacctattttaaaattataagatttaattgaacccataaaaaattagaaaattaaatcaaacctaaaaaaaaagagaatcaaaaaactaatttaacctaaaaaaaattaaaaacaccataaacttgcagtaatcagtaaagcaggttatttctagcaaaaaaaaaaaaagcctatatatatcatttacttgaatcggcacaaaaaattacaatgttcctttgctgcaatttcagcccaatgtatatactgcacacatcaaccacgcatgaatagagcactttgcagctcaagttttgaacatccaatacttaaccgcactaattttgcaaaaagaccacatacaacttttcctacagtggattagaataatcgcttcctgcagacggatgctccacaataacatggcatttgcttgatcttcccatcagagtccaagacgctatcaagcacataaccatagtcatacgttaattcctgcaagcaatcaaagagattcaagtcattgcttaaaatggtatcagataaagtgggagaaaatatagaaaatgagttacctgcaaagggggtatgttgtcagcagcaaacagcattacacgagccaatctcaaatcattgtgtgtgctcaaaacacattgaacaaacagattaggctcacaacaatggtttataaacctagaaatatttccagtagatcctgcatcaatacaaaactctggcgcactttcagaacattgatcatgatatttgtccaaaagatttgcaggaatatctccatcttgtgaccgccgctgtcaaaattaacatcacccatgagataagacaaaggttctttgcattaaactgaagcaactgaaaaaaataatgttacaagatttcttaggattcaatacctctcttccccctagcccctttatagtttgcaagcaatctatctcaaaaatataattgttttctaaaacgctatccatatcctctgccctggcaagtattcctgtgtactcacacactagtgctccagaaggtataaaatcccaggatctaacagcccatcctttttttgcagtacggaaaacctatgcaataatttaattaaatacacaattaaaagcacaatatattttaataaataatccaaaaatgtggaaaccaatatgcaacctccagacgatatctaagtcctctttgagaagttcggttcacacaacctggaccacaaccacattccggaccacattcaaatactacatctttagcttcaactaacctgtcaatatatacatgaaagccatatcaaatattaaagcaaataaaatttaatatgcatttaaccagttgagtttctaacctgccaccatcccgagatacatagggaaaatcagagccattacgcaatgcacatgcacaggttgttgggtcattacaaatgcctttacatttgcatccagtggcattcatgggaagcttcacatttttggcaaccttaagagacttacaatatgtgaaacctataatataaaaaaactacacatcaaaccaaagtacgcagagaaaaaatttatccaatatttaaactaaaatagtatacatactatttgataaccattacaacattatttgtttaaaaacatcaaccatataagcaaattagcaggagaaaaataaatacaataaaattagcaaatctacttctcaagccagaaatgattttctactgaagcctgctcaattcatcttatttcagaaatataattattgtgccagtgtggtcttccccaagatagcttcttttttttttttttttcatgattttttaacttttctttgaatcattgggtttagacattacttcgggaatcttaaatcattccatgttagtttatgtagttagctgtttaactatgtagttagttagttagttatggcagtagtatttgttatggttatacttcagttagaagctagtatcacaagtttataatgcataaataagagtatgttgattctccattcttgtaatcagaattcaaattaattcacaactctctagttattgttttctaagttcatgtcccctctatttaaattcgaatagcaatcctcaacacgggtgactttccaacaagagcttttttaggaactttaaattgaatttcgataattttttaagaaaatatcatcaataattaaaaatagccatgtatcactataaattattcatcataaatctaaatatagttatatgttaaaaactaaaacgtatttatttataacacattttaattataacaatttaaattttaattatttaaatgaacaggagggggtaaatggtgtgtatggttgatagttggttcctcaagatttttttgaaaataataaatcccacaaacagggcacaggaaaaaataaaggagttaatgataagagagattcatggaaggaagagttgctgaataataaattccatgcactaaataacattgaaaaaccctatagaatttgttttcaaatcaccccccttccccaccatttcaggataagagggccactgacgttgggagcagggatggaacaatagtaagaccttgaccactgactgatgaaatatgtattgttatttactctgtcaatcaattaagaatcactatagatgagttttaaaacacttattataaaagtcagacatttagtccttgaccattgactgatgatatagtgttatttacactgtcaagaaattagaaatcactctagatacaagatttaaaagacattacaaaagtcaacaattttcaattaatggcaattgatgattgaataataaaaaaataatgtcaacaaccttcaatccatgattgatttaaaaataaataaattaacgtacccctgtgccagaaacgactccttactatgtgaaggtatggaagaagatcattgtacgcaaccttacccttgcatatacaaaaagactttccgaattcgaatccatgacaatcgatgattgaatgaaaattttaaactaattatatcactatatatgtgtgtgtgtgtgtgtatgtatatattgcaaaccccttattgaacttgcctgtgggtggaacaggggggtcatcaaccaaatttgtagccggaattggcatatcttcttgacctccagtgatatcctcacaaaccaatctaggcaaaagtataccgagatattaagccaatataatttatacaaggtacattaaatattcaatttataaaagtttcttttaccctcgtatttctgttagagtttgaggtacacgtccataagtaaaatatacctgttaacaatgtaaaataagcaaagatattttaaagccccactgcttagattacaaaataaatcaccctaaagaaacatttggtagttgggatagaacaagacagaacatgtggattctgttctacatttagtgcattttaaaaatagacacaaggttcaaaacattaaaactttgattccactaaaaatgtaaaacaaggaggacaacattaccattgcatcaaggctcaccatcataaataaacagcaatttcatgtaaaaacaaaaggcaacaaaacaagaaatgtttttggatgaaattataagaattataataaacctgatttgtggttaaagtaggttgcccttcaagcctcctaagtctaaacttgtagactgtaaatccagatattcccttctctgcccaataattgacaacctgcaatacaaaaaaggcacataaaacatttgaagtacaacccttaacttgcatgcaaatgttgtccccattttccgaatcactctttatcagcaattaacatgttcaacattagagacgagagcaaatgccacaatgaagacaactacaataaaatcggaattagaagaaattcaacacaactcctagctcatctcacgaactcttctctagtgccaaaataaatcatgaaaataaagcatcaatcgctttctcacaacagattatcaaaacttcctaatactaattactaattgactctgattaacaggaggagattatctcaaatatcaatgaagtatcatcaaaatgcattagttgaaaaagaaataaattggcttaaaagttaactaatcaaatcttaaattagaacacaaaatgccaatcttcaggcatcaactagttagtttccccatcaattcaccacgttttaaaatttacataaaattttaaatatgaattaaaaagtaagaatccttgtactgtgtttttatatatatatatatattctatttttgctgataaaaaaaaaaaatattaatagtatcgttgttaaacaatgatgaaatcatatacctcaacaaggaatcaagtataataaaaaatccatcactatcaataatctggatattgtttcattatatagaaatcaaagtgatgagacattaaaaaaattatataggaataaattaaaaaattaagacgtttgaaattaaagagtaaaatatggagtgtgaatcaactattaatctgatatagtgtgtcaacatgtgaacctcaaatttgtagacctagaaagttcaaggtattaacatcaagacaagttaaatttgactaatttaaataatatttggaaaaaaaatagaagaaaacacggcacattgaaagtatcaagaacgtactcactcatcaaagtcctaactcagaagtgtgagaattcaaattttaagattttaaaaattaagatttgatatgttaagctctctatgcagatacgttttgtcaaaatgaaaatccaatcactgatgaacaacagatttgagtaagattttcatagaattaccttgtacaagccatcatatgtgtatactttaccagtgtaactgcttgaagattcgtgaccacgaatgactctaacaggcacacattgctcagcacaattctacaattgaactcaaagcatgttagatgtgcctttgtaacatcaaatcaaataggttacagtggttaaggaaaaagaaacatacaaatcataaaaaagtaacgtacaaaagcaaaaaaaactgaaaagcatggatacagcattggacacaaacatgttacaatatagacacacaaggagctatgagattggcttggtaggagaagggagagattggtggtttgaatccctcccactaacattctaacaaaactaacaacattggttgataaaaaagacatggatacgcaatacgacaaaaattaaatattatagcatgcaatggaatcataatacaacatgaaaatcattgtttcaaaagtgagagtgagtaacataataaaatactataatttatctcattattttaaatattataaattgtgatattagagggtgagccttgacacagagataaaattgtgttttgatgacttgttaatcatggtttgaattcggaaacaacctctttgcatatgcatgggtaaggcagcataaaatatttctctcctttaccttcgcatagctaggagcctctgggcaatggagtatgtagtttttattatgaattgtgatattcccatttgtgttgatattaaagttttcaaaataaaaggtcaaaaaaatatataatatgcagtttagagtatttgcattgtctatgaaatctctaagggtctatttggataagtttatctagaagcacttctagaaaaagagaataagaagaaaaaatggaataaacttctctttaagctaaaattagcttatgcataagttattttgtaaaagttttctcatataacttctatcaaagatgagacagctactagaaattaatttgagtatatggagaaattcatttcatttttcttcttattttcttttcctagaaatgcttctacataagcttacccaaaaggccttaagaatctaaatattgatgcatgtcaaacaattatgacacacaattacttttttcaagtggttgtgattccgggaatacaacatttcaaaaagataacctagcaccagactccaaagcaattaacataatcgacaaacatcatggacttgaataatttcaggaatgcctaaaaatagaagtttgttaatgaaaaataaaaatcactcgctcatgatttatgacctgtgatctgaaacccaatcatgcttgattataacctaactttacctttggttcttgtatttaagaatgagagatattcaaaattaagcaaattgccaaaggatgaaacaggagtcatatgatccccaaatggcgatgcttgctagtttttttagtcaatttagagatgagagagaggtagagagagaaacagcgagttgggggggggggatagagagcatgtgagtcacaggccagcatggttgtcaaacttgcgatttaaatcgcaaaatcgcacgattaatctcttgcagaatcgttttaggggtagactcgaacgattctgcgtagaatcgtctgattccaggcagaatcgcgagtgagcatcgattgagcaagtccgattttgtccaaaacggcaccgttttggaaccaccacacctctgtcaaattcacgccaccactgcacctccattaatcctttgcaaccaccaaacttctgtcaaactcgcgccaccaccgcaccttcgttaaacccgcaccacaaggcggtggctctgccgccactgttgcgatggtctatcttcggcgtgttgatgcctgaaggtggaggataggcacgaagcaaggttatgttgggctttgatctgcctttttctactgcatatgatctgccttctctcaattagatggagaagatgatggattgtggaccccactccaaataactacacgtagccagtatcatttttctttttttcttcttcaaaatcccatatgggcattggcccaaccattattagtgtgtttatgaaaagccagttgctatatccacctcccctattttcttatccacttccctttgaatttatatttgatatttataagtattttttttgtctgaagtagactcttacgattctacgattcgattctacgaggcctccacgagtctacgtagaatcgcgattctaacaaccttgcaggccatgtcctaactacgccggcaaatggtacaagcatcatggagcgtctccaacagagacagcaatggcgataacaaaggggaagggaaggagtaacaactggagagatgcaccggacataatgtagttctatttcacaagattcccagaagacatgggtgaaaaggagctatggttcgagttcaagaagtggggcgacgtaagagatgtattcatcataaggaattgtaatatgagtggacgcagatacatttgtgagatttaaatgggttgaagatgccaaaaaattagagcagcaactggataatcttgttattggtggcttaaggttacacgtgaatctttgcgaagcacagaagagattttatcattgcatatctccttcatatttctcctttgtctcttccttgtcttctattactattcctaaaaatgttcaagagacacttgatcatcccggttggcgacaagccatgattgttgaaatgcaagctcttgagaatagtggcacatgggaatcagttcctcttccccccgggaagaagacagttggctacagatgggtttatggtgttaaagtcaggcctaatggggaggttaatcaacttaaggctcggttggttgccaaaggctacattcagatttatggccttgattattgtgacaccttctctcctgtggcgaagatcacaactgtttggctcttcctagctatggcagctatttgtcattggcctctttatcaattagacataaaaaatgcatttcttcaaggtgatttagaggaggaaatctatatggagcaaccttttggttttgttgcttagggggagtccggtttggtgtgcaaattgcgtcaatctctctatgggctcaaatagtcaccaaatgcttggtttggcaaatttagccatattgtttagaattttggaatgaagcgaagtgaagtagatcacactgttttttattgtcatacttctttcgggatgtctatgttgatgacattgttattacagggaatgatgttgccaaatttttttggcaatgttattcatcaattccataatcagtaccatttttacccattcccgctccaccgaaaagtcctatttttcctccatgacgataaggagttaaaagatctactacttttattccaatttcaaaatggctaattttgtatctaattgtataaatgcaggcgcaaatctatgaatgggagatgttgtgcgagtatatgatatgcaagtgaaacaagttcttgctaatggtaaaaagggagctttgaatgtgggggctgttcttattttaccggaaggttttgaattgacaccccccgattgtatttcaccctagattaaaaagaagataggcaatctgtcttttcaaaactatcaccctacaaaaaaaaatattcttgtggtaggccctgttcctggtcaaaaatataatgaaatcacctttcctattctttccccggatcccactactaagagatgttcatttcttaaaaatatccattcttgggccagtaatataaggatcggattttgtaattaggggggggggggggggtgattttataggatactttttgtggaggggtacaaagacctatatagtcgtatggattcctaaatcttgcaatactgcagtattaggaagtatttcagggttctggattgtttgtttggggataagtcttttaggaagctagtatgtgacagctggaattcaaacccgatgtcgggctggggtgggtttgtgctgaaagaaaaactcaaaactttgaagctgaaactaaaaacctggaacctgcatcactatggtgacattcagctaaatattaacagaattcagtatgagatgaatatgctggaaatggaaggcaaggtaagattacttagcgatgatgaactgaaaaagagaaagcaattgcagcaggatttgtgggatgcctcacaggcttatgcctcaaccttaagacaaaaggcgagatctaagtggatcaaggaaggagactgtaattccagctttttccataagatggttaactggaaaagaaggaaaaatatgattagagttatggttgatgggtgctggctgactgacccgtgtaaggttaaggaggctattagattatctttcaagaaagatttgatgaacatgtgcggggcaggactatattagacggggtcaagtttaaagtcgttgatcaacatcaaaacaactcactggtggcgcggttctaggcgaaggaagtgagagatgttgattgggagtgtgggagtgataaaagcccgggcccggatggactgaacttcaagttcattaaagaattctgggaggtcattcaacctgagtttttgcattttatggatgaattttatgttaatggtcgattcccaaaaagtggtaatgtctccttcttagctttgatcccgaagatgcttgatccccagtgtctcaatgactatagacctatttctcttattggctgtatgtataagattgttgctaaggtgctgtcattaaggctaaagaaggtcctgccatcaattattgatggccgccattctgcattcatagaagggaagcacttgctgcagagcatggtcgttgcttctgaagtggttgatgaagcgaatagaggtaacagaagctgtcttgtgtttaaagttgactatgagaaaacgtacgactcagtcagttggaaaatttcttttttacatgatgcagcggctgggctttgatcataagtggatcacatggattgaggactgtcttaaatctgcctctgtttctattttggttaatgggagccctactgcagaatttaacccacaaagaggactttggcaaggggacccacttgctccattgttacttaacattgttgcatagggtctttctgggttgctgtgggaagcgctggaaaaaaaaacagatttgagggctataaggttggtcatagaaaggtggatattagcatgttgcaatatgcagatgatactatttcctttggggctgcaacagaggaaaatgttagaacacttaaggtccttctcaaaagctttgagttagtgtcgggttagaagataaattttgctaagagctgctttggtgcatttgggttgattgatcagtggataagtgatgctgctatgtacctgaattgtcgtaagctgctgctacctatctcatatctaggtatccctattggggcaaatcctagacggcaatgttgtcaagatcgcgagtatgatcatatactcgtgtgatcttacaattttcagaggggtcgccgagcttcatcggagggaggatcgtggtatttgcagatcgttgggggatcgcgagtctgctcgcgaggtggacggatcgacgatccgttttgatcccagtggcttcttagaagctctcctctgcgcctcttttgttcgtcactgctcgcaccaccgctgctcgttgctcagtctcgcatcagacggagatccgcgtccgctctcgcgccagcccttggagatgaacaagaacgcgttcgacaaggttgaagtttgcggatgcgtcgccatggcataaccccaacgacgctggcttgtgtttcagagggtatgtgtgcgtgacccggaagaaggtgttatgtttcgtaggagtcacacaagcaaggagcaacgaagtgaagtagttggccttgcttttctctctctcagtcactactcttatcactctctttgctagaattttattttttttattgcttgtttctttctagagtcttcttttaggcacccaccatgtggaccttgctcttctgagaagacaactagatgcccgtgtacaatcatttcatataaatattattaacatttgtttctgagaaaagttttctctctctcactcactactcttaataaaattataaatattattattaattaaactaattacttttttaattgtaataaattaaataattgagttttatatataaaaaggaggaagtatattatttttaaattaactattgtataaaaataattatctttaaattatatagtatttttatgattagaaaataccgtgataagaatattttgagatattttctaattctaatcattttctactttgcttaaatgtttttggaaaatgaatttatgttatgacttgtgaacttattttgagttgtgttatgttttggatcttaatctttatgattattatgagttataagttgttttttttgtctatgttatttttttatgtatatgcatatgtataaatgtaattttacatatacacgtaactcttacgatccgagttacgatcctcttccaatcctcgagtttgacaacattgctagacgaagtgaggcttggggttctattgtgggtaaatgtgagaaaaaactagcactatggaagtgtaaatatctttctttcgggggcaggttgactcttactaagtcctgaatttgatccctatttttcttttttcttttttagggtacctaagaaggtggtggacagattggtgacattacaaaggagatttctttggggtcgcaatgctaaccagcagaagattgcatgggttagctgggatgacgtgtgcaaaccaaaagcgaaagatggtttgggtgtaagggatctctcgtctttcaactatgccttgctcgagaaatggaggtggaacttgttccattgccaggaggaattgtgagctcaagtcttggaatctaagtatggagggtgcaggtatctagatgccacgacaacatctgaccatgattctatttggtggagggacctatgcaagatttgtcagtccaatgatgtagaggggtggttcaataagggtgtaatctggagtgttggctgcggatctagggtgttgttctgggaagatgggtggatggaaaatggtgtgcctttgaggaggaaatttcctagactttatcatatatcccaacaacaacaacattacgtacagcaaatgggatcacaatcactagcagtttgggagtggaggtttgtatggacaaagagctttatggagggagaagtggaagcagcaatcaacttcatagatgcaatccagggtttgtcaatacgtgcccaacaaaaggacctgtggaggggattcgagtggtaagtacatggtggacagtgctaacaagatgatatgtagggcgctggataccctggccaacgtggatgtgtataatgacctttggaagctaaatgtcccgattaaagtcttatgttttgcttggaggctttttcagatataggctgccaactaagaggaaccttattagtaggaatgtaagtatgactgatgacagctgccctttttgtagctgttctattgaagaagcctcacatgtgttttttagctgtcctaaagttatgctgctttggtggcagtcattggaatggattaaggtgcaaggggtatccttgatcaagcctattgaccatttcctccagcatacgtattgcaactttaatggtcttaggactcaaaggtggaagatttgatggctagctttgacttggaatatttggtttcaccgtaataggattgtctttcataacgacagcttcaatggcactaaactgctggaggacgcacttttcttctgctggtcttggctagttaacttggagaaaggattcaatactcctttctaccattggtctagccatattagagaaggtatttttgtatgttagggggcctagcgtttgtattttgacttggatgtgagcatgtcctttgtctgatctttggcaattttttcagccatgaacagctatggttttcagggagggtttcaaatgttctatctcctttttgtcctagctcttagttagaactcagttggcttttttcttctgtgacctaagccacctaggttttgcttttgttcatgctaggttgtataccttgcagtattacttgtactgtgtctttatttctaatatatatattagctttgctgatcaaaaaaaaaaaaaaaggaagtattatggctccataggattatacatagtagggtaacaatgtacatagaaaagtaccacttgcactcatctttatcaatataatacattattttgctgataaaaaaaaaatgagtcactttgaaattatgaaaaaaggtgattgagcttagattaagaaaatagacaaggattgcaaagaatcaacttagattacttgaaatgtttgagtgcgaaaatatgcacacaaaaaggatcctcaaccttagtttgctgagagatgaatatatatatatatatatatatatatatatgagaattgacagatagtacaaaaaatagttcatgatgtaaggctatagcctagcctatggtgacagattataggacaacttctaagaacttcaacaaccagctagaaatataaaacattatcaaacaacaactttaacactctccctcaagctggagcatataaattgtgtgcttcatgcttggaacatataaagtggatccgaggacctctcaaggacttggtaaggacgtctacaagttggttgttggagttaataaattcagtactgatttctttggactgcagcttttcccaaacaaaatgacaatcaatctctatatgtttagttctctcacgaaatacaggattagaagaaatgtgaagagctaatgatgaactagaacattggtattaagcatcaaggagcatgcagtcttaactaaatgttgattctttctttctgctattccattttgttgtggtgtgtgtggacatgtggattgattcagaatatcctgtgaggatacaaacgaagaaagttcagcagaaaagtattctttggaattgtcacttctaaaaattttaattgttttaccaaatcggttcttttttttttctatcaacaaataatatgtattataataatttagggagagtacaagtggtacttttctatttacattgttaccgtactatgtataatcctatgcagccataatactccctaatactgcagtattgcaagaattaggaatccataagactataaacatcttagttcacctccacaaaaaacttatatagccagcccccccaattacaaaatccgatccttatattactggcccaataatggaaagggatatcaaatccttttttccagatttgagtcataaccaacagagaaagacaacatcatgcaacaccttttgactgttgaagctttcatttgacaagaccaccctattcctgtgattccatatacaccacgtcaatgacatccaccatgtttgccagcgctgagttcttatgcccttgagatatccatgagtgtgctgaagaaagtgagcataaggtgtttccgggtaaacaccgacgatgcttagccacgacacgacaatcctttccaccaaagaggccggattttgtaacaaaagaaaagctgtgacgcatcctcttcactggttctacaaaaagggcagattacgtcattcagagtcacattcctcctacttagattcatcttcgtcggtaatctatcccgaatcaacctccaagcaaagcatgacactttacttggaactttgactttccatagctccttgaacacaccatcattattctcaactgatataaagctactaaacaatttgtacgcattggccactatgtatcttcccccaacaccaactatcttgctgatcaggttgcacaaccaccactctgatgtcctccatgaattttgcaaccataacaatctttgattccctaaataatcttctccattgtagttgccaatcccaaaccccctcgaatgcgatccttagctgttgtataaagtgatgatattgttgggatatgctgtacatacatggatacgtctccaacaatgactcccctccacccaaccaaccatcttcccataactttacctttgatccacgccctatgttccattttacactactcccctcctcagaagacttgcaaatgatacttaaatcccaccaccaaattgaatcactattattccttcttggttcatccaatgacctccaacttccatatctggattccaataccttcgcccacaattcatcttaatgctgaaaaagatttcatctccattttccaagtaaagcattgttgaaacttactagatccttcactcccaaactgccattctccttggaaagacagatggttccccaattcacccatgctatcttctgctgatctggatttacccccccccccccccaacaagaactgtcgttgtagcctcactaacctcccaaccaccttcagagccctgaaaaaagaaaaaaagaaaatagggattgaatttaggatagactttaacaaggatactctttcgccaaaagataggaatctttgattccatttggacaattttctctcacatttctggactataggctcccaagtctcactgcaccttgggttttccccaatgggaatacccagatacgaaaatggtacggacaacaatctacagctcaaataagtggcagcattttgacccaactatgaggcataccaattgcctcgaaattacttttcagaaagttgatcttcaaaccagacactaattcaaagctcctcagcactatgttatcaatagcggtcggagcaactgcgatagtggcggagcagccatgcactgctacgaagggtagtgtagcgatgcggttcaaggtagcggacgttgcgcccgcgacaggtggtttacggatcacccgcgatcgcggaagacacggccgcgatttggttacattcttgtgcaaggctgcgaccttcgttcactctgacggttctacctacgaggctgcaaccttcgtctacgattctctgtgaggggcgttcgggtcgggtcagggagacgaggggcaatcgggtcgcgcgaagggccctactgcagaggaggacgaatcgcgttcaggggaggctcgatgcacaaacaacgcttcggtcgccgccgctcagccgcggcttcttcggcaaaggataaggcagtgagttgaagagagttgaatatacgcagagagttgaagagaagctttgaagaagaagagtacccaatacatttaagctatattctagtgctctgagcctctgagttagtccagctgtaatattatataatattatatgatatgtgttgtgagttgtcattgtgtgatgtattggctttatgagctggagagtacgttccagtgttccactatatgaaaagccttttaaaatttttaaagtttaagctatattcactattcagtatattatattgtattttaaaatggacttaaggctgaggtgtagataagagacaacttttgctttccaacagggattgattcaagtccattttatttacctttgataggattttaacattagtagtaataattaaaaaatatattttaataactattactaatttttattatgtattttaataactattactgttttaataattattattttttgtcaaattctgttttttttttaaaccaggtttgatattctctgtttccttcttagtttttaatttctgtttttttcctttcttaataccaggttattcattttctttgttttttcttgacttttttttgtctttatattcttaagagtttttattgttaatgataattagtgcatgattttttagttatattttctttttcagcttatatatttatattttaaattttttaatacatatattaaaacattagaatagcggtcatcccgctatccactatctcgctatcccagttttgagggcagccgctccgctccgctatccgggattgataactatgcctcaacattaccttaatggcttttacattggccatcgacgctttcccaaaaaaaattgtctcatcaacataccatagaagactgacttccaccctgtttcattcctaccttaaaaccttcgaatacattcttcgctagagattctctcatcaaaccagttaatccctcagctataatattaaacaagaatggggctagtgggtccccttgtctgaggcctttctgaggggaaaactcatttgtggaactctcatttaccaatacagatacagaggctgacttcagacacccttcaaaccacttaatccatttgaaacagaaacccatccgattcatcatataaaaaaagaaatcacagtacacggagtcatacgccttttcgaagtccactttgaacactagatagctcttatgacatctctttgcctcttcaacaatttcattggctataaccacattgtgcaccaaatacctaccctccatgaaagcagattagcattcatcaattatacaaggcagcaccttcttaattcttcttgcaagcacttttgccacaatcttgtacatacagccaattaaagagataggtctgtaatcattgaggattgtggaccttaggtagtaaagccaagaaggatgcattgctacctttgtggaacacaccattagcatgaaattcgaatacaaattggagcagatctgacttcatgatatctcagtactctttgataattctaaaatttaatttgtccggtccgaggcttttcgcgtttccacactcccagacaactgcgctcacctcctcctcatcaaaaggagccaccagcaaaccattgtgttgtaagttaatagacttaaatctgaccctgtccaggctaggcctctccctgccaattacatcaaatctcctcttgaaaaaaagtttgatttcctctttaactctgttcggctcatctacccaacacccaccaacaaacactcctctaagcatgttgtgctgccgcttccaatttaaagctaaatgaaaatatttagagttgcagtccccttccttaatccattaagatattgccttctgtctagccatagattcaactaaattcgctgccctctaaagatcctcctgcaattgcttcctcaaaagttcctccacctcatccagctgcctagtatctcattctttttccaatttgttaagttcacctttcactctcttgaatttctgctcagcatttccagccaacattcctttaccacttttttaaatgacttatcctctcaagccaacaatcaaagacccgaaatggcttcaacccccaatcaacactagtagaccgcagcaagattggatagtggtctgaaaaattacgatccaagataatctgggcactgtcttgccaattagaaaaccactcctgtaatacaaggattctatcaattttgcttttggctgtcccatttggtctataccaagtaaattttcgccccacgcatggtacatcctccacctccatatcagcaatccagtcattaaattcttttatgttgctcctgccatgtaccctatgacacacacactctttcagaagaccttctgatactgttaaaatcgccagaaatgcaccaaagacccccactgtttgttgttcttagctgactcacttgattccatagtatttttttcgaaactggatcacatggtgaatatatgtttacaatatttacttttcccctatcacctgcccatgctccttctaaatatataaattcatttcccttcacacttttctccattttaaaattttatcacaccaaatacacaccaatccaccagcactattaattgctggctgcacttcccatctaagcttagtatctccccacaaagcgtgacatataaccttgtcgatcacttctttcttttcttagtctcttgtatacacagcatgtccacctgttccttcctcaccaaatttctgattgatgcccattttacccccatccccaaaccccttatattgtatgtaactatcttcatcaaacaccatcaccaaatccagtcattagcaaattggttcttaggacttgaagatggacaaaagttcagatctctcattcatcaggtaaacccaagttcataggaatacaaacactcatggttaactgttaactaactaaacagtagtagtgacagctgtacaagtcacaatacaaagaaaagaactcttgtgtaggagtaagatactctaatatcgcacataagatacaagctaattggtcaaaatggagaaagatgccatgggttatttgtgactttaaagtacctacaaactcaaagggaagtgttttcatactcttacatgaccaaatatgctctatgatagtaaatgttgaactataaatagagtaagagaccaacataaatggatggatagtggtcacacgaaaaggaacaagatacagaaaaaatattatatacaaagatattttgctgaagaacttattgagaaaaaaatattagaaaatcgactaaggtggttttgacatttgcaaagaaagcgactataggccttagaaagaaaggaagattgcacagtttttaagcaagtgaaaaaagataaaagacgaccaataaggacactagaggaaattattaaataggatctctcatgttgaataacatccctgagaattttgtttttaaccaaacccaatgacagtgtgatccaaacaataaacctcacctagaagaacaaatttacaaatttctacttacattctatagtactgcagataatttacaaacaatggcataaccttcccatggaacaaaaccataattctcatcattaaataacacagacagcaaaattaatcatcaattatcatactgagaataaacaagaaattattaacaaaattcagaggtatgagataataaaaagtcaaaccttgagagccaggttaccacgctccaacttttgatcccgaatttgacgcttatcaccagtcagattatgcccaccttgaccagtgtacacaacatcctcagcattatccagatcatcctcatacatgcccgaaataacaatggcaacagcaactggaagttcatagctgtactgtgacaacaaaagaaaaaaaaaaagggaacaaggagcataggtttatatggatgataagaaattcctatcaaattctgaatatgtattcaatttagtgaaagaaaaggcatacaagaaaggtctattttttcaaaaaccaattacaattaaaaaaaccatgatacctcccaatattcctttattcccttaaataacagactaatatttttccatcttatgactaacttttcactcacatctttaagggtgcatttgttttgctaaatatttatccagtgtttgttttagataatagttaaaggacagcacaaataagaacagtactggacaaaagtctaaaattttgtaattaactaatccaggggacaacttttgtcccctgcacaaaatgctcaaaagacaaagaaagtccacttttccctcccccactctctcatgcccccacgtctctttccccactctctttcctctttctcttacctctcccttctccctcttccattttctcaattaaaatcagagtggtatttagatgttttgatgtcaataagagagatgtctagagagagagagcattagatagaaacaatgagtgggtgagagcaaaacaaagagtgggtaaagtgagagatcttgtctcaattaagccgagaaggggtacgatcaacacattgcgacgacagtggcggcacaacaaggggaggggaggaggaaaaactggaggcacgcatcagatgtgtcttctttctacttcatgcgcttcccagaagatatgggggaaaaggacttgtggtttgagttcaagaaatggggcgacatcagggagatattcatcgcaaagaacaaaaacaagagcaaaaggagatatagttttgtgcaattcaaaagggtttgatgacgtcaggaaactcgagagacagttggataatttgattatcagtggacttaaactgcacacaaatctcccgaaacatggaagggagtggaagttgatagagaaaaccaacaagatcgatcagtacaagaaggggccgatcagggataagctagtagagagagacgaggaaaaaggcacggagataaaagcacaaataacactgaatgaaggagcccaaaagcattatcctcaacgacaggcattaccggttttgtacgcaaaagtggtttcgacaggcagataaacgacgacaaagagatggttcccaacatatgcattggagacgataaagccatcccactcgtcaattcggttaactatacccatggaaaaaaggaaatgattcagcggcgcctaggtaggcaaattaaggaatctggcagtgttcgatagactagaagaagaactcttgtaggatagaggtgaagacattaagccaaagtaccttggtgatgacatggtgctattcattggccttagtgataccaaagcaaaggaattgtgtagggaagaagacaaaagtggattgtccatgttccatacattggagacattaagccaaagtaccttggttaggacagacaactgaatgatatcaacatcaacagcacctttaacccaagttaattaagatcgatggtagatgaacctaatgataaatcggaaataagacaaaacgagaaagagaaaatggaagaaaaagtggaaaaaagacaagagaggaaaaataaactgaaataaaagacgggtgaaaagaggagaaaagaagagaaaaaaactaaaaaagggaatgactggaacatggaactactaatgtgttcaatcctccaccaagcttatagattatctccattccatcctaagacatactatccaccaatctatatctcactccattagatctagtttagctacctttccccaagtaagtttcgatcaacctctacctctttttgtcgagctcttggtaacaaactcttgttcttatgggagcattcagtggtcgtctcatgacgtgtctaaaccacctcaatttatgctctctcatcttttcacatatcagtatcactgatacctttctccgaacatcctcatttcttatcttatccatcttcgtataaccacacatccacctttacatcctcatttctgctacccctattttatgtttatgttacctatgtgctgaccaacattctactccatataacattgtcagtcttacaattgttctatagaattttccttttaacttaaagggaattttgcgatcacacaaaaaccctgatgcactccgccatttcatctaccctgccctgattctatgatttacattcttatcaatctcaccatctttttgcaaaattgatcccaagtatctaaaaacatctttcttgggtacctcttgatcaaatagatgcactgtgtcttaatcatcatctcttacccacaaaaactcacttcatatactctgtcttgcttttgcttgacaatggaataaaattgcaaaagcaactgcaggaggaattgtgggcaacagcacattcaaatgcatcaattttgaagcaaaaggcaaggactagatggatcaaggaaggggattgcaattctcagttcttacacttgactgtaaattggaaacatagatacaatatggtcagaggagtgtttgttgatgagtgctagttagaggagccaggcaagatcaaagaggaaattagacactttttcaaggggagatttgaggaacctgagttggagaggcctaagttagagagggtcagatttaagtccattggacagtaacataacaatcacctagtggcgcgctatgatgtgaatgaagtgagggatgcagtgtgggattgtggcagtgagaagatccctgaaccgaatggattcaatttcaattttatcaaggaattctgggatgttatcaaatcagatttgcttcgctttctggatgaattctatgtcaacagagtttttccaaagggaagtaatgcatcattcgtagcgttgatccctaaggtccatcatccctagagattaaatgaatacagacctatttcattaatagaatgcgtgtacaaaactttggccaaagtgttatcaagaagattgaagaaagtgctgccaaccatcatagatgaatgtgagactgctttcatagaaggtagacatatgatgcacagcgtggttatagccaatgaagtggttgacaaagcaaaacggtgtaataaaagttgccttgtgttcaaaattgattatgaaaagacgtatgacacagtatgctaggattttcttttgtatatgatgaggcgcagatgggtttctgtgccaaatggattagaaggatcgaaggatgcttgaaatcaacttctatttctatattggtcaattggaacccaacaaccgagttcactcctcaaagaggactcaatcaaggggacccacttgccccattcctgttcaatatcgtagttgggggcttaaccaatctgatgagcgaagcacatgagaagaacttgtttgagggctttaaggtcgggaaaaataacgtggacatcagcatattacagtatacagacgacacaattttctttgggacagaaacgatggaaaatgttagagcaataaaggtgatgttgaggagctttgagttggtgtcaggattcaagataagctttgccaaaagaagatttcgggcgattgggacgactgaacaatggataaacaatgctgccagctacttaaattgcagaatgttgtcaatacccttttcttagtagttgagaaatcaaaattattcaacccaaatcgtaacagattacaaaacaatttatatagttgagataacagtcaactatactaactgtcaactaaccttatttagttgatacagctgttactaatttgtcatagactaacagacttaactactaactaataacaaacttagttagactaacagcttattactagaaagtaaaaaaacacacttgagtaatgtatactccttatacacttataagtacaaataaataaaaatgcaacatagcaagaaattccattaccgctttggcatagttctggcccatataatcaatgccatttaaccagtggctatgaaagccaactgcaaccatttcagcacgagaatagaactgatatccaacctcaatacctaccgttgcaagaaaaattaagacaactgaataaggaattatcagcacaagagttgatcaagcaaataacgatattatttaagagaaacatctatcagtgttaggagacagcaaatagattatatccattcagttatataagccaagagtaatagcaatgtaactaccaacctggaatgttgccaattcttttctcaggatacaatatctcattattttccatcatctgccaaaaatccccaaatcgaagatagtgttaaaagaaaacaagtacatcttagaaagtataattaaattgatttcagttaatgcaattaatcaaatcaaaacaaataatagtataaattacattaataaattaatacatttatacacattttttaaaaagagttactttttttcagacttttaaaacagtcctttgaattgtttcaaagatacggctcacaattaacttaataacaaaatacattgataagatattgagcatccatcactacaaagaaaaaagaaaataaatggtaacataaattggataatgtaacttaatggcaatgctatgacacgtaccagaagagcaaaatcctatctagatcatcacagaaaaaaaatcccaagacaatcaatattctatggaaaaaataaagccattgaattttcacttgccttgcttatggcctttagatctggtcgtttagcagtggtctttgattcttcagttggagcacctttctacaagattaattgatgaagctttgtagttaggttatagtaaaacaattaacgaagaaaaaataatcagtaaagctttcagtttaaatttcagtatacaattagtaagatgtaaagctccccaaggacatttaaacacgttgctaataaaagcaagagcttccagctttaccgtttgactccaattgccaggcgctttaccatttgactgagaaagggaaaaataacttctagctttgaagtattaactaataactctgaaataaaaaatcagcctggccacatttaactacaaaactattcaggcaatactagattttcaaagacaaaacatgcatgatgaaaaaaaattcatcttaaatttggaagaaaaaagaggcaaaatagagagcagagcaataactaaacactggacagacccataagctacgctatactattttagttcaataataaaataaagaaacattataaacgtccagctaaaaatgaaaacccagcatccacccagcccaattaaccacttttaagacacatgtaaacattgttagacatttcaatagcctcaagacactactaaccacttatgaagtatatttaaccattagtgttgtaagtacaaatcaattattttatacaacattcatttacttatgaggcaaaattaattgctattgaacatttcaataaccctataacactattaaccacttgtaagacatttaatcattaaagccacaagtacaaattgataattgtatacatacatttatctacacttaatctcttatgaagcaagttaattgccattagacatttcaataacctcatgacactattaatacactcgtaagatatatttaagcattagtgtgtgtttggataggcgttgacaaaattgattttgtaaaattgattttggttaaaattgattttgaagtgatgtgatttatgtttggatgttttgttataaaatcaagttagaattaaaattcagtacaaaattttgaatccaatgcagaagctactcaaaattgcttcaatctaaaatcaattcaaaaacccataatcaattttaaattcttccctaacgtgaaaccaaaaaagtgaaaatgtatccaaaattaattctggactcagaatcaattctccaacaccaaaccaaatatgcatttagtgcaacaaggacatatcaataatcaatcatagtatacaatgacactcatttactcttacccacatgtgaggcaaagttagccatatttacacatgtgattaatcatgtgttacatttgaacgctgggtggagaattctcaacagtacattaatcagtactctgaaataaaatgcagctttaaacttgcaagaaaattctgctaacccgcaatcaaaagtccagtcataccaagcaaaaagtctgttattactggaaaacctagcaagctaaaatgacagttaagctgagaccagatcaaggcaaccatcaaatccaaaacaaaggaaaagcaatacaatgcagaacatcaataattattattcttaatttcacccgtaaaattaagatcattaagaacaaccttcttttttttataaaagagagacttcacacagggggtttatcattgtaagatctatttccaaaacagagtagggagacataatcacattaacattataatccacaacaagaacaactaatggttaattagacacaaaccttcgattttgaagcctttttagcaactttccgctcagcctctgccttcccacacctcttttcttcttcctacacatagaatcataacttcaaccaaaggatacaacactgaacaacaataaatgaatacagtagaaacaccatatcaatagtacaatatcttatgctgcacacaaaacatactcacctgaactaattgaaggtaatgcttagtaaacagtcttatcgtctctttgaccttaagcaagtcgctcttctcccctaaaccccctcccgcattttccaatttctccttcgcattcacttctctcaccttaccatttccactcacttcttcacctttaccatttcctttcatttctcccatcaccttacatttgccgtaggccacccgctttttctttgccggcgaaacaaactctacttccactactacactctcctcacttccactactttttctattcatcttcttcactttctccggtgtcaacttgtcacaattatctttctcctcaactccctctactcttttacgtgcaaaaagctcctcctccgccttctgcaacgcttgaatcctcgcactcgacctccgcgggagcggcattgtggaaccctccgattctctcggcttcttctcggccttagctctgttcccgccattcgccatgacgattttggataccggactcttatccgccctggtggaaaccatcaagtgctggtgaacaacgtcgtccaaagactgcacaaccatctaaatctgcgagccaaaaaaaaaaacgataacgtgagaagggaaaaaaaatcggtaacagaatgtcacgaagaaatggaaaacaacagtcaatcgaacatgaaaattttccgagaaaacgaacgtcggaaggagctgctgttgttgatgttcttcgatcggattcgaagtttctagggtttggagatggtaaagatgacgaggagagagactgcggggaagaagagggagtttttgttttggagttgggtgatggaaatgggtaataatagctacactctcggggagtgaactgaagaggcgccattgccgaataagtgggaataatattattataatatatgtcatttcatttcgtacaaacaaaattgatttattattttttcttcagttttttatttttgttttctttattcagttcccgccttgcattttgatctccctcgcattcacaaggaaaatgcataacccgattgcatattgttttttgtcaaagttaaaaggttatttatatgtaccttttatatatttgagattaattgttatgtaatatctggttctcaattctcatttcatatgttttacaaaatttaattaattggatgataaacttttatattttatatgtataaaaatatcaccattataaatataattaaataagatatatcgagtgacattctcattctctcaaactataataacaaagtgagaaaaaaaaacattaagcaaaaacattgagcaaataaaagacaaaggataaaaaagaactgatcctaaaataaatcgttaatcaattaaagctttcaatgcacgaaagaagtatgcaaaaaaaggtatattttttatcaaatagaacaagtcaataacaaaacaaaataagttttgtatgaaaaacaatagggacaattaaccaaaaaaactaaaataatattaagataacttagcataagttttgatttcttaaattaaaatcttcatttagtaacataatatttactattagtctattactacttaaaatcaaaatcatctaaattaatgtttgagatttgttttaaaattatttattaataaggattataatttcagtttgactaaattatacattaagcatattgattatcaattttttcatgagattatcattataaaatataatatatcaaatattatagtttattaaagtaatttattagatatttacttataaactatatatttcatatttattgatgtttaaataagaaaaagagaaaaaaatataaaataattaacttatctctaaaaattttaaagatatgaatttagttttataacacataatcataataataatgattctgaaatgagtaaatttcatattaatataatttctcactcacataattaatatgacttaagtggggaaaatattttattattatttttatttaattatcttgatgtctaattgtttgcataattgattaggaaaatgaataaaaaagaagaagctatcaaaagtgaatagttaaagtttcatactttgaaatagtgacataaaaaaattgcatttgagtcaagttttgcatgttgcatatctcttgcaattgtttgatgcgtatatttctaaaaaaaaattcttaatatgactatccttcatttcttatctatacaaaattaaaaaagataaagaatgaagaaatacatctctttaattgacccctaaaacttcatggaagaatatatatatatatatatatatatatatataaagagaataataattctaattgtgatattagtgaggtcaattcatgttttcaataaaatttaaaatattttataagaagttacaaaatttagatcaattttatatgttattgattaatttaaaaattgaatgaatttttatttgccttcaaaaccaactgaccaaattagttgatgagatcaattgataatatttctagcatttaatccaactctaatcacgaatgaatatgtaatgctacttattcattggaaagaaaaaagaaataaaaaggctttaaaagtatataccttttacattttaggaataaaaaatacaactttttattttgaagttgaaaaatatatcataattcctagctttatatagattatgccatttgaaagtaactaaattaaatatatattaatccaatttattcaaaatttaaacatatgtttacaattttttttagtagatcacatgtctacaattattccagtcaaatcattgtctcgcatactttatttttatgatatcgtaagtataagtttatttgtaatacaaaataaaattaatgttttttttaaaaaatatattattgtaatttacatagatatataaatataaattattttaaatatgtgcataaattatgaatatacatataaattaaatatattagataattattatttaaaagtaaatattctaaaattaaataattatttaaaaaacaatttttaaatcaagactacattatctcttatttatttgggtttttctatttctatttaataaatatataaaatataataataataagagtaagaattagaaataatgaacaattttttaaaattcataatttttcaaaatgtttcaatactacattatctcttatttatttggttttttatatttctatttaataaatatataaaagataataataataatgatagtaagaattagaaatgataaataattgttttaaaaattcataatttttcaaaatgtttcaatctaattggctacaataaagttaaagtttcgatttaatggtgctaaaatgtccaagtaaagattacataattgaatcaaatcaactcttgttacaaaattaaaattttgatctatatgtaaaaacttcaagtgaaattatatatatatatatatagattgagattgtagttatatacttcctttgttctgaaactaaggctaatgtacacttgttaagaaattatcaattggtatatttctaaactaaaatacccatatattaatcacgttgttggaagttggacatccatttttggatagcggatagttaagagactatgttagtagactttcttttcttaaaaaatgttactaagattgagacaaaaactaaagtagtagacattctcattggtgggtggcggaaaattggcttcggtattcgtgccttaacaataaaaatttaattcattaataattgtaaataagggtataattgaaaaaaatattatgaatttaatcttggaattctaaaacagcaatagttttaaaaaaactaaaatgttaaagatatataatttaggaatggaaggagtcatttttaattccaaaatttaactatatatgttaagatatatatgatgtctataaattagtttgacttagtcttatctcatgttatcgaattttaattgaattgtgggtttacaaaattgaccctattaaaatttcaggtaaaaacataagtaaactcatcccacaaacactcctactggcgatggagaaatttgtcgggtaaaaaaaatgaaatcatttggtgtgtcacttgagaaatgtcaagcttagctaacatgttattattgggttatgtttgaaatttcatataccacatcatatactctctttttctcaatatttttgaatttttttagtatctaacatgtattttataacatttaaaattaaatatcaaatatatgtagcaacagtttaacaattttgcaattaaatttttggaattgttcagattttattacattttggaataaaggatgtgaaatgttacaagattttaacatttttgaaaactaaaattccataagataacgaacaaccgagaaaaacatcaatttgtaacgtggtttggaaatcacttctcgaaattacaaaatataattttagactattatttatgaatgttgttaacttatgcaacatttttatcaacatcatatatgccatgcttttatattatgatgagcaccttatttaactattgataataacaataataaaatgttaatacattggtaaaaaaatattaaatgcaattaatttatgataatgaaactgctaatcgtacatattatgggacatttggttgggaagaagttttttcatgtttggaaatcatgattcctgcaaactatgaatcttgataatcatatttcattgtaattaataaaatttgtttggttggccattggaatcttaagataaattttcttgaaatcaaagagttacccaatattttaagtgatttctacgaaaccttcccattttaaagggttttggaaccttggtctgtatggaccaatagattacaatcgcctaaaaaattgattccacatcatgataagttaataaatttgaagcttttgcaatttggtccctcttgtaatttatttatttttaaattaatttttaaaaattaaagcttaatgatattcctagtgaagtaaacgaataaagatgcaaaacacttgcagatcctttgtatttcctaggattttggataccatgtaggtgcactaaaatcttcttttttttttttttatttaggatgttggttggtggtttgtgatgatcaatatttgcataatcacgatccattgttagctagggtctttcgattctacgcaccagggaaccctctccgtgttgaatcggggttgtgacggctggttagtgtaattggaggatcgttcgattctatgccataaaatgcttgtgcgtcggatctgcgatcctattggaggtccatgggccagaaaaatctgggtcggatcccacattcacccttctcttctctttctctttggataccattaccaaaagccacaacacttaaagcaacaacacctttggatcctattgctaacctgctttttgtgtatttataaactaccatttttttgtaaattttttaggaaaggtactagatagaaaactagtggcaataaaattttcaatttatatatggctaagtggctataataatagtgagacatgcacattatgttgtttcagattgagaataagtatggagcacatagtaaattacttagagtcagggtccaggcttatattttgatattggaaagaacactagaggttttacaatgccaattatttgcctctttcattttcattttaatctttcattagcatcaattttgaactaatgatggtccatataaattctttatttacctcttttgtttatgttagatgttcttcacaaggactatgttaaacaaccaccaatccactataactacatattcttgaattggaatttaaatctctcctgtcaaggtaatatataccagcttttcaaccctcttgctattctttttgcttttctttaaaacgtgttattcttaatatagttgtaattatagtctactgaatggtccattagatattctaaacttagttatttattttgccattaggtgggtgggattaggaaactatggacatttgtcataaagagatttttgtatccaactagtgtacaaaaagttgcatattacaagacaactacacacatggtaacttaaatataataaaattgtaaagagggaaattttatctatatgttaattgatttagtgtacaaaagtcatgagacctagtttggtatggtatttgagcatataaataaagggaatcagttagtcctcaaagatgtacattacatcataagaaaaatatgaatatgtttgaaccctaaaatagccctagaatttcatatttaataattaagtcttcattttcattgtatctaactaatttttgggatcaaaatgatttcaattatagttggaaattcaacacttaagtaaattcagtgggtttagtgcaagcattggattatcgggagaagcaaaaataggatataaccttgttgcaaacatctatggtcatataggaactagaattctcaccctgggagataatattgcctatgacttatcaacaagctcatcaacaaggataactaacaatctgaatgttgggtttagcctgaacagtccctaccttgttgttatcgcaaccttgtgagctatcctacaatatagactaattttataaaaaaatgtagactagcatcagatttgtgatatgttaaaaagcttaagaatatatttataaatataaaagaacacaagctgtggtattaacaccttaaatgtcctacaacttaaggtttaatattccatgttgccaactcaacttttttggcatgtagttcaatctcaatttctatccattttaatctctttagtcttcagttcatgcttttagtaacttacatcaataaagaacaactcgtacctcctttactttagaagtatatacgaacctttactttttgcactttgtattccttcatcaaacctattccaaaacaataataatgaaattttttcaacttatgcaataataggaaatgttaagtatggttgtgtccaagtcatattggatataccaaacaattaaatccataaggttttgatgttaacaaaatataaattttatgtgataacctttcatgcttaagctacaagtttatctctctctatgagatacaagcagaaggtatgaacaaaaaggctttggactatagctaaagtaacagtcattggataatattgcctcaacgtccaatcctaagaagacaaatgctttagcacttggctcatagtacaaaggcaatggaatatttactcgatcctcaagtactgaaagtaatcatcaaaaagtaacgtccataggttcagtaagtaattcatgccatagcacacaaaagagaagattttaattatattgttttgacattcttaatttcgtatatcttatgttgttaatattatatttgatttgtacgctgaatgtaacaccctcatatttccctgtatctgtgtattttcttagaaacacgcattcttagataaatgacataaatgcccttggatatttttgaaaatgaccaaaatgtccctgaacaatttcataaatgacaaataggtccctaggataaatgactaaaatgccccgaacatttgcccaaatgaccaacatatccttatagctttgataaggtcatataagctctagtaaggtcctggaaacctgataaaatatagagtaatcctagataagcaattatcgacattatttgcgaagaaaaaccctaagatagaattattagaaattttgaaagatagttcaaggaaaaattgaatttaaaataatctaggttcggttaaagcacagaagaaagacagatacaatttaggaaaatttctcttcattatagtaggatgagattggttaataagtagtctaaaaatcttttactaattaaaaaccaaacgaactaatagaaaattagataaactattagagaaaaaatgaagtaaccacataatgaaatattactacaacctaccttaagttctaatttaatttggaactttaatctcaagaaaacaagttgaaataaggattataaattatgaaaataaatttaccataattttacttaattacaagatataaaatgataaatttaagtattaaattctttcaacaataattaaactatctaagcaaagctttagaccccttaaacaattttaattgaaatccatttagcataaacaccaaaacagccgtgcacctccaggaatgatgcagaaaattgtagaaacttggagaacaaaggccacttggatagcttataggctaagacaaatcttattggaccaaatggaagaaaagctttaataagtatctcctaaaatctaagccacttcacgtatgattaaaatcaagtggcaaaaagttaaagcttttaaaaaaaaagagaaaaaactgcacggaccaagctagggagctaaggaagaatatagaaagctcttgaatcaagcaaggaccaatgaaaattgaacaaacaaaaagctaggatgagatattttttcaagacaaagaaagttagcaatataaaagcaagtggggaccaaagtggggctggagaaattctgcacagactccacccacttcagccttccttttcacttctcctcacataaaatcaaaaagaaaacagcagcccacaactagagaggaacacgtgaagggttagaattttggacagcttgaaattcaacaaatactaaggtatgggaagctatttaataagcaatgattaagatagttgatagattaatttagcacctacttattgagagttaagcaatttagtctaccaaatgcttaattaaaattcttaataaagaacaacacaaagaattaattggaaagctgtctcaaataattaaatttatttagtggctgtatttgatttgttgtgttgttcttagcttgagggtgtagtaattaatattgttggtggtcatgttaaaactaataaggctgtataggaactgaaattttaaacaaataatgctttgaagttgtttagttatttgctgtaaataattagagtgctgtatttaaagttaacatatggctgttgctggatttgttagctgtatgttattatttaatttgtttagggtgctgaaaattttatttggtggctggaattagtagtggattgttgtatttaaattgaattaataggtcactgtctgtacaaaattatttgctgtctgtttttatgtttctgttttgaatattaactgctgtctgttttgaaatttatttgttgtctgtttgaatattatctgttgtttgtacgaaattatttgttgtctgttccgttttaatattgctataatctgtatgttatttaattgctgtatgttattctattaggtggttgcaaaattaattttgtaattgattatgctgtttagtattttaattcggttcatgttgagctataataaatctctaaggttcatcctattaattaggtcatgaacatatgattaaagattcgtactatatattgttaaagttgattccttaaaattatgggcacttacctttgatactgatggaagattaatttttagtgccaaaatatgaggcttgagaaataaaagggagaagagaaactgaaagaaaaatcaaatcatgcatcattttcatttgaccctcagagtggagggaagtttcactagagtgggtgaaactactgtggtaccctttttaccctcagagtggagggaagtttcactagagtgggtgaaactctttaattttaaccctcagagtggagggaggtttcactagagtgggtggaactattttgcttctggtaccctgtgaaaattatctaagatctcagtcatgcatcatttaataaagagagcatgcatcactcatcatgtatctgtctataaatattattttgtgttcctgtatatatttgttgtttattttaaagtttgttatgtatttattttattttctgtcaattatctgatcatgtttattaaatacttacccgagtgtgtctgtggttgacacctgtgatgaccccaatttatttgggcgagcagaggatcagtgagatgcttagatatggaggagcttgatgaattatgtgctgtgttttgacttgatgtatggatggtatcacctgctgttgctgcttttgggaagttctatactattttggtgatctgcattatattttgatagcctgtattctattatggatgactgtatcacggactattatatttacttatgcttaaataactctgactgtgaattatgttaaaattatttaaacgtagtaattcgactagaatagtattttatgtcactaaatttcatagaaaaaaaaaatttcgtaacgtaatagcgtagacaattcaatacgaaacaacgtaaatctaaaataataaaataaaaacgaagtcgttatactgaaagtcagctctgagcacaaggcaacactggcaagttgcacttctctaaagacatgctacaaaaagtgtttgtggtctcgacactctctctgcacagtaacgacctcatgtaaagtgctcaagctattagacaatggcaagctagcatctctcaatggatcgaaactttaaagtctatataaagcttgaagatgttcatgataaggttgttgaatcataagagaataatctaagtcaaaatgaacaaaatgttgtaatgttgtcagtttagttggacgaaggaaaattgagcaaattaagtgaatcttagctctgctaagttgacaagtttcattgtattcgagcttattatgtaaacactctttggatgattagaatacatttttcatcaaacatctcttgtttgtgaaagccaggagtgacttagtgacaaagaatactttagtgacaaacatctattgattacagtttgtacccacagaagatcaacttgcttatttatttagaaaactccttgccaaggataggttaatctctttaagagaaatccttggcatgttccctgtggaatgaagtttcaaatccatgtgtaaagccttaacacatcactaagcacctaaagaacctatcgtccaataagcttagtcagtacttgtgcactacacacatgcgtccaatatatggactgtgaccctggatgcaagtttagtgaagacacatcattttgagtgcacttgtgctaagtcacctaaagtgggtcaaattccttttgaaaaaacccattcttctcaacttccccccacgatcagtttttctctcttcaccctaaaagcttaaccgtcaccatcactcatcattacgtcttttgactatcaaaaacttctctctctcataaacctatttgaactctaacctttcttcctcccagaaacttcctgaaaccctaataatggctaagaaatagaaccaaccccaagttgtccaaaccgtacctgacttcagaaacaaccctctgatatcacgttgtcgacacgcaccaaaacaattttactaagctaattctgtagaataggattaacctaggtcgactcagagacacttatcaatatggttctagcttcaaatcactaataatagagaaggggattttatcaaacagtttgtgtgcgtaaggaaaacttgcaaaaacataaactaaaattaaagaacagtgcagaaattaacaagattcaaaagaagtaatgtaaaacagaatttaaaacatcaatccaattcacctcaccaagcaattcgaatcatcattgttctctgaaattaatcctatcatgaaagttcattcaatctcattagaagcaattcaatcgacttaacccctaaattgattgaaaccacaaccctaactgaaatatcatccaattaattatgtgattaatgttcgagattaggaaatgaattcataacctaatccattttcaatcctaaacgcattcataatcatgaaaatagaatagtaattgaagaagaagatgaacattcacatagaattcgaaatactaaaccagaactcaaattctccttgtgcttgggttggatccttgaattgattgaggatttagccttccatgatcatcatcagtgaaagccccatgaaatggttgcacgaaaatggaagaacagaaaaacaaaaatgaagaacaatgaagaacaagcaagaacagaagagagaaaatgaagaacaagagtttgattctaaaaaaactaaaggaatggaaaataaaacttgtttattgaaatgtaaagagtggtgcccaagtttcactaaagtcactaatatatgtagtgattgagttctaaaaataaaatgggccacaaacaagcccaacaatctaattatttgctatttacaaccatgaaagtcaaattcgcagcctaaaattacaagtgcagaggtgctaacttcaaagcttaaaatgaccctctaaattatagaattggcctcgggctatttctaggaaacttgtagatcttttcgttatctttctagggactcctagaacgctccattcggagatcgatagcaccctataggtcctgcacaagtcagatacatcaagtgagccaaaaatccgaaaatacgcaacaattagcaattaagcccacttacttgcctaggccaaaaactgaattagaataaaaaaataaaggtctaagagaggtcaaataagctaagaaggatagaaaaatactcaactaaaagcactctatcaccctccctctgcatcatttgaggatggttcccctgttcagattaccagacctgcacttgtgaccatccttgtttccaaagtcactatgaaggacaaggaaccatgagttcatgtcaaacacttgttcgatatcaaatcatttgaaaatgttggctagatcattaaagttcatctcaagccgtgtggcattcaccacttctttgaagaccctaaagtggtggtgcctgaacttatatgggagttacgagactactaaagtgtaaagaaacgaagatattggaggatattttgctggaaaagtgcttggcatccaagtgaagctgtttgttgagactattgctcaagccattggctatgagcgttgaggcaccaagttcatgaacaattgcagagatgaactacaaaccacattgggcactccttgtggggacctaattgggttaagaccccaaggcaggatggaacactgctgaacaaggccaaaaatcttttaatagatagtcaacaaggccatcattcaaaaacaagactaaaaggattttttgtccaatgcccacaagtttattatgtaccatcttatggagggtactccctttgactttccctagattctcttcaattgctttgtaattgaagtgatgaaggacaagagcatcagtaaggatatctaccatagtgttgtcctcactaaggtatttgaaatccatggtgtcataaggaagtttttgtatgagacaccaatagatgtacaagacaaaatctacctgaatggggtgtttctacctaaacaaaaatcattcagctaagagaacatttcaagatgagattggtagataaaagcttctttcaacaagttccctagatggatgactccatacttgctaaacttcaacagaagtttggactcaacattggatgagacaaccagttaaacacaatttgggagaaggctgctaaagaagaaagagttgacacagatgaagccattgctaaagcttagcagagaaccaagaagaggatggacgcaccttcgtccaaggttgcacctgctcaacatcatccacctcccattcttgttgctcccaacgcaacaggtgtcataagcaatgtgtccaaaaggccttcacctaagaagccaacacaagcccttcatccactgctaaaaacttaaaggcacttagtgaaactgagagtgacgatgaaaggcttcttgtctttaggaagaaaaaagttgcacccacttcagatgagacctctatgcctcaagtgaaaaaggtgaaccaatataacaggtttctcctcctcctactcatccttgtaccaacaaacgagaaaagagaggagcccattgacccaagcgtttagagggtgagcaatcctccattcctgctaatactaccaaggatactccaccaactaatattccaccggttcgacaacagacttcaactgttcaatagtttgaacgaagccttcaaagaactaagactattcattgcaggaagaagaagataattgagtccagtgctgatatagacgatgaagtgtagtatgaagcacctccatctcccatacaccttgatcgcttccaccatcaaggtccacctgtcgtagaccccaacctcacagctaaaggcatcgcaaggttgcgttttcccgtggactttctttctaagaattcttacaaaattcaaagaagaatagaagtggaattccaacctacgatagattggacgcaattcccacttgatatagaagaagaagaagaagaagtcacctactctccgtctacacacaaagtttctcaagatagatccaccaacagggatcgaagttcttcatccaccaacatggaagcgacttcaccccaatgtatccaagccttcatctatcacagctcaagacaaaatgtctataagattccttctagggcctacagagaaaaagtaagctatgataaggacatcatttgatggttttgcaagattgacacccaacagattagtccatcttctgatgatttcttgcctctttttctctgtccaaagcacatccagctgttgactcccatgtccaagtttattcccttataatatgtccatcaaactcccccttttactaaggacgatatctacaattttgggatgaatatgatgcaatatgggtttacaggtcaatagccaagctatccgatgcaccgtcgccattaagtttaggcctaatcgcatcactccaaggttgccacccttagacctcaggaagaaaaaaggcaaggttcatcctcacagtaagcccatgcctcatcaaggcccaaaggacaatattgccctgcgttcaattccttattgttggagcatgtactttataagggatactgctacgaagattgttgctttaaatccaaatgcagagtttgatcaaaatgacgttgtgctcttttattttaaagacatgtatgaaaactctcatcttgtgtccacctcagaatatgacaaggaagataactccaataagatatgtatggtgaaaatcttgcatccaaccaagttatacaacttcaacgattggcagatgtgcttcctgaggcaagaatgagataatgagttttatcaatgacttatccatgatactcctcttcgcttttggtttgtctttgacttgcacaagtactctgaagttgcaatgggaagagtcattgtcacagcttgggtaaggtttcctacacttaaagagcatccattctcttttgatcaaaacgcttgggttctaggtcaagaaatgatgactggactttagaggaaataagacaaagtaaatcgccaaatgatggaggtgcaaaaaaaggccgaagccaaacaatagaaggagaagctcaaatctgaagagctgttccacaatcttcatgcacatcttagacgtcacccgatgcttttgaaactctgctgattgaagttagttcacaacctccacctattgttgaagatgccttagtaaccgtcagcactgccaatactcctcgtgagacaactcccgtaaccacctttgttgcaattggtgtgtctgaagagagaattcaagaatcgttgcaccttcaatatgccaacttggaagaaactatggaaagaagtttccctgctaaacacatggagaccactctgctgatcaagaacaccttggaatcatcactcaaatccttcaacgactcattctattcaacatgaatatgctgcgacaacgactttcccatccattgaaccagctccgccaccaccaaccattgttgtgcaacctcatcttgaggttcctacattagaggctgcaataattgcttatcacgtacatgtgcctccgccttcgcctccaaagtcaccgtcttccatcccttaactgttgatttcaattgaagccaagcatcaatgaacaagattcaagcttcaaggagttttgagctttcaacatgaccaaaggctaaagaatcatgggaagctttaaagaactaatttgattaattgtaaaagggagttatgatctgataatccaagtgtgcatttcatgtcattcattattcattcatctaggatcattagattacatgaattgatcaaaggcagcacagaaaaggttaagaattttaggaaaaaccaagttttactgaagtaatcgattacatactaattggaatcaattattttgttcttcgtgccttagaaaaacaaatcaagaacaaggtaattgattacagatcgaattaatcgattacttaagctaaaatatgaaaaatgcatcattcgatcttaatcgattacaacatttggtaatcgattacaagcctgccttgagaaagccttacctactggagtaatcgattacatattggtttaatcgattacatagttcaaatcagaatataaggtcactctggcttaatcgattacaacaattggtaatcgattacatagtacattttagagaaacaggtcactctggcttaatcgattacgtatcggaataatcgattatttagttcatagccaaaatccagaaagcatcaggaacattttaatcgattacgtcttgaattaatcgattacaaatgataaataatcgattacaggagcgtgtttaatcgattattatcagtaaaaattctgttataaaaaggacttctcagactgaagttcacagctttcacaattattgagttttatgaatcctaaggcattcacacatgttctgagctttcattagtgaatttttctctgttctaaacacattaacttcaccaaattcatatgggttgttgaatcaagaaagtgaagtctcatcattcattcaaggcataaggaaatgtttgaatatgtttgtgtgatcagtcaatcaacctgagtttcattcactttgcgtacattcttggattatcaggtgacatctttccttgtcctttgttggtgtaaactgttctttgaattctttcaagtttttgtttattgtaaaatggatttcttgcaagtgtagagatagtgtttatctagtttttgctgagtagtgttcttagcaaagggttggtctctaagagtctaatagggttttagacttctaaactttatctagggttgataaagagagacttgtataattgcttgtaagaatattttgcaatagtggaactctactctagtgttgagtagaagaaactggatgtagcctcataggttttgaggtgaaccagtataaatcatttgtcttgatttatctttaacattcttggtaattctagaaattaattctgttgtgtgaatttatcttggtagtgtttcaagtcttgggttgatcattggataaagtttgttcaagtgtttttgtgataaagatccaaagggcattaaactctgatttgtttttgaaaactctgtttttcattgagaaacttttattttatcaagactaaccaattcacccccccttggttaagtgtgaagtgttccttatttttcacattaacctccatccactaaaggctgacaataatgcttaagtcatttcctttttctccttaaacctgtatcttttgataatgacaaagggggaaaatgtagaataggaattttgatttgtaaacacttgtacttacctttttttaataaaacaagtgttatggtggtgacatacgtttgtttttcatgtttttaatttctctactcatatgctatgcatgctctaattaatacatattctctgatacatgcatatggtaatgaactccatgaaagtctcatttatctcaacataatctgctcatgcattctcataagatatttgctctaattatgtcttagaaagatctccttatgctctgatgcttaacaaatttgttgtatatcaaagttacattcttcagatacataaataaagagtaagtggtgtacaacaatacattctaaacacttttggtaccttgatctaatatcttcatcatatcctttttggtatcaaagttcatactatttgccatcatcaaaaaatgggcgattgttaagtctagctgcatccaagtcatattagactataccaaacaattaaatccttaaggttttgatattaacaaagtataaattttatgtgataacctttcatgcttaagatacatgtttacctttctctatgagatacaagcaaagggtataaacaaaaagactctggagtattgctaaagtatcagtcataggacgatattgcctaaacatccagtcctaagaagataagtgctttagcacttgactcatagtaaaaaggaaatagaaaagatacccaatcctcaagtactgatagtaatcatcagaaagtaatgtccataggttcagtaagcaattcgtgccatagcgcaaaaaaggaatgatttaaattttcttatcttgacattcttaattcattttctcttatgttgttaacgttatatttgatttgtatggtggaagttagctataagcataaggcaacactgacaagttgtacttctttgaagatattgttgctcattcggcaagtgcaccgatcgttccaagtaataaaatgataagtagagtatcgtccacgaggattgaggcaccaaattcatcacaactatttattttaaattggataaagaaaggttgataagattgagttttaatatcttgacttaatgaatacgaattcaaaaacaacaagatttggattttaaaaaaattatgtataatagccttctctctctttcctttagcccttctctctctttcctttcttccttttctctgcttttgccattgatgaactaaataagcatcttaaacactcaaccgttgaccaaaactcttcacacccaacatgaaagttgaaaggaactactcaatgagctagattccgtcatcacttttctctgaaaaccatcaaacagggagatccagttctctaggggaattcacaaagtttgattctaaggagaaaagaaggcgttttaaggacgttcaagcttggaaaagctgttctctagcctttcttgtcgatttagaggtaagaaactcaagttttaccgtttgatttgtgaaattgttcttgggatgaatagtgaccactttgtgatagggctggaattaggcttgggttctttagaaaagtatgctcaggaggttgttctaatgaatattaaactttgaaacatgacttttgatgaagtttgggtttgactctgagttatgtatgaataggaagaatgttgatgaaatggaaggtgttatgatagatatgagcctaagtgcctttacaaaagttgttcaggaggctaaataaacggtgaaaacgtgttgaaataactgttttagtcaagttagataattgttggaatatggtctgattagagcattgaattgaacttatgcagagtctaagtggactctgtgatcttggttggaccaagatagatcctgttgagggtctgtgaatcgcctataaggtggttagctctgaaaacactaagatagagaacagagagtttttaatggaaaggaataacgtttcctttcattctaacggttgaggaccgtttttgattgattgtttgtatgccttgtgtagggtgtgatagtgacattgctggtggttgtgaccacgaagccgggagagccggtatagcgctgagagcaggtaagctctttgttcttggaagtattttccttgcttgtgttccaccataccccaagggggtgacggtcattgtatgtcatgtgtattgaaattgtgtgttactgttttattgataacatgtatatgatatacactgtaatgttgtgttattgattgatgagttttctttggctagtagaatagagtactatggatttctgttggaaatgtacctgtcacagatgatcttccctcggaattgccataggtatccaataaggtcttaagggaatgtacctgttcagatgatcttccttaggcattagattaagccctaagggaatgtacttgttcaaatgatcttccttaggcattggatgaagtcttggaggattataccactgggtggatgatccctctcagaccatgtgatatgtgtgtatctactatattgttacacctgtgttatgatatacatgtgatatgtttatgggagccgtgatggctggattgtgtgtgatgccaattttgatactatttgccatggaagtgaaccagggggaggaaagacctccaaggaccctgagtttactgagattgttatctcacccctgttgggggattatgttttgcaggtgatgctcagggagtggctgataaatcgcagggtaagaggcccgagctgggatagattttatgagaatcttaggcatagtaatgaagagcatgttggctctatttttgttttatgcctatgttttgtaactgataagagatatgtacagatatactttgtatattatgagaattcaccatatatgatgtacaattgatgttgttaatgacgtttgatgacgtcatttttgtttactgcttccatcctcattatccatgataattgttgcgcttaaccaccataagataatgttaatgaaccggatgcatacaggtcgttacattatgagagagaattgtagcaaagacacaccccgttttgatcccaacttatctaattagattgattactgcattcaattatactaattattcagataatgcctctttacttgaacactagttaaagactaattccttagtaactttaaccctataacccaagtaaaaatcctaattccttagtaattcctcttcgatcaagcattaagtgagatgcatcaatttatctacaactttacatccctatccctagggtaatgtatcgattgttattccacctttgtcagaaatcaaagccccaataatcctattgtgaaccctaactctcagaactttatcaaagtgatcaatctcaataaagatatataattcatataacacgaggtgaaacaaaataatttaacataaaagaaccatagaattcaatccaatattaaagaagttcacattaggttgtgaccctcactacaatagagaatttagacaactctattcatgattggcttcaagagtatgaacacgatatacctaagccaagaatctcaaaggaaaagaggaaggagtatgacccccttcaatcttgatttgatcttcttgacctagcttcaattaatcaccaagctgcctcctttgctcttgttctgttgttcttagtgtagtcgttctttatctcttcccctcagtccatatttataattaggtcatcgaatctatccaaaacctcctattttcgtgcaatatcaattcaaatcttgaaatctcgtgtcgctggggctaatggcgtggcttctggcgctgatagcgtgacctgcttaaatgttggcactgacggcgccacatctcacgttggtagcgtgagatggcagtggaatttggcacatttcaattccttggcactgatggattgagacatggcgcttatggtgccacattccagggagattgccttatgtttgtttcatggcgctgatggcgcgacttcccgcgttgatagcgtcagacatcaaaaaccttggcttcttgacttttctttccttcactctttctcttgattttcctgctataaaattacacaaaatgagacatgatgtgaattggattgaatcaatcaaaaaatccacaaatgaggttgattatggttccattatgatcgattcttgcttcttttagcttgaaaaacattgtatgctagacgcatatcaaataattccaagatttaaatgttgctgtcctcagcaatatcaaaagttcacaatgggaagcaaggatcaataatcaagcacaacattgcactaacaatctcagaattactatgctagaatatctgattttcacatcaaattttcaacaatacttttcaattccatcaaatgtgaagtctaacttgaatacccctcaccaagatatatcattcactcatcactcaagtgtttgggtattatcataatatctccatccaccacaggcatggtattaccataagcttgatcatattctcaaattcctaaagatgaggaacataaacacatgcacaatttgatcaaaaggtcttgataaggttgtaacttggctaggcttaggggtatgaacatttgggaagtagctgaataataattgattgggacattgatcttctttagactcattcatatctcaattgggaattagttctccactacttcttttcagaattttcattcctttcttttcttttctctcatttacatttgacttctttctttttctcctgtgaactattgtgtagtagttcttttctttccttttgcattttacttctagtggtgttcacctggatctctttcttcttctttttaacccaatcaaggattccaatctcaattaaggtaagtcaatgggcatggtctaagcaattcatcaggtgattgaatgggaaaagtctcaggctcaaagggggtagcaatgaaaaaatttccaggtaggctagtttggccctggcaaaaagaacaaaatgcctttatcatatcaaagtgtacatgcattgtagagaaacatatcaagttctagaatattaccatagtgaggtctttctaaaacaaattattttctgtataagctcaattctcaaatgctatggtatcaagctagactcttcaatttcatatcaagtatcatttcctatttcaacatgtaattcagacacaaaagcaattataatctcaaatcatgttcatgcaatgccataccataattcatatcacacatgcttcctaaaattcagtccgatttgactactgatttagcacatctaatctgagattaatttggatatgcttctagaattttatttaaaacaattactaaaacctaacaattaaacactacttgaaaattaaaattccgtgtttaaaattacatcccccactacaggcttaatcatcataatcatgttgcctttccttttgacgtcaacaaatttacctctgaaacttctatcaatcataatttcaactccatttcgattcttggttgtacctatataccacaacttgaaactggtgccctccacttccttaatcttttctccaacccacttagtttcttacaagcaaacaatattcactttccttctggcaaaaacatcagctaactccctcagtttacccgttaatgttcctatgttccaacttcccaatttcattcgaaacccctgggcggtgtttgctcgtcacactcgcccatctgcatattgtgacccttgcctatttgttaccaaattcgggtgaagacctggcgccttgcctttcggcatggaccctagctcacttatcactacatcccaggatcgatgtagcgctttgccttgtggcaaggaccctaggttatttttcgctacacctggggcccgatgtaacacgtcgctatgaagggtacaccccaatgaaatatcataaaggttcatcacataaaaataattggttttttacagctggttagtgacaaatatatcataagacattcaaaacatttgcattcaaacatattcttattttaaatattttctcttgacaaaatcacctagtaatattaacaattagttataattcactggttgggctaacccaaatcagtttgtcattttctgtggttagttgttaagtggtataaaagtgtctagttaccccaaggtcagttgagctccactcaaatcagaaatgaaattccccaaacaaccatgagcgaaaaccaaagtgaatccagaacgccaattgtttatgctagcttgacaattttttggagaaaaaatatcaattattagaaaattcaaatcatttttttatgaaattaattgaagattagaatggcataccgtgggaaacacaatagcaacatctgacccaaatttagattctagctttacaactccaatagtgttgtgaagatcaatgcaaacaggcacgggaaaaaaagacaccaatatgataaacaaatgattcaaactgaaacttaagaatgaaaaatgttgaaaattagaatttgcattgcaggtaagcggcctaaattagttgaatccaacatatgcaaaattcacatatagctcattcagacaaataaaaaaaaaaaactgcaccatgcacaaacaaaaattgatctcacaacaaatagaaagaaaacacatcaaacatagacttaccagttaattcaaaaaaccagactgatgatgaattcatacttgcatcatggggtcgaccatggtgatgtcagcgctcccctggaaccatatttcatttctactttctgatcctgtaaaataattgtaaaaaagaaaggctccttagaagatggaaacaataagctcaattttgaaaatgaagatacatttaaaggaaaatgatagacaatttttttttaagaaaaaaacaccttagtttttacaaaaaaaattgatgcttataacctaccaataatatttcaaaaagacaaataaattataaaatatataacatgcagatacaattgatggagtggtcacttgtaatgaatagaacaaaattacttgttaatttgcatatcatatactaacttcaactcatatcaacaaaaagctaaataaaccagaccaaatatatagtttaatccttaaattaaaagatgttattcaaactgttgtggtccttcaagatttttgtctatacaaatagccaaataggtcatgaaagtgttagcttgctaacaagttcactctaccaatgtaataaacttgctaacaagttcatatctttggggatcaatttgtaaagaagaaaaaacccaaaacacatacacaaaattacatgacaagtaacatctttaggttcccaaaatctatacctttccctaaaacaaaaacagagaaaaagaaggcagcatgaagcatgaatgtatcaagaatttgtgtttgaaagctaccattttcacatataacagttaaatgatcaaaagttacattcttttattaatagttaaatgtgcttttaagaataaacaaatactttaaagtactcgagcatataccaaagcaaaagatgttaatggtaattttaaatcttcttatattttatttttttcttactgaatgaatatatttttatattttaagatatacaaaatggtagtggtagataatttgtttacgaaacaggtaatttcctatattgtcttttctattgtttgtgaccactaatcattagcatcataaaacttaaaatacaaaagataaaaggcatcataaaattatcttcaaatccgaaatattttattacggtgatttccttccataccctattccaaacacgacacagtagcataccatccatcttcccccaaattattcattccattcctttttttctttttcttttttttcccaataacaataataatcaatccaaataatttccatgaccatgcccataacactcttactccaagccaacccctcccacttgaaatggaaccaattaccttcccttcaagcgtcaaatgtctctccttgtcgcggaatttgaataacacgttgagtttgcagtccccttgggaggttctggcaagcacggtgtcgaacaccctgaaaaaactgaccatagctgtggtgttggtggggttgttattaatgggagcaaggtcattttcttcttcgtcgaggatgattcaacaaggtagaccgaagcaactcttcgatcagctatcaccacatcgttgccgagaacggcatagtgcagtgccaaggacttcgatcgagctcatggttccctttttcggcaccgtattacgggccttcttcattcaatgggacttatgtggggcgtcgaagtcggtgctggctcgagtttctttttgatcttagtgggattcctggcttttgttttggtttttggatttctttcggatctcttgcaaagtaaacgacacgcgacgaaggaaagaagggagggggtgacgtagagggaaggggtttgggttaaggcatgtgaggatgaaaggagaggaatggggtgagggaaatgaaaagttgaaaatgaaagagtagaggaacggggggaatatgaaaagttgtaagttgaacacgaaaattaaatatggtttctttgtaaaccgaccttaagtatctaagttcaaggacgattttgaccaaaattgtttttgaaaagatattttaaagacggttaagaaagaaccatctttgaaaacttgtaattatttacaaaaatatcaccgctacttaaatgacgacagtttttttataaccgcctttaaacaagcatagtagaaagcgacttttgtagtaatgcatgatgtgaccagaaagataagtcaatgcaaaatacaagttcatcttattctattcctttttcttgttgattaacaatcaaattactatttcttatgtaactttccaaaatatctaatcaaggtgaaccattatttctctaaaaacaaagttggagcttaaggtgatgactaccacttattgttttcttgattcaaaatcttgatgttggaccttccaagaccataccatgaggtagagttgaagaattggtgatatttcaatttaaaaaatattaatattaaaaaaatagagtccatcaataatatattaaaaaatatttatataaaaataaataaaaataaaatattattttctaaaaaattgcaagagttatgtgtggaattttatgtggatttaaattagtaggaaagttacttgcggatatcaaattcgcaggaaaattttatacggaaaaacatatggtggaaaattgtataaatttttaaattgcgtgaagtttattatctacaaagattttatctgtaggtgttaatccacattaaacacgtttccaacgaatttttcatgaaaagctgaaagaaaatccccatagaggaatttcttgtaatgagttatgtcatgacatattttgccattttaaagttagaaaaaggagacttgctacaaacaacacaacccttcctcaattcaaccattttttttttatctcaattgtttttgtacttattagcatttctttttcaatttatttattgtcgtgctttgcctttatattactcatttatcattctttgctcaagtaaaatttggattatgttgtaaaatcttttttccaataattattctaatgtaaaataataatgtccaagaggtagaattttaactactcaaaatactaaaagtattacttatataataatgaaattgtttgttgttttaaagtgtataattgtatcatgttctgtaatcgattattatagaaacattcaattttatgaaaatgagtttctatgcagaataattgattattttgattatgtaatcgattacaaaagctcagatttcactctgaatcatgatttaagtgattttaatcgattaatccgacacttaatcaattattacagagcaagtatcagaaacaataggatttatgccgtatgacatggaaatttttaagtttttgtgatgaaggattcaattgacaaataatttcacatgaaaagacatacaacattcaagctaacagagattagattcatccaagattcctagcatgtttctaagagcatagaatctatctctagccaatggtttagtaaatatatcagccaattgattatgagtgtcaatgaaatcaattttgatattacctctttgaacatgatctctgagaaaatgatgccttatctcaatatgtttggtccttgagtgcattattggattctttgaaatgttgatagcacttgtgttgtcacatagcacatatctatttaaattgcattgattcaatttattatttataagaattaattcgattgtaaaaaatcaagaattcttaagtaaattcagatttatttcaaaatttcaaaattagtgtcattactattactgatcaataaaaaaatctataaaaagtaaaaagcgaagggaaaaactttcatttttttatggtaaaaaattcatttatacctgttattttccaggattggttgaatttcaaatatttaaatttaccactagaatacgaagacttacttcacattttgaattgcaccgaaaagactatttatctcaaagaggtttacgtaaaattttgggaaaacgacaaagattgctgtcttatttgttaaagaaagatagaatacggtataaaaaattaataaatcagtttgatattagagagtcacaaattcgttaaattgaagagtaattctcaattattcgatttattagatcttgaattttgatgaacttttttttaagcgattcataaaagaataaatcgaggaaaaatctatgaatatctcaactacaagaaaggacttcatgatagtcaacatggggcctcaccacccatcaatgcatggtgttcttagacttcttgttactctagacggtgaggatgttattgattgtgaaccaatattgggttatttacacagaggaatggaaaaaatagcggaaaaccgaacaattatacaatatttgccttatgtaacacattgggactatttagctactatgttcacagaagcaataactgtaaatggaccaaaacagttgggaaacattcaagtacccaaaagagccagttatattcgagtaataatgttggagttaagtcgtatagcttctcacctactatgactaggaccttttatggcagatattggtgcacaaactcccttcttctatattttcagagaaagagaattaatatatgatctatttgaagctgcgacgagtatgagaatgatgcataatttttttcgtatcggaggggtagcgactgatctaccttatggttgggtagataaatgttatgatttctgcgattattttttaacaagaattgttgaatatcaaaaacttattacgcgaaatcctatttttttagaacgggttgagggggtaggtgtagttgatataaaggaagtaataaattggggtttatcaggacccatgcttcgggcttccagaatacaatgggatctccgtaaagtggataattatgaatgttacgaagaatttgattgggaagttcaatggcaaaaagaaggagattcattagctcgttatttagttcgaattggtgaaatgatggaatccataacccctctttggtagaagtgattctttattgtaaagaacccatttcagtactaagagtgggttgataacccacagcagaaggcattcgacccaataaggcagatacttcagatcctgtttgaacgaagcggaagatattgtcgatacatagaagttcatcttgttcattgacatctcaaaatattccgccatagtcaaggcagttaaaccaactctcatacgagctccgggcggttcattcatttgaccatatactagagctacttttgattctgcaatattttgttcattaattactccagattctttcatttccatataaagatcatttccctcacgagtacgttcacctactccgccaaatacagatacacctccatgagctttggcaatgttattgatcaattccacaatgagtaccgttttacccactccagctccaccgaaaagtcctatttttcctccacaacgataaggagctaaaagatctactacttttattcctgtttcaaaaatggctaattttgtatctaattgtataaaggcaggcgcagatctatgaatgggagatgttgtgtgagtatctacaggacctaaattatcaatgggctctccaagcacgttgaaaattcgtcctagagttgctccacctactagaacacttagggcagctcctgtgtcaatcacttccattcctctcattagaccatctgtcgcactcatagctacagctctaactcgattatttcctaataattgttgtacttcacaagtcacgttaatttgttgaccaataatatctcgacccttaactatcagagcgttgtaaatattaggcatcttccctggggaaaagctacatctagtacgagaccaattatttgggcgatacgtcccagattttttttttcaagcgcagaaacctcaggaccagaagtagtaggattgattcgcatataaaaatatatccaatttttttccggaaaatttttgaaataaaaagaaatgttcgataacaaagcaagttgattggttaattcaataataaataagaaatgggagttagtattccatttttttgataccattcgaccaatccaatttaattgtttacttatttaatttcaataattgaattcttaagtttatcccagtcattttttaaatttcaattggataaaatctttcgaaagttttttatttttttctatcattatagacaatatcatctatattctctatggaagtcgaacctcaaccttatttacgattcttttttttttcaatatcattttgtatttcatcagtagacaatttatacttagtatatttttttacctactttttttttccggggagaagtctgcctatttttacatctaagatttacatatacaacatatatcactgtcaagattaagagttaattttttgattatttagattagatatttcgattccaaaattaaaaaaagggataagagattaaaaattgaaaaaaaaaaacaaaaattgggttgcgccatacatataaaagagtatacaataatgatgtatttgacaaatcaaataccatcatttaataataacgaactttggggattaattgacaatattagttgattatttgggaaagattcctatgaaatgaaagatttcattaactcctaagtcatgtcgagtagaccttgttgtttcgagaattcttaattcatgaattgtagggagggatttatgtcaccacaaacagagactaaagcaagtgttggattcaaagctggtgttaaagattataaattgacttattatactcctgactatgaaaccaaagatactgatatcttggcagcattctgagtaactcctcaaccaggagttccgcctgaagaagcaggtgccgcggtagccgccgaatcttctactggtacatggacaactgtgtggactgatgggcttaccagtcttgatcgttacaaaggtcgatgctacgaccttgaacctgttgctggggaagaaaatcaatatattgcttatgtagcttatcccttagacctttttgaagaaggttctgttactaacatgtttacttccattgtcggtaatgtatttggattcaaggccctgcgcgctctacgtctggaggatttgcgaatccctactgcttatgttaaaactttccaaggtccggctcatggcatccaagttgagagagataaattgaacaagtatggtcgtcccctattaggatgtactattaaacctaaattggggttatccgctaagaattatggtagagctgtttatgaatgtcttcgtgggggacttgattttaccaaagatgatgaaaatgtgaattcccaaccatttatgcgttggagagatcgtttcttattttgtgccgaagctatttttaaatcacaggctgaaacaggtgaaatcaaagggcattacttgaatgcaactgcgggtacatgcgaagaaatgatgaaaagagctgtatttgccagagaattaggcgctcctatcataatgcatgattatttaacggggggattcattgcaaatactagcttggctcattattgccgagataatggtctacttcttcatatacaccgtgcaatgcatgcagttatcgacagacaaaagaatcatggtatgcactttcgtgtactagctaaagcattacgtttgtctggtggagatcatgttcacgccggtaccgtagtaggtaaacttgaaggggaaagagaaatcactttaggttttgttgatttactacgtgatgattttattgaaaaagattgaagtcgcggtatttatttcactcaggattgggtttctctaccaggtgttatacctgttgcttcgggaggtattcatgtttggcatatgcctgctctgaccgtgatctttggggatgattctgtactccaatttggtggaggaactttaggacacccttggggaaatgcactaggtgctgtagctaatcgagtagctattgaagcatgtgtgcaggctcgaaatgaaggacgcgatcttgctcgtgaaggtaatgacattatccgtgaggctagcaaatggagtcctgaattagctactgattgtgaagtatggaaggagatcaaatttgaattccaagcagtggatactttgtaagcagagaattaattgcaattaaactcggcccaatcttttcctaaaaggattgagccgaatacaatactacaaacaatactacaatacaaagatacttattatctaaagatacttattatatatatatatatatatttatatatatatatatatatattagtttttgttttgtattggaatagattggaatagaaacgtagtaagtagacgagattttacgaaaaaagttattccaatttctaagagaaaacgtctatttccttttttgatgtgaatttcatataatagggaggttactttatttttttctatttctatattaaatttatattttcatatttatttatagatttcgattatagatttcgataattttttataagtttttagtttagaattcgaatagtttagaatgcgaatataataaaatttatatatttaaagaatttttgttataaataattataacttataacataatatttcaaaatgttaagttatgttggattggtggtagaaaattaaatgagattgattgaaaaataatgggatgagatggattgaaataaaaacatcattttattgtttgattttttataatgaaacaaaacaaaaaattattctattatttgaaaaaatgataaaatggaatgaattataacttttaaattcatattattattcttatactaaagatacttataattaaataattttataatctagaaatattgttctatcaagtgcaccccgaattgggggcgggaggtgggaggattacggttaagcagtgtaatagatcatgatttatcttcttctattatgttttattcctatttttacaaaccaaacattgtttgatttgaaaaaataaaattttattttttaattataaaaatataattttattggttatatttttgtaattaaaagtgataataaaataaaatcttaaatcaaaccacaccctaaacttgtctcatttaccaatcccaactcccacatttatgtctgccaatgtgtttgttttagcagtccaccagtacttctacaatgcactcgatcggctttgtatttgctaaacccaaagacgtcccatgccatcaagaaattaaaaacacacggattttgtgtttcctcatgaaatgtattgtcaaagaggtttccttttgtcatcatggtgtcaaaaatttgaacttttcttaaaggtatgcgaaggcattgattgatgagctctttagtatttattagccgggtctgcccccaaagtgtttggtattaggagtgcagatcaagctacgaataaaataaaatatccaaattggccgggaaacattcttacccaattgcttgagaattcctacttactctatgttaaatgttcaatgcatgctcaacttttacattaaaattaatttgaagatacggatgattatttatatgatatatcataccgagaataaagtttctctgttgccccttggatcaatgatgcaatcacatatcttggctatcagatgcttaggatgcatagagattatggggcagttattttttttttcatcttcaaggacacagattacggtcggaagtaattttttttgtatgatgcaaaaaaaataaagatgtttagattgatctcattaattccatgctattatgatacaccttttacaccttaccaacacctcttttcttcccaattatactttaggtcgcttcattttatttctcatcgacccttcatttatagtctccaaccacccctcctaacaccacccccatcattgtcattattttcaatatcaaaactggtgacaattgatagtagtagctatggtggtggagaatcaacgatgtcttgatggtaacgatgtttgctgatttatagatttgagctcgaatcgtctgtcgatagtgcatggtgttcaacggtggtgtatcaacaaggaagagcatgatggtaaaactagcgtgcttgagcaagattgcttcccatcaaaacgcatcacgaaagcaacaaattcgtcatatctacggtgctccacgccgaccaatgccacacaccaccacaaaacccaaactcgaggcaccaccacgaaagccaaatgtggtgtaccaccacaaaatactgtttgacaagatcttttagagatttgccgccaatagacacgaagtggtgatgacacaacggtagtttacatgacaaagtgaattgacacaacccagatcatagagctctattttttcttcttcttaaatatgggtttgatttttctttctcttcatgttgtaatagttctaaaatttctatttgtttagttaatattgctgttgatgcatcataaagacctttatcttttgtacaccatacacaagaatatttacttttccaccataacctgcgccatcttcaagttgttttttgcattgtaatcttaaaagagaaaaaaaatcctaaaatattataaacaaatttataacaattttaaatttaaataatatctcaaagataaaataagatttgaaacaaataataagttcttaaaaaataaattaaattctttttctaaactaaaaatacaacactatagacatccacgatcagattcctttatatatctactaaatttgaaaagaaaaaaaaagtttattccccaattacaatagaaaaaaatgtttattgggattgtgccgtggtgaaagtgagtgggtatggaaacgacagaaaaaatattatttgctacacgtaatatctaaccctgacatgttgcccatctatctcgtgaaccatagtaaaaaaaaatccaagtactttctacgatcgagttacccgaaagaaataagaattttccaagtttcaaacggatacttataaatggtagtcgtgttttaccctaatcacgtgagatatatctgtcagacattgcatgaacaatttaaatattttttgttgcattttaattatttaaattcttttaaaaaattacattgattgcatgaacaagtctgtatcatataatatttgtgtcctgatgtatcgtatccatattttcttggactgttgttcgtctataaaatgaacaactctactcgttatatctaactatctattacctcgagcgggacagctgaaatattttaagatttcagctgtgttttttttttttaagaacttaatctttatatattattctatattatcatttaattataaattattatttgaattattttaagataattaatttaaaaattaataaatttattagaaatgatgagtagttgtgatgtgtaaaatttttataatattaatattttttctttttttaaagaaacatgttgtttgagaaatcatcatgtaggctaattaggctgtgtttaaaggttaattaaccgcatattttaatgggtcaggttttgctttttactataaaaaaaaaggctttaatgggtcagattactagcaaattaagcagcatataccctaattatctgctatcagatatgaattgttgcaaagtttgaaccgatcactgttccaacagccagtaagtttatctttgacaaaaatgtatcgcaagaagaaacaaatctgacactcaaagcttctcttttgtggggcccttaaaatctaattatctcctaccccaccacgctgattctctattcctagatcagattaatcaagatcataatattgctagttgctaccctgttggccaattgacatgtgggtccaaaatggctatgggtctgtgctctttctgctctcacatttacttaatgtacccatcctttgtggctcccctccacagacttatcccacgcgcctccctgttgtcattgatagtgaagtacttgattggctcgtctctcccattgcatccctggcccatcatcaatcatgcacacaaggcaggcttaccttagactcaattttctatcaaatggaaggttttgaattcaaaatcaatcattaaataggtgggaactagtagtaacactttcctttgggagtgactaacgaatatgactaattaagtgcgtgttacgttttttttttttttttgaaaaatatctaacaagtttaagtataattttgttttttctgtaaacatatactataataagtatgaaatatttaaatatttactaattttattaataattattttgtttgaatatttaaccgatcatttttaataaaatcatctttcacaatcatattttttcattcatcaaatttgaacataaagtcttacttaaagattttaaaattctaattgaaaaccaaacatgttatcataaagcatggctgagtttgaatacctaatgaggcaaagtttagttttaaaaggaaaacgtttcctcaaatgaaaccacttcctaagcaagtaacggtgtaggtatacattctcatttattcatttcaaaggaaacatatccatattgaaatatagacaaaatttagataaatctcttcattgcttatagtattattctcttatgaacatcataatgtgtactcatttttatacttacaaagacatgataaggtagttaaaaaataggaaacacattatgtttttattacagaataataccataaacactcggcggaaccttatcatcaaaataaccacaaactttaatctttactttatataacgtttataattgagcactacggcagcatttggttaagtaatcaaggctatgcttattaaagtaaaaacttaacatacactccagtcaaaacatcccaatgattatgctttgaatcattactccttactcctatacttggaaattaaaccaaatgataatgaactgaaagagacttatccttcatttattacactatattacaataacacaagataatttacagttgacatcgctgataacagaagaaaaacacagaaattgagaaggtgtatataccaaatgttatagtactataaattctatgaagagagtctaacagagcacctgaagcatccctactcttgagactaaatgtacaataacaacttcaaaaaatgcctaattacacaggaattataaattaatactttggtatcctccccctccccccccccccccccaagtaataatacagaaaatgagttgtcaagtattcatttaatcctccttattatacattatatatttcataaatttttctaaacatttattgtatatacttgacaactcattatgagtattattctcataatattaccatgacatgggatacactaatacagtaattaatactaataatactacgtattaggaagtagccggagaacccaccagagagaggtaaacctgactctgtatcactgtcttagcgattttgaaacccggcaccaccgtgaaacccaccctaagctcgccggagctggaatcagaggattccccggaaggcgaaacgggttcttcggtgacactctccatgtacacctcagagaacctcgtgttcttcttgatttgaaagacggtgacataattatcctgaaacgacaatgccaaacaatgcagggtccaaacgcgctttgccatctctgcaaacgcgacgaagaaagaagaatctgggtaccctccagagttcaccaccttcctctggttcaagttgccgaagaaggaacactccattttggcgtgcaccacttgaaggtacttggatttcaggaacttggagaaggaagagtttgggttgtgggttaagtactgttttggattcaacgatttgagctttttgaatttgtcaaagtagaggctttgtgctccttggttatgtaggattttgtcttcttggacgttgaagtttgggttgttgaagccttcaaacattgttatgcaaacaaatgattcaaacgcgaagatttggtgagttggtttggtgaaaaccgcgttaggatggatgaacttaaccgctgcttcgagatcccaatgagcagattccatttccgccatcataatcttggagaagcttctgactgatctcaaagtgtggtgaagaaaatgaacaaaatgtgttggactcaacgatgaaagtgtgaggttatcaaacaacgacaatgagccactcgagttgagtttcttttcaagcgatttgttgaagttaacacagtcgtcgaggtgtttcttgagcgatgagatgttattgtccttgaactcaacctcggcttcgagcctcttgatggtgatttcataggttttcatgagactttgttgttcctgaatctccgcgagcataatagtaacttgaggtgagagatcaagctccttcttcaagaacctgcgcttcaactccgagatggctcgaagttcatccaccacggcttgatccgcagcttgaatggagtcgttgttgtaagggtgctgagccatttggagttctgcatatgctgctttgatggttgtgacgccagcgaagagtctcgcgattagagcctccataactgctctattcttgttgtttccttggtggggtttgttgttctgatcggtgaagcgatcctccttgactttgaggtgggagttgagcatgcaaatgccattgtttgatgcgagtttcgttgcacttcggaggcttatcaccttctggaacgtctttgccagtttcttgctcctaacgttgagtgctgatttgggcttcatggtttccatctcaagacaaatattttcttgtttgaagaagcataagagttttgtgtgttttcacagcaaaaattgatgaaatccaataacaatgggagagaaaatgtttgcagtagcaaaaggagattttggttggaaaagcaggtgcaaatctttgactacaacactttcaaatcagagtctttgagcggaggatagagattggtagtgtggtgatattaatatataaacatagattttatgaaaataatgggagggagattaagtaaataggagtgtgtttaaagcgcgggaaaaggaaaaggacgaatgctttagctttctcatgaaagatgttaaatactccaaggtaggcttgtagtacaagaactttgacatacaagccactgattatctattttttcttttctttgcctacttgtttttggaataatatatctgtatagctacccagagagatgatagtgtggggcatattgccttaattacgtgattgatgggtatgatctaattgtggaccctattagaattcaaaatattgataaaatcataatatatcgtatgctaggaaaaaattataaataatgatatatgtttttattaaaagagaaaatagaaaacacacaggcgaattcaaaaaatgtgtgattatttgttaaacatgttttatataaaattaagtgattgaacgtaaataattaatgtgttgaagttaagttgaatcatttgaatattatttgagttaattttgataaaaataattgttgatcaaattttatttaatttttgatcaaattttagattaataatattttttttcatgatgaattagaatattaaaaaaaacatattttatataacaaattcatcaattaataataaaagtctattaattaaaaaaattataccgttgcaaacttgcaataactgtgaatctgtcatgcttgtgactgatggaggacattatgaaacatgtgagggataggaatccgggagctgttgttttctaatgttcgtaaactagaaggtagatgcatgttaaatatctttttatttgatttggaaaagcaaatgatggttaagcgcgcactctgcaataattaattatttttgcttatgaaacaatggtaatcaaagttttgaaccgttttcgtttttcattattccatatggcaccgcaacaaaagtttcaattaattattggaactggttcattgtaggtatgtgaacatgaacggctacatttgtgtagctaagtagctagcctgaataaagtttaccattatccaggctttatgttaaaaatataaaatgcgtactacagatatagcttttatttgtgggggacactatagtcagaaacattattgtggtttccaaaaagctttttcgacggtaataaaaactcacaagggatgaaggaatattacgtaagcagcactgcagccagcagcagaaacagaagcatggaaaatgctctgcatacattttcttattcaatgaattcaatatcacaactttttaaaagtaaaaaaatgaacaacttatgtaaaaactaaaatattattgagttacatttcttttggtacatatgatcaatgttgtctatcttaattttacgagagaaaattttaaatataattattataagtaatattttttaaaacatttaatataactttatatattgataggaattctcttcaattaaaaaaacatcatattcatattataagtacgatgactcaaaaaaacattaaatcgaagtccaaaaattctctaaataagaattattggatcatcacttattcaatgaatagatataataaaaaaaatcaatgaatagatataataaaaaaaatttaaagaaacgtttatcctttgatcaaaacaaagataaactcttggaaacttgaaacaatgaaaattatttcatttatttttagacttacacttgtaactatttattaagttgaaataacattgtgtcagttgattgtgcatttactagtattaagttacattttcatttttgcaagcaatatgatgacaagtttggtaatttaaaaaaatgttttttattgtttaaattattttagtttaattaatgattttaaattcaaattcgaaatttgtaaattaaatattaaagaaaaacattatcatctacaatacttttatctaagtaaaagttacatgtaacatatggtccaagtcaaaatgggcaagtaccaagcagaaaatgttgacatgtcataagtacttcgaattcttttcacactaagatatacaataaactttttcgtacaataatttgggttataaatttaaacttcaaaatcattgaaattaatgaataaataaaaattaatttgatagtttctattacttattttcatatgttttattaaaaaattgattaaaataagccaatattttgttataatttaaaataaatttcagtaaacccttccaaatatcactgtttgattttcttttcgtggattattatacttgtttggagttttgctactattaagtattcagagtcattgtctttgctggaaaatactgtgtccaatgcccatgttccgctcaaagcgcgaaactctttgccatagggttcattgtccaatgtccattgtaggcatgtgatcaaagaagctgagcacgagagaagcagaaaataaattgattgtgatgaaaacttttttttttttgtttaaatatatatagttgatttttgaaaatattttcagtcaccataattttcccatgaccccttaattaacactgttaatattccaagaaattgaaatccgtagtttatacatagaaagagtcacgttttcttttcagttgtttgagaggagctgtctcttgtgtgtcttcgaatgcgtcaaatgaagaagagttagactttttcttcatgttttcttaataattgcaaaattgttgacagagcaagaaaagaagctaaacgatgtgcttccctttttacgtgaaagaactttggcttttctttgatcgcgatcattgaattaaaatgacacaagattgcaaatattatatatactagtggaatcttgtcttgtattggaattgcaattaatttcaatttgatatgatattatatttttctttagttagttctacttagctgtagttcatgaatcccactgaagttaacaatatgggaccaaggttgcacattggtgggaaaacatcacaaaagagacacagccgaaagaatgatggtgactgaaatatagcctcaggtcttaattaaacttacaggagatggggtacaacatagtcaatttgggacagtaattgtaacatcccaactaattaattaattatttatttgttttattttaaattttattattttatcctttagtcttttaagaaaaaaaaatataaattgagataagaacaagaaaaactaaaattttacaagatcatgtattagtaaaaaattggtcgtcataaaatttacaaaatataaaggagtggtacattagtccatgtctctggtataaatatacaagtacaaattttttttccaaaattctcaactataatttatatactataggacttcaaacattgttatttatacacaagagtcgcagcctagtatttacacatagtcttcggtactgtctctgtcactgagaactattatggggtctgtgactgggtttggatacattggtacaaactgagagaacggatctgcagggttaaaatattcactaaacaccgatactggaaaatgggtgccaaaataaatatgagcacgcaacacaggttgcatggtaactacatagcagttgcggacttcatccatacaccaggcgatatccagagcatcaataaagattatgattgcagccatctaaaacattaaataaaatctaatgagaaataaatttctcagtaggcaaatctaaaccaccaaacacgttagaaagttagtaaataaagcaaatttaattcaacatacattttagcagattagtaaataactcaatatatctgaatgaatgcatgattatatgaatgtatggaaatgaatgtaattgtcacaggtgcacatggtctctacatatcgtactgtatgtagctacatctcgtactggatgtagacgctgcgatcgtcttacgcaaacatgcatgaattcccatgtagtagcaccagataagtagcatatgcccagtttcccacatttgaaactcgggtcattctcataacttcataagatatttctctttcataacataagatagatatcattttatgcatcgttcatgtaatagtgtatcccagaataaatttaagagctgctaatgttatgatatatatatatatgtatatatatatatatctacttatttttatatatatacgggaataaaaccggaaggatctgcatggcataatttatacgtagaagttatcttaaaatcggagtggtagtattcttatgacgcaaggttccgagataccgatttttgtttagtttatgcatggctcgtagagttgagtgccgaggtgcgtgtaggggttcggggtacatgtatggtgagtggccgaggtccgaggttcatgcttggtgagttgccgaggtctgaggtacaggcatggtgagttgtcgaggtccatggtgagttgccgaggtccgaggtacaggcatggtgagttgccgaggtccatggtgagttgccgaggtccgaggtacaggcatggtgagttgccgaggtatatatatgagatcggcagggccatgtggccgggctacataggtgaccgagatgcatggtggctgaagtgcataggtgggtaagtataatccggcatggctgaggatcgagatgttggcatgggttaagggtatgaccggtcttggtgctgcagccatatatattcgaacgggtatggccgggcttgaagagatgctatccgagttacaagagtgcataaatagttgggatgagtgaatccggaaatgccgagatggattgctcggctcggacgtgcatatactggtgagtgtattttttccggtagtgccaagatgtgtgcatatatatatgtaaagaagtgggtgtttgacaagtgagtggatccggtggtgcagaggtgtagagtaatggtgtagctgagagtgcagtttgccaaggtaatggtgtaataagaaggaaaagccgagatatccgatatatccgaggtgctgtagtgtaaaggttccaaggtctctactaatatttaagcctcgaatttacgtatgtatactattcacctttacttggaaaagctaggccgagataaacaaaagttggactttgcttttggtttgtcattatataaatatatatatattacttagctattacctttggtgccgtgtttaaaatttatggccccgtagtactatttctttaatttaaaacgttagatgcttaatataatattattatcttatagacccaaattactaataatttaagctctacgttattgctagcttttaaaaaaaatcactgcatcctatattacatttctaagcataattttctaagttaattctggttaaataaacatctaaataaaataactgttaaattaaagattgaagcctagcctaccttggataaatttgatgaatgacttagagaactgccaggataattttgagagagaaggattttacttaagagaagatagtagagaaagtttgggaagactggaagttgttagtgttctacgtatagaatttgatggatgcaggagtatttatactaatttatttggttgaatgacaaccggtaagatttagtttagttaatatgtaactaatttttttggaagatttttatcaaaattaatcattacattcttctcctcattaatgcatggctttacgtggaagcttgatggataaaatttggttctactgatgacacttggactcttaaaagattgtattaaggataggtttcagctgaatttcttcacgtggctggagttgaatactcaagtttgattcttattctaaaaattatctttgatattattatctattctgttattatatttttaaatcacatatatatacatttatatatatttgagggtattacagtaatggtttataataatatcattgctttgtctttaaaatgatctgaacatataactaacaagtttgagttgtacaaaaaaaagtatgatcatttatcacttacatttgactttaagctgaactgtggcgaattaatcttgaatataaagttagggattatctaagacatataactatattcttttacttggattttggagaccagaagatgatagaaattaaaattttccttttatttgatatttaatgtacataactattttgaagaaagactatgaggcccaaatacaccctaaatttatcaagtgtttgatccatctttaatcttaaaatttcctgttcatattaggcacactccttgcaaaaataatgagtcatcataaggtaatgttaacgagtgcctatatcagtttaacatgttaattatttcatttttattcttttttctggagattattgtttttattccttaatatattaaaggtactgttcattaaatttttaataacaataactaaaaatcatagcataaaaaacagtgtgtccaaaatgtttcgctatctaaatgtttactctatgtaactattagattgtataacaaattggaatgttggtgaacacggaggtagtttaatgattcagcaatgaagccatgaaggcatggctttaggtctaagaaaaagatgtaatgcctcaaaatgaatgatattcgtatgtttgtctttaacatctctcaactcattcatagtaattttatggtcttcgtcacgtccgacattcaagttataatattgcaggaatattattagtctaacagtgtccaaagttaaaattatcgcatcttattaagaatagacgaagaagtttcctaatactaattattttatcttttaagatccgtttccacattatattatctgaagtttaatatcattggttactggttagattgttgtattgcagaaaagtgatcgaggtccaggattcagtcaaaggcaccttgatctaattgattcgcatatatatagtacatattttttttttgggtaagtggcatgaagttgtaaatatcaaaatatgtttgttcatatctcacatagtcacattcatttagggctaaatcaagctttggattagtattattagatttgaataatgcataattatatcattgtttgcttcttgggcgtagcaattgtaatggccgggaagaaaaatcatttgtcctcctagattcaaactttgattgtatggcatgcagctatattatttgcattttgtcgttaatgatgaattctacgtcaagacttctactgttatactttgtagccttgtagacgtatttagaacctacctggataagttatatatatatatatatatatatatatatatatatatatataaaatatttgaataagttgatttaaaaggacttttaaaagaaaaaaaatgaaattctctattaagtcaaattaacttatgtacatatgatgctagctaaacaaagagcgtttcaacaaataaacaataacaacttatacaaacaggcttaaagcttaattaaaaactaatcaaatgattgaatataagtaagtaatgtactaaaattaaaattaaatagttaaggtaatagttgagttaaatttttaatgaaaataatttttgatcaaattttacttacctcctcactcgaatgagacataatctttttctcctaataaacatgaaaacgttaaaaaagctttattaaaagctactcatattagcaattctaagactaggtaaaacacaaaaacattgcctattacaggggacttttttcaagctggacttttttcacttttttctgtggacaatcgatgggttgttccttcctacacctccaagttgtttcttacattctttttagaatgtctgtttttaccttttaaattgatcattccagaaataaaaatctataatcaattcaaaatttaattttacattctaaatggatcattttgggaggaaaaaaaggagtgctgaattttaaagatacaggaaacaacagtccaaccggtgatatggaagaagaataacattagctcaaattttaagttgttctttcgcctccaactctttaaacccactaagcccaaattcatcgtggaagattttacttttttttttaacttttttttatttttattgtattttacttttcttcttgaagcttcctaattctgcaaaacatgctatcacatttttctaaatttctcgcgcataaactaagactggtagaatgggtctacttgttctaggttgttccaccgttgattaggtagggtgagttgccttaggttagtaatgtaggtcaaaaatcctaatacgtccagacatcctatttaacgacattttggcaggttgatgaattcatttgccaaaaaaaataaattgaattggcaaatgggtggattaattaacctaaaaaataataaaaaggatgaaagattataaaaaataaaaatatagatatacaaatattatctaaaacattttgaataactgactacataaaaaatcataaaatattagatcatcaatatttaaaaacatatcatcaccatacaaacagtaataccgtgttcacaaaaaaataaaaacccagtaatccttgtctaaaaaatctacaaaataataaaattccgaacaatagtaaataataacatagacacctcatagtacgtttattaccttttccgtctaaaaagaaaaataaagcatgaaaaattcaataagaatactgttatatatattttataatatcttcttaatgctagttagtcaaaattgtcgtcttagagaatgacgtacgaaaaccaacgcataacctaggaataatagaagaaaataaacatgtaacaaaagaagacgaaacatagagatgatgggaagccagaatgatgtgaaactattgagctttgagttgagtccagttggtcatagagttgaatgggctctgaagctaaagcgtgttgattacgagtatgtagaagaagatatcttcaacaagagcaatctccttctggaactgaacccggttcacaaaaaggttccggttcttgttcatcaccaaaaaccaatcgctgagtcactcatcatcgttgaatacatcgatcaaacatggaagcagcagtatccgctaatgcctcaacatccttatcaaagagctcttactcggttttggggtaccgtggctgataaggtaatttgtcacaccctctttctattgtaattttttaaatgttttcggttcattttttacgttgtaaatttctgaaagaaaggaaataattgcgaactcaccttcactccttcataagggattaagaataaattcaaatcaaagaaaaatttccttgtttatttatgaattatatttatttaaagaatatatatttttgtatagtttgctttttttatttccttcatatgcaccttactcctcgttgagtgcagagacagtaaaattcccttttccctcttaatacgtataagaatttcttcgcagtgaatgcaaaataacagaccaccggaaaaaaaaaaaaaaagaagcaaataattaaaatgttttggcctttaaaatgactctttcgaaacccacattgaccaacatagaaattgggcccaagtactcaacaacgaagatttttttcttattattaggtacatgacaatgattttactgtcaatcaaatttggccatgtgcattttatgtagatttacacaactaccattaatcgaaccaaaaaaaaaaaagtaacttacaatgacttaaaaacaaaactagctgccattaaccaacaaaatcaggtaatggtttaatagtaattagatatttagattttatattctaccgtacgtgcaatatgaagtaagccaaaagaaagaaagaaaaccactccctctagcttttacggtggtatatatacacatacacaagctctattaatttgataactcattttcaacacctgttttatgaatatatatgtaacagcttgcgaagacatcatatgttgcaatgtgtagcagtggggatgaacaggaaaagagtgtgaaggaagccatagaagtaatggataaaatagaagaagagattaagggcaagaaattctttggagggtacaatattgggtatcttgaccttgcatttggatggatcccttattggcttcctgtttgggagaaagttgggtcaatgcaaatagttgacccattaaaacattgcgccatctctgcatggaacaccaattttctcagccaccctgtcatcaagaactgcttacccccaagagacaagatgcttgcttattcccgccgtcgcaaacacgagttttcttttactcttcgtcgttgagtcatgctttttcctcaatatctaattcaataggaaaatgtttggtagatacccaatgtattaactaatatctagagagagtaaaaaaaaaacttatatgtatgattagagcttacaatatgatacgaagaaaaatatacaaagaaaaataagaagtgttattaaaatgtgtaaaataaaagatgatttctgaataattatccaattcaatatgatttaggcagagggaaaacctataagagtcaattcagagataaaatcgaatagaaaaaataaaatctttcttttcactaacctccagtaaaagaaattaataggcacgctaggattgactcaattgtactgtacgtttaatcttgggttgtgaatcatctgctgttaaataaattatataagccatgaaagacctacttacattttgggttcgtcattcctgcccctgcatatctctcggtattcaacatttaaatacatataaacaaatattcaacatttaaattaataatttgatgaaaaaaatgaacggaaagaaaagttgcctaagttaatgtcaatcaaagatacaaattgagtactatgtttattagtaaaaacaattttttcaattaagaaatcatattaaagtaactatttttttcatgtgttgaagtaagatagcgtttccttccaaaaaaaaattaaggtggcgttatggactagccaatatttaaattaaatgtaattattcatttaaagaaaaaattgaatgctaatttttaatttcttaagtcaatgtcaaatacagataaaaaaaaaggtaaaggtctgattattgaaaactatatgttacagtaacttcttttttttaaaaaataaaaatgcaaatatattacaataggcacaaacatcaacaaggtggtactcctactctcatctatcatttagagcacacttaaaatttactgaataaaagagaacaaaacaaacacggggagcaaaaatcaaactcattgcccaaaaagctaacatctaaaccactatagttaggcaaagctaacctattacattaaatacgttcaacattcaacattcaaaagttctaaatgtattaaatatttatagaattatacaagtcataaaatagttttcataaagcaatggatacatattacaagataaaaacggcattaataaaagagaaccaggtcaaggtgacaagttaataatttgataattaattttcataaattacaaaaataaccaaccaacacattaaataattaacagcaaaagaagaaacacaaggagaagaatagaaggaggtgaagctctgaattctaaaacaagatgtgtagtgaagatagtgtgaagctggtgaacttttgggcgagtccatttggcaaaagggttaaatgtgccttgaaactgaagggtttaacgaacggatacaaattatcgaatccgtaagatttttgtaagtttttttttaaagttaaaatatattttttcaaataatttaaaacaatgacacatgtagaactcaaatatatgaccttagatactccaaccaattaagttaataagtcaattatgttaaaaataattaatgttgatatatataatactaaatttttaatgtatatttaatacacatataagtttacataataaattatgttgaaaatattaaagtaatagcatgagaaataactcaataatcaaaataaaattcaaattaaattaattatatataactcaataattgataaaactaaaataaaagagaatcctatttaataggatcataactaacaattatcctaattaataaaatgaaactaatatccctaattaataaaataagaatctgaaataagaaaagataaaaaattagataaactaaataattaaagatttagatgtgtattaaatatatctcaaaaaatttagtgttatatatatcaatattaattgttttttagtataattgatgtattaggtcagttggtttgaacatcgtgttaataacttgaagatcacgtgttcgagtcctacatgcatcattattttaaattatttgaaaaaatatatttggttatggagttgaacccgattcacaagaaggtttcagattcttgttcatgcccagaaaccaatcgctaagtcattcaccattcttgaatacattgatgaaacatggaagcagtatccattattacctcaagatccttatcaaagagcactcgcttgcttttgggccaatttcggttagcaaaaggtatttttattccaaattctctattttttttttgaaggtttgttaaaccaatttggagattccatttgacgagataattcttgtaaaagcattttacatccatttttttacagttctaaattttcttagagagatactaagaatgaggatatatgttttattcgtttctaaatttttagaaacaatttacatatcattaacgaataatcggtggatgacatcaaaaagcactagggcaaatttgggtaatataatgttcatatttcatgcatattacaatgtgatgtttgattaaaaaataggtttattttgtaccattttttcttttttgagatttacaatgccacgtacactttcaacaaattaattatttttcagtgcctcctaatttgtatatatttttatatactagcttatgagtgcagcacgaaaagcaatggcaaccagccgggatgaacgcgaaaaggctagctcttaaggaaacgagagaactaatggagaaaatagaagaagcgattaagggaaagaaatattttggaggggacaacatagggtaccttgacattgcacttggatggatcacttactggcttcctgttgtggaggaatttggatcgatgcacataatagacccattgaaatttccagccatcacttcatggatgaccaattttctcagccaccctgtgatcaaggacaatttgcctccaagagataagatgcttgtttactaccgcaacttggttaattaaggtttagatggatgtatttgacaaattatgaatttaataaaactactagctcttgtaaaatgtttttcataaattatgatgaatttattaaaaattgctcgtgtaatgtttttcatcaacaattaagactttgttgttaatttctttatagagtgaatttcccgttttaaagagttaattaaatattaatcttttataaagaataatatctttattagttgaataaaagttatataaactatgggagtaggtaatagggaataataaataatttgggtttgtaatatgtagtcgtcatccgattacaaaccctagcctcttcttggttgtattggcgtgtgtaatgcttattttcattaacggtatatacaagatcgagccttataatattggatacaactctatctagctagttagttatgagtgaagttcgtgagtttgatggtcaaattatcttactcgaatacaactaacgatgatggtaacagatcataataaacttatcttcatccatgcaatctagggatggaaataggtcaagttgtctatcaggggcctttgccctggcctggtctagtttgtttattataaatgtcaagtttggactttttgaaaagtctatttaaataaaaaaaccgggctcaagctttacaaaaagcctgttaggcctgccaggctaccctatatatatatatatatatatatatatatatatatatatatatagatagagatattaaaattaaaaagatataaatcaatctttttaaaaaagagataaaataagataagataaatctaaatagcttatcttactatttaataaaacttacgatattttactttgcttattttgtttacaatattttgttgaatactgtgttatgattataattcttaattgagtttgttgtaattagtgaattttaatctcatattagagtgctctaattaattttaatttttttcacatacaaattaaaagggaagtatgtcaatatgtgtatttctttatattaaattaaaaaaatattatgcaaattctcgaagtttcactaatatataatatttattgtaaaataggctttttaataggttcataggccaagtcagacttttaaatagtctaagccaagcctaaaaaaataggtaaataggttaggtcaggcttgatgtttttaaataaggccaagatcaaaattaggcctaaccaagcctgacctgacctatttccatccctaatacagcttttctaactagcagcaaataaaattataataagttccatctaattaatgtcagaacccatctctaatgtaacattgactattgaatatgctaaatatataaatagttttaaaactaagacaaataactaacgactgaaaacgacccttatagtgcagtccaagcatgatgattacaaaagatagtagtaaaacatttcggacaatgttattatggcagggatattttcgaattatatatatatatatatatatatatatttttttttcaaaacatgtacctaacatatgtcagtccgtatacatgtttatgtacttaattaacataaacaattaataatacataattgtttgaataattttatttatactattaattatgaagaatataagtaagaacagtttagctaggaaattagaaaaaatcacgttaattgttggatagtgagatgaaggtgccaagtgcaatccaatccaacgccaatattggtcaaatttgtctgccgtaaccaaccaacaaaagataaataactaatttgtgtatgcatattgttgacgagaaacagtgaaacacacatattaaagagacacgtaaactataccaaattaaaaagagaggcgtgtaaactataccaaattaaaaagagagacacatacaactacaaatgtattagagatatagaagaaacaaattaaaggaattgaaattatattttgaaagaagatgggaagcgaagaagtgaagctgttgagcttttgggtgagtccatttggtaaaagggttgagtgggctttgaaactgaagggaatagagtatgagtatattgaagaagatatcttcaacaagagcaatctccttctggagttgaacccggttcacaagaaggttccggttcttgttcatgcagaaaaatccatcgctgaatcattcatcatccttgaatacatagatgaaaaatggaagcaatatccattgttacctcatcatccatatcaaagagcacttgctcgcttttgggctgcaactgctgaagaaatggtaacttattaaatcacgccccatctctaaatgtcttattattattctttatttgtttttctttctaaaatgaacttgaaggttccatttccaatcgatgattttttttttttatatataatttgcagaggttaccatttttccgtttttaatttgcttgaaaaaacattgggaatttttttttagcttctgatttcctagaaattaaaacgaacaatttactgttgttttatgttttttttttggtctaaatattaatcggtatattttatgtacacttttctgtactttttttgtcactgaactctttttttttttttattcggtatagtttttattttactttattcggattgtactccttatatgctatagcagtgatagcagtggttttaaacttattagcaacaatttttttactgtagttatagcctttaagaaagttttagtggtgcaaaaaagtaaaaatattaaaagatcaataattaagccatagctttatgatgtatgggtatatatagttccgatttcatgcacataccaaagtgcgatatgatgtatgattgaaaaatagatttattttatacaaaaaaggattagtcttttaaaaaatttgattttgggatacagaaagccatatgagtaactaattttcaaatgcctgttttgtgtgtgtatatataatgcatatatatagttcaggaaggttgtatcgattgctttgcgcagccctaccagcggggatgaacgcgagaaggctcttaaggaatcgagagaagtaatggagagaatagaagaagagattaaggggaagaaatatttcggaggggacaatattgggtaccttgacattgcagttggatggatctcttactggcttcctgttttggaggaagttggatcaatgcagataatagatacattgaaatttccagccaccactgcatggatgactaattttctcagcaattctgtgatcaaggacaacttgcccccaagagacaagatgcttgtttacctcaacgatctaagaagcaaatatatagttaagatgcatgaattggtgaaggactagatttgttcctccaaatttatgtatgtgatactttcaagatatttggattggtttaaagcatcgggtcaaatctctggctaagttatcatcttctagatttacccttttgaagtggctttgatctttgatgtcaattatcctactgttatgtagcttaactaatatatttatattgatggcaataaatcataattcaatgtctttagaaaattgtcatattaatcgagaattcactcaaggtttgtttcacgcgagtctaaaagttttagtatcttgttgtgggcaagaggatcggcacaacaaaatatgagaaatgatgaaaatcaggtggtaaaatatgtagataaaatagttaggtgacaaaatttgaaaaaatatagaaggtaagttgtaaaaaatgtgtagttaatgtttttttactataataataatttgagaaaaaaagttgttggaaagttagcgtccaagttatgataaaaaaaaccatcctaatgccatttctggtcaacaaggaaatgagaatgataaaagagaaccagccgacacattaatcatttgcgtaattacgaaaataaccaaacaaaccaacacataataaatagagaaaaagaaaagaaggaattgaacctctgaaacaagaagatgatgggaagtggagatgtgaagctgttgagcttttgggtgagtccatttggtaaaagggttgagtgggctttgaaactgaagggaatagagtatgagtatattgaagaagatatctcaacaaaagcaatcttcttctccagttgaacccggttcacaagaaggttccggttcttgttcatgcccacaaaccgattgcagagtcatttatcatccttgaatacattgatgaaacatggaagcagtatccattgttaccttaccatcctcatcaaagagctcttgctcgcttttgggctacttctgttgaacaaaagttttttttttttttttttctctttcaaattcccttaatttttcttattgaggttgaaccaacttggagattccatttaacgagataaatcttttaaaagcatattgcatcctttttcgtaatttgtatttgcttagagaacgaggatgctttttttttcctttctgaatttttaaaaccataagaccatgtgtctgtctgtcattaacgaacaaaaatttatgactccaaaaaacaccaaagaaattcgactgaagttcagatttcatgcatatgcaatcacaatgtgatgtttgattaaaaaatagcattattttgtacgatgttttttacacaaaaccacactttcaacaacttattattttccaattagtgcttgctctgtatatatttatatataatacaatagcttgggaaggctggatgggtagcaatgtctaccagcggagaagaacaggaaaaggctgtgaaggaagccatagaaatgatggagaaaatagagacgactgagtgaaaaatgtgcatattcgtaggtaagcaaactggattgagatctgatattccaatccaaacccatgtcagtaatctgtgtacattattgatcgggaaaactattttatgtggtcaaagtttatatacttttatatccatgaattttgtccttaaactttaaaaaaataatacgtagatttagtctattctctttaagaatttatcatgctttttaacatattttcttttaagtttaagaatcaaattcatcttgtggtgatttaatatgttctttaccttttcataggtgatttacagagcacggttctttcgaccagggattgtgcatgtgaggttagtgtagtttagcactgcttttgttcgggttttaagaattcatattgctctaatgaagaatcaacataactcacagagttggcttggctccacaccctccatttgcacccttcaaaatatttccagtacttcacaagggtttgagctctgagataagcctgaaatcattgcattccaagaagtaatatctctgagataagtctaagtgacccatctcacagtacatgtcaacaagtcctcgttaccaggttttgtgtgctaaataattgaaaaagttacgcatagagagaggtgaaaacaaataccacaaaaggtacctaaaacccccgcatcccatcagactgtctgactgttacataagcctagaataaatccaagtaacttctgtggatataaaaacataattagaaggatatacttgtgatcatcgacagatattaattagcagttaagttagtagaaaaaagacaagaaacagtacatcgatgcaacaatggttctaattaagtgaaattaacgtgctaacttgaaaatcaaaaggccagggccggtcctgtaaattttttgattcgggacgaagtggaaaaaatgggcccttattacacatttttttgaaatacaaagaatattaaaattaagggatgaaagaaatgggtccttaacacacaaattttttgaaataaaaataatattaaaattaagagatggaaaaaataggtccttaatacacaaattttttgaaatacaaataatattaaaattagggatgaaaaaaatgagtctctaacacaaaaaaaatagatctctaacatacaaattttttgaaatacaaataatattaaaattaacggatgaaaaaaatggactcctgacacataaattttttgaaataaataatattaaaattaagagataaaaaatgagtctctaatacacaaattttttaaaatataaataatattaaaattaaaagatggaaaaaatagacccctaacacacaaatagatctttaacataggttttatttttattttattttttataataaaaaattttacttaaactacccattcaaaaatttttggaccctgggcggaggccctgctggtcctgccccagggccgggcctgcaaaaggccttaacttcctttcctataatgtgaagtgaatcatctgcacaagagtatgaaaatgacacgttgttggatattcattttgagtcagaggtggaagtgaattttgaaacgaagtccatttggtcaaacttgtccccacatgagaaaaccaaatgaattacaccgataatttgcataaattacgagaataacccagcagacacactattaaaagagaggcacaaagaaagaagtggtgaaacacggaaggaagatgggaagcgaagaagtgaagctgttgagcttttttgcgagtccatttggcaaaagggtagaatgggccttgaaactgaagggtgtggagtatgagtacatagaacaagacatcttcaacaagagtagtctccttctcgagttgaacccggttcacaagaaggttccggttcttcttcatgcccacaaacccatcgctgagtcattcgtcatcgttgaatacgttgatgaaacatggaagcagtatccactgttgcctcaagatccttatcaaagagcacttgctcgattttgggctaatttcgctgagcaaaaggtcatttctaaacccccttttagcttttgttttccgccagtgggtttggcagatggcatttttttcttcataaatattaaagtgagaaactataatttttatttttaatatgtaattaataaataaataaataaaattcataaaaaacttactatgattctttgaaaattaattttaattcattttttcgtaaaacatttttaaggagaaaaaaagaatctaattttatcgagtaaaaaaaaaagttttagttatatattttacataaatctttaattctcatgattcatattaaaattaactaaacatatttaagatattgtcaagaattatgattcttaaaatttatatttcctgagtataaaaagtttcttaactaccaaacacctcataaaaacaaacctatagattccaattgaggacccaaatacattcagcttattgcatagtttattttatagaccattttatgtatcaaatttagactacaaagactagataatgtagcaaattctcgaagtctggtttggttttttaatacaattgaaatattgtgacagcatagagtttttgtctttaacaaattatcatattattaaactaattaacttttataaacctaatttaaaagtcatacatacaatattatctaagggcgtacttagtatgaactttttatacttttgatattttatttcatttgctttttggaatgaaaatgaacatgttattgtttttctatgttactctgtcatttattatctatatatcaagtgagttattcacatcttgttcgaaaatttgaacttaaaacaatataaatcaaagtgaagtgtggtaggccgaaaactcacgggtttcagaatggctcagacagctttagagaagcttcctttgcttcagtgaaagcattgatttgtaagccgtgattttaattcataatataggagcacaaaattattttttgacttcttttgggatatatatatatatatatatatatatatatatatatatacacgttaaactctattcaattaacttgtttttcaatgacatccatgtatgtaagtaataacttatttttcaatgcttgccttgtgtgtgtataacagcttttagatgaagcatggattagtatgtatagcagcggggatgaccagcaaaaagctgtgaaagtagccagagaagcaatagagaagatagaagaagagattaaggggaagaaatattttggaggggagaatataggataccttgacattgcacttggatggatctcttactggcttcctatttgggaggaacttggatcgatacagataattgacccattgaaatttccagccaccactgcatggatgaccaattttcttagccatcctgtgatcaaggacaacttgcccccaagagacaagatgcttgtttactaccaaagtcgcagagatgggctttcttcaacttttcagggctgattcaaggtttaatttagatctattcctattcctctatatgtttcttatggtccatgttataggccatgatattggattgccttagtatcataagaatatgagggaatcatactagctaagtttgtgtgttggggttttttgtgctgttattttctgcggatgccaatagcaagattgtggattagtttgatgtcttaagttcaaacttgtggaataattttgtgaattttatttagactttttcttgttatgtagagaagtttctttggttaaattttcaatattaaattatgtctttcttgttatcttttcgttgacgttatttcaataaatttaataaattataaatgagttgatgaaataattagccaccattcactaggatgtaaagcatgggaaatggaataactaaaatcaattgatttgcgttcttgattttaattgttaattcaaaaaaaagattaaaaattacatatttattttttatataaaaatatcgtatgatgcaaatttattcttttcatttctaacatagtaaagcgttgaatgtttttttaggataatgaaaaaataaacatataacattatattttattatgaataatcataatcaaaaccatctgagttttttaaaagtcacataatctctacatgtgaccccatgactttaaaactttatcacctatgaatggttataagtctcatatttatcatttttaatcattataagtctcaaatgtatcattcatataacttcttataagctcacatttttttgtgtgagaattcttacttttgtgtaaatataagacttataatgatcattttaatataattctatctcatattcttttttttttaagactctttatgattgattaaaatttattaaaatcattatatttaataggttttacttcttatataatgatcatttttcttaatttatattaaatgaaaaacaaaatatactaaaattgatgatttatgataaattctgatcaattataaaatgaatctttaaaaaagtgttaagaaaaataccactaacattcctcaatgcattctattgtaaattataatcctcatgcaaacttgtaaaatcgattccaactcatcatccttgggttagtaattttttttgtcatatccatgtggttcgtatggctaagctgctacgtatatgattcttacaagcttcaatgcttcatagttaagtggttcaatcctaaagcttttatatatatatatatataagaattcacttgagcttgtgggaaagctcatgggaaagctcaattagcacgcatgtggagtttgtgataatacatatttgattctcataaaatacactcttaaaaagaaataaaaaatattaagtataattaaatcccaaactaaaggattacaattgttattataattacccatataaaaagttcacaaatttaaatttattgactgataaattatacataaccttataatcaatagtcaacaatatttttgtcttttattataatattttatttcatctctattatgcattaattattttttttactaaaatatccttatttatttcaatttataattaaacgctactttaaaatgtcaattttccttattgaagaagataagtaaactctcattaatgttaatgacaaattttaaaatattacaattaaagaaggatttaatatcaatacctatattaactaattttcttaattatgtgttataaataagatgagagagggtatccttttaagtaacatctagtagttgaaacaatcagttttctttcgtccaatttgtcattttatttaaatttttcacaaattaaatcattaaattattttaaacctctttctcttaaaagctactacccaaaatacaaaattttattttttataataaaacatattttttttaaaaaaagtcgaaattttcattcttcaaaccccaatcttatcttttacaatttttgtcttcaaattttatcaaaatttcattaaatttctaacaaataaatttctaaaactcttatcacaaatttattataaactccccccaaatatttgaataaaaagtgaaaatataatgattttcgattaagatcactatttactgcaaccaattacggcctacctaagaatttctcatcgaaggtcaaaagatattatgtccaattaacataatttacaattataatttataaatagaaatagcaatcaagttacggtattccgactgaattttcatttagtcacctctgccaaaagaagaaatggtataattttacagtgtaatcatacctaagctagggatcattcgtattataaccaaaatcagctaccttacactacaaactatacaataatatgcaatggagacgtgaatatataaaacatcatcacataacatttgcattttaacctactcttaaattgccacgagacggttatattcatcagaagctaaaacctgtttacacttgaaccttaaaaacaaaacttacttaccccactcatgaacagggagaggagttagccttgtctcgttactctcaaaactaatatcatccaaaccacgacgctctgtaaaatttagcggtgactgatcacacaggtctaaattccaaaacaacttgagataattcaggcaggcaacttcagtttcgaattgttcttccagctgaaaaacaaagctccttaaattacctatttgttatatgagtatagtaaaaacaagatggaccttaacagacaataaaattacctgacaaagtaatagtaaaagaaatctgcatacaaagctgtctgaacaacacctgagacacaagctgtaatagtaaaacaatatagaagttagaatattgctaaggttgacataatgtcaaagtaggttttattttcaccctttattacctatccatctagtaaaatgtggctcagtcagatagcggtatatccagttcaggatgtaaaatgcacgatatgcactgcattttaaaaataatcagcacatctttgatcataataatcagtacattctataagagtttactcttatacattctgagacaagttcaaattgaaatgtatgtacaacttactaaatcctcaagtaattgtgcaaacatcaagacaggagacaaattaggaaatacataagcagaagagtccaattcaacccaataaacatcaagatttccaaatcaggtaccacaaaaaagttcgggcaaacatatacatatggagctaatttataatacatcactttcgaggagtctaatttcttagctatttcaagatagaaaatattagtataccattgtcactagaagatatctcaataacttagaaaggactatctgctaatgatcagcataaaggagtgtaagcaagtaagcaaccaaaacataaaggcagatctttaaaagagaactcaacagaagtgtgcatacccaagaaagaatacatattgcccagtcaaattgtccacatttccacttctttgcaacaaaaccaactggggtaatattgcaactgcctccaagtatattgaaaatgcccagaaaacctgtaacagattgacataacatcaactatttatgatgttacaatgtgtaacagaattatcataaaggtaacatgtaatgcaaaaaacaattttcagattggcaatcaataaggaattaaggataagcaatgtatgtttagacaggaagaacacatgaaaccatgtgatgtatttgctttaactttggcaatattaacctgaaaaataatgggaaaggccagttacacattttgcagattccataaggaaatagatattcccagaagttttataacacaataagcagcagcctatcgtaccattttatgactttcagcctttcccagttaactatgtatcagagccataagacatgtatgcattgcatttttcaaactatcaagtattaacgacgtatctttttctccaagagttggcatcaatattgtaccaaacttggtcatcctttcaagcatgataccacatgggtccctaacataatgttttttatatttccacctaaaatctgaagagcattcagaaaccaattacattttttggccaatcaggaagagaagcagcaccaaacaatagatttagcactaggtggatttctagataacataacaactagttgttaataaacttacaaaatcatcaggccataatataatttacttcagcttcttatcttggttaaaaaaattggaagtattcattccaataatgtatgacaaattgacaattgacagagtactgaactattggtaaattttcaactactgaaatttatcttagaaagcagcataaatgatccagtttccaggattaaaatacaacaggctcccaaaatttgagacttaaaaaatagagttatgaggtgatttatcatttatagaggctctatatgacatgagtcaaatggtaagacataacataaaaaatagagttatgtaagggaagaactacattccttagctgttagcacttagcatcactctgaaacaaaaggcaacatgagtcacatgacacagatcccctcaaagaatcaattgatatactcactaagaaaaacatgttattatcaataacacaattagaagaatatgttcacacagctagcattggttcattagcttaagagctatgccacatcatatggaccatataaatcttactcaaaagtaattgttcaatgaaactcatatatactaaactgtaacccaccaatcaatctcacggagattccaaatgaagaaacacttgagaactttgatcttaaagttttatttttcctcctgttttgtgtaagaacagcatttgaacacataaacatggttttcacgccagaaaacttaaatggatacactactgttcagagaagtttggcaataccatcagattcaataatttgacaaaattaaacactcttcaatgaaatattgaaaccttgagttgaatacaatctattgaagctttcttttaaagaagtaaaaattcgaagaaatgcacaatgattaaccatcagaaatcagaaactcaatacaaatgaaaaacaataaaaccccacagctcaaatacagaagaagacaacatgcaaatgcataaccaaaaaatcaatctatgccagtacaacactacttacataacacattcacaatgcaaaactctaaaacaaaaaaagaagatatcattcaacatatgaatcattagaaactaaaaccaagctaactagaaagcagagaataataagtgcaaaaagggagtgagttgaaaaagcaagggacctcttgaacagtgaacttttcatgcaagatgagtgccatagcaaagcttgccccaacaaggaaataatggcgaaaagtgtcgagttccctatcgtaacttctcccgaccatggggtgaaaacgcatacaccaaacaatggctaaggagctggcaatgaacaccaccttcatgaaggtgttgtaaacggagatgaagtccgtgaacagatccaaatagcgtgccacgaacacaatcgcgtagagctcttgagtcttgcgagaaatccctgaaaataaacagttccaatcaatcgatgaaatgatggaaaataaacatagggaattttgtttggcggaggaatgtgagtgacggaatgacactcgagaatgaaaatttggaaaatagagtaaaaaaatagccccaattttgggggaaccacgagaaaagagagagagagagagagaatggagtgaagagacctgagcatgatttggtggcgtagattttgaggaggaggacgagaatgctgagaagatgtgtcatatcaccggcgagcctgaagatgttcatggtttttgccctagcgagacacagagagaaaacgttacaaagggaacggagaaagaaacgaaatggaaaggaatcgaaaatggagtgtgtggattttattttttttgtttctcttatttatttttttggtcgttttggtaaaagcagaacagtataagcgtatgttcgtgtgccttccgtgaaaaggaagaagctgacggctgaggtgccactcgccctcgtctcaccgcttccttctttttttcttcttaaaattaatgaaactttaatgatttaatctcgcaataaaattaaaaataaatattaactcaattcattgtattttacaaatcatagtttaacaatttctttaatgtttaaatatgtcgtaactaagattggatagtttagatgttatttaaatttgaacatttgaaaataatttttttgttaaactttccttatttattgatcgtattctaattaaaattcattttcatttataaatcagaagattaagaaaaaaaaaccatagtttaataatcaaaatttcaatagataaattacactttatctaaaaaataattattaaacattttttcatgagtcaactacagagtcattcagatatttcatggcaatttccctctttcctttattgcttttgccccttttctttgtttctttcactctcggcactccaaccttcatttcgacaccaaatcaagaaggggagaaacaagcacttctattctggaactgatgctgccagaaaaacataagattccttcgatctgtgcacaaaaggtaatcatagtcaaatgatgcattgataatgtcctgctagttgaaactcaggaagaaaaaaaataatcatagtcaaatgatacattgatactgtcatgctagttgaaacttgggaagaaaaagagaagacaaaaaaaatgtgtagatatgattagatgatatgatgtaataagaaaagagataacagagaattgataagtgttgatagaaaatcttaaaacttcaatttactgttccgttttcctaatggattagtttctgataccgtgtttgttttcagtttcacatgaagactaaggaatatcatagagaaaaaaatgagcgctattgtttccattaccagaaagaaagtttgaggaatacccaattacccgacaactatgtctcatgtttcgcagcaattgcagaatggacgagtgccacaaaaggcgagatgggggcaaaagacgaatgtgaagagcctcaggagttactacttggtgcaaaaagtgttagtctgcctatccacataaagcaagcacgctctttgaatggttgtgaggtctctgaatccatgagctcaattttgaatcaaattatgatggctctggcgcaaccacatatcatcattctaggggtgtatggatcaagtaatgcgagaaagcgaacgtggtggagaaaatcaccaggagaattcggagggacaatctgtttgatgtggttgtgatggcaagtttgatgaaaaagccagacttcagaagaattcaagatgagcttgggaacatgctgggtctgcaactccatgagaagactctggagggaagagctacgcgtttgcgtgagaggataaagatggaggagaagatccttatcatccttgatgatctttgggtggaatcaacttgggtaggataggaattccgtttggaaatgatcacaaaggttgtaagattttgttagtagctgagagtcaagaagggttgtccaaccaaatgaatactcagatagaaatatccgtgtgagtcttcagaaatagaatggaaactagatttggaaggtcagagttatcaataaaaattttcaatggcaaggataaccatcccctttcttttaaattcccaagttgaaactctttctataatggtttatgcatcttatcttgaacacactcccttcttaattctgccttttcacatcattgactcaatctaatgtgttattatgatataaataaagtttgatggtgaacataacttattaaatataaaaaatgaacatagaggagataccgagaaattgtgcacggcaccccttataggattaaacacacttcgtacgctgggtggcacacgcatctcctattttgcaagttattttccttagaaatgaagctaataacatttcgtgcatcctgataagtcttctcacgcggcggtggcatacatagcaaatgaagtttgtggcattaattaatcagtacttttctctcaaatgtgaaatggtatatgccaccgcctgcagcttgtatataactcgtatttcctttaggccattggggtatatcagcttctgctattggtttcagacctttaattcttcaagcccttctataaacacaacttaatttgattcaatatagcctccccttaacttttaggacagttggtccttcacagcacacccaattaaggaagtagatattattattcaatgggggctgctcttgcaactgctaagaaattaaagaaacaaccttgtcatctcagtgacatgcacaacttggagtcccaagtagaggaactaagaaagagcaaaatgtcaattgcacctcttgcttgtttcttacatccacatcaagcaataatttccaattgttccaaggtctctggattgataaacacggctctggaagagaccatggaagctctagcaaatccaaatattaacatggttggggtgtatggatcaagcactttgcatacgaacaatttaattgaaaaaatttcaagaagagtaaagagagataacttgtttgatgtagctgtaatggcaagtgtcacaaaaaagccagacctgaagaggattcaaggagagctcgggaacaagttaggtttgcaatttggtgaggagactgtggttggaagagttaaacttctgtgtggaaggataaagaaagagcagagaatccttgtcatcctagatgatctttgtgctggaattgacttggataaagtaggaatcccatttggaattgacaataagggatgcaaaatactcttgttatcagggtctccagaggtattgttcaaccaaatgaacactgcgatgaattatttctcgtgaatctttcttctaagaataacacaactttttgcagagagatcagaagacaagagatattagtaaagtaatttaaacaactcagagtaaacaatatctcttttaattgaaagcatttttttttatctattcaagggtacctgaagctcagaaaccatagtgttgtgaagatgaattgtgaagactgaagaaactgtataagccataatagaatattataattaaagaacatggcttctatctggtttgtttatctcacagacagcaacaataaattgacttatgttttattgttccacagggagaagtgaggcatttattagttttcacattttggatgattaattgaaacaaatgataaaaaaaaaaggctttaatagtttatacagcttgcttaattgtgattgatttgatttcaaatcagcttacttgagtgataatagagtgtgtttcctttttctacactagtgtgcatcttttatcaactcacaaccaattgagatcttacttctctatcaactttatctgccttgatataccaccttaatcttcctaactgatggataaaagatatccccacaaaatacaaccgtaagttattttacaactaaaccttgtacctaattaccattcacttgacatctatgtaagcaccctctccataccaccttctacgcgccaaaacattctttgcaataacgacttccaattcatttgcaatttagcaacaaagcaagccttcaataaccaacaagaagatgaatcagtctcttgttctcactccttctacttgccccatttttctctttcactactttagctcagtcaccagctgcagctcctaaagcccctgcaaaacctgcccccgccacaccggctccagcacccacgaaaccattagtcccggcattacctcagtcaccctcttcaggtgttgattcttctagaagccaagaaattgtaaagatcctaaggaaggccaagtcattcaacacactaatccggttgctgaaaacaacccaaatcatcaaccaagttaacgcgcagcttgtgacctcgaaaaacggaggcttaaccattcttgcaccagatgatggtgccttttcagaactgaaaacagggtacttcaactccctgggagataagcaacaaaaagcattgatacagtatcatgttcttcctgtttatgtgtccagctccaagtttgatgctctgagcaaccctgtgttcacattggccagtgacagccccacagggtatcagttaaacgtgacagcatatggtaacagtgaaacatttcaactggggtgctgaatgccacactcacaggcattgtgtacactgataagacacttgccatatatcatgtggacaaggtgctcattcctttggatttctctaagccaaagcctatagctccagcatcagctgtggccaaggctcctaaagctgataaggacaactcttcagcagaagatgatgaccaggctcaggcaaccaaggacagctctgtatccgtcggtttgactagtactcatgagacaaccttggtgtcctttggagttgccaactctttcttttaaatccaaagaaatgtaagagtgaagattaattattgattgatacaaaaataataataggaaaagatcgatgagaagatgtgaactcattataagggttttttattttcctctctaaacgccgaccctttgtttgattgatgttgtctttctcttttatcatcatcattacctaataaaagcaaagttttcgatgataaattcagttattaaaaatattattttatcctttttcctaagtagggtaaaaaggaatcaaattgatcagtgtgtccaaaccaaaaccgctaaacaataacaatattatttaacagtctttagtctttattactattttatcgataacgtgacaaccatctattaaaatacaaacttgtatttcttaaatgataaagattaaaataaagatttttttttcatataaaaacaacgtactatcaaaagtcataaaaactaaaaaaataacattaaggattaaaattataaaataattaagattgcataaggattttttttagacagtacaaggactaaattagaaaaaaaaaattacaataactaaaagcataaaacggatgtattaatttataactacatttcaactttgtttaataaaggtagtttgacaaaaagaactttgttttagtttattttctcatttaattcttataattataaaaaatttcttttattgtccttatgcttaaaaacatcatcttgaattccttctaatcatctcagtaaaagtaaaaatacataggccggccagattatttgaaaggagtctactgtctaacctacctgagacatatgattgaacagaactttttaaaaaataaattagataaagacttttattaagaaaacagattcgcatacatatataagctagaatcgtacacttcacgtccaccagcataagtggttagttacgtgtatatttaatttttaatacatttcaatcaaccatagaatatatttaaaagaacatattagggcgttcctaccttttctcttccacttttaatccttgcctggcagtttcacgagtcaacaacacagtaatattttaacacttcctagcaatgttgcatagccagaggagcatttcccagaaacttggttcttttctttatttttgcttctataagctaggctttttctttgcatcttccactctcgtacttattaatccttcttttccactccactccgctccaaaccgaatagggagagaagcaagcacttcatatctataaaatcccggaactgatgaaatagcagcaagaaaaacataaggcatgtttgagtaaacattcatagaagaaactcactattttcttgtacgttaataatgcatgaaactgaacgcgaacaagcaaccatcacaagcatagcagtccgtcgccgtcgcggcaaagtgtaagaaacttttctttactgttctatttcactattagaaactaaatgggagctatatattgagagaaattaagtttcagaaacacccaattgcctgacagctatgactcatatttttcaggaaagtgaggatggatgatagtaatgaggtacaaatagcaataagggccaaattaggacgaataccctccaactgcgcgccctgcaattattttccaacttcggaggatccctatgaggaatcacttaacgcaggcgattgcaattctcctcgttgtgagtactcatttagtgcaggcaaatgcaatcagatttttccgtccgctaaatgcaccttaattgttgatgaaataataactgctctgaggcaaccaaatattaccatagttggactgtatggatcaagttatgcgagaaagcaccaagtggtgaagataatgaccaggagagttgagagggacgggctgtttgatgaggttgtgatggcaagcatgacgaaaaagccagacattaaaagaattcaaggagaatttgagaacaaactaggtctgtgcctccaagaaaaaactctcaagggaagagctacccgtttatgtgaaagtataaagacgaaggagaagatccttattgtcttggatgacctttggggcggaatcaactttggtgagataggaataccgtttggaaatgatcacaaaggttgtaaaattctgttagtagctgagaatcaacaagtgttgtccgacaaaatgaaaacccagaaagaatattctctggacgtgcccgtcaacgttggcctaataacgaggagtttaagttgaaactttctggatttattttatttagactttctcaccgaatttctctcataaggaaaaaaaaatggacactttggaatgtcattagacacctgatgatagaaaaaaatataaatattataagatttataatatgataaaaaaataaaaaaaaatattgataaagtgtttaatattgtagaatcctcatgtattactattattgtaaaaaagtttgtttttattaggattcagcgcagagtgcagttttctgcctgatatgtatttccgttgtgtgattaagtattgttagcttattttattaaatttatttcaacaaatttaataaattttaaatgtttttgcattaaatttttattaaataagttgttcatgtaggagaataccaaaaagagagggtggagcgttttagttcgaagccaaacatgtaatcatgaattttggtgagtcatgtaactcatttcctatttatacatgatgtctttgacaatatctttaacgtgttgaaatcttattagatacttttcgccacaccattgtggagcactggagcctatataagtctacgtagtatgtggtgcaagattgtgtgcgtctcacatgtcagtcaaaccctgtcaccacgtctttagggtattatttcgtattgtacctccaatcgcttcatcttctcggtcatggagtgagttaagcgtcattctgatgacccggtgtcattgaggcgagtcggttgttcgagagttcgttttgaatgatatcttgtggcatagatatacataaaaacaagtcatccctcctactagagtcagcatttctgggatattcatcctggatgatgatgtacataagtatttaatgaaaatatttaatcatatttgaacacaacaaaaatcatatttaatgaagatatttactcatcaataactttggaaaaaagaaaaagaaaactaaaacatcaataattttggttcaaaaagagcagaagagttatgcaaaaattagccaccacccgtgaggtatctaaaacatgggaaagggaatatctagtattccgaccaatgaacttgcccttcggtttcggttttcaaaatctggaatattaaattgcagaagcttacatgcaggtaatgtagtattaattttaaatccttgcctggcagtgacagcttcacgagttaacaactgaggcatctagatacttcctagcaatgctgtttaattagccaatgggtcatttcctggcaacttcttcactcttttgtttattggttttattgttttaagccttttttttatttgttcctctctagtgtcatcatatgtaaagcttcactcttttgtttattggttttattgttttaagcctttttttatttgttactctctagtgccataatatgtaaagctgtccatttggatatttaatgtaatgtaagaattgattttgaaatcattacttaaactaaaataatcttgtatcaattgatataggtgttcaataatttcatttttaattattcttcttagtatgattgactcgatcaatgtgttattatgatatagttaagttttatagcaatcataatatgttaaatataaaaagagaaatgttactaaaacattttttgacatactcttttgaacatattatcttttattgattgaaatttcttaaaaattacataagttagtgggtcttatatcatatttaataactctcttttatgattttgtaattttcaataaatttcaactaatgatagatgtatgtttaaaggaatgtgttaaaaagtatcttcctagccctcgtcttatataagaatgaacacaggagagaaaatgtgcccggtactcccatcatatacacacttcatatgtacagtagcgtgtgctctccaatttatatttgcatatattagagtgtgttagaatgttctatttcgccaacatttttcttttttaagtgcttcctaagcaatgaagccacctaacatttggcacttcctggcaagtcctcttacgcggatgtaacatacatagctcatgaagtttgtgaaaataattacccattatttttctctcaacctgcagcttcagcttgtataaaaatcattgggttatatctattggtttcagactttaattcttcaagcccttcgatctataaactaaacttaatttgtttcaatataacctccacttaacttatatgatagttggtgccggaggtaagggatttgatagaaaaagatttagtgttggatgtttgaagtcctataccaagagctatcaaatgtgagcataaagagaatcttagtaatataacaagttattggactccggtctatatagacccatataatcatgcatttaatttattagacttgtatgtgaatatattatttaaatatatattaaatatattcaaaagttggttcttcaaagcataccaaattagggaagcagatattaatattcaatgggggctgctcttgcaattgctaaaacttttaagaagcaaacatgtcctctcagtgacaagcacaacttggaatcccaattagaggaaccactcagcaatagcaaaatttggattgttttgtacctcttgcatgtttcttacctctaaagcaagcaataatttccaattgttatgatgtctccggattgataaactgggctctggaagacactatggaagctcttacaaatccaaaataacatggttggggtcatgggtttatggatcaaccagttcgtgcacaaacaatcgaattgaggtctagagtaatgagagataacttgcttgatcttactgtgatggcaattgttacagaaaagccagacctgaagcagatacagggagtgctagcttgggaacaagttaggtttaaatttggtgaggagattgtgaatggaagagctaaacttctgtgtgaaaggataaagaaacagaagacgatccttttcttcctagatgatctttcttctggaatttgatttggacagagtaggaatcccatttggaattgatcataagggtttcaaaatagttttgttctcggggtgtccaggggtattgttcaaccaaattaacactgcaatgaattatttcacgtgagtctttcttctaagcataactcaacttgtttgtatagagatcacaagacgagaaattagtaaaccaatttaagataacaaatagaaaacaatctctcttttaacatctctagatctttccctatgaatagcagcattttttgcatatgttctatttagttgaaacttgaaagcaaaataatctttttttcgcttgtatttatttcataagtacttgaagcttagaaaccacagtgttgtgttgatgaattgttaagaaggaagagagtatataaaccataatagaatattatgattaaggaacctggctttgatatggtttacttatctccctgactgctacaataaattgacttctgttatgattaattattcgacagagggaagtgaggcttttattagtttttccaacctggcttttttatgattaattaaacaaatgataaaaaaaaaaaataagggtttaacagttactacagcttgcttaactgtgattgatttgatttcacatctgcttacccgaatgataatagagggcgcttcctttttctgcactactgtgcatctttcatcagctcagcacaagcacaaccaattgagatctcttttctcattcaattttccctgcatttcaagcaaaaggacaaacaacacagcagccaaatccacttctcaatcaactttatctgcatcgatataccaccttaatattcctaacagatggagaaatggtatccccacaaaatacaaccatatgttattttacaactaaacctttgtacctaatcaccattcacttggcgactatataagcaccctcctccattccagcttccacacatcaaaacattctttgcaatagcaacttccaattcattttcaatttagcggcagccttcaattaccaacaagaatatgaagcaaactctcttcttctcactccttctactctccactattttctcaatcaccactttagctcagtcaccagctgcagcccctaaagccccagcaaaacctgcccctgccactctggctccagcgccggcaaaacctttagtgccttcattaccccagtctccatcttcaggagttgactcttctggaagccaagacattgtgaagatcctaaggaaggccaagtcattcaacactctaatccggttgctgaaaacaacccaaatcatcaaccaagtgaatgcacagcttgtgacctcgaaaaacggaggcttaaccatccttgcaccagatgatggagcattttcagaactgaaagcagggtacttcaactccctgggagaccggcaacaaaaggcactgattcagtatcatgttcttcccgtttatgtgtccagctccaactttgatgctctgagcaaccctgtgctcacattggccagtgacagcccgacagggtatcagttaaacgtgacagcatatggtaacagtgtaaacatttcaactggggtggtgaatgccacgctcacaggcattgtgtacactgataagacacttgccatatatcatgtggacaaggtgctcattcctttggacttctctaagcctaagcctatagctccagcaccagctgtggctaaagctcctaaagctgataaggacaacgcttcagcagaagatgatgaccaggctcaggcagccaaggacagttctggtgccatgagtttggttagtactcatgggacaaccttggtgtcctttggagttgcacttcttgcagcagcagctacaatgtcgtgttgaagaacatccatttctccagagtttctaatatgttttgaggacaagcacgcaactgttgtggagttctgtttttgttgttttcttcttgacctgtgtattgagtagcaaaagtggtgtttgtgagttatgtgaacctttgttctgttcttgttttgtcatcaagcgaaaaaatatgtgattgttttattgtcaaagataaaaggaatatctgcttgtttttgcttagttttgtgctgttcagttatatgcaccgctcggaatcatcttccactccctcgtctatgagttgcatagatcaatattcttacactaggaaatatgtataactatctaataataatcataaagatgtataagtacattttacaagacaaaatccgttgacactaaacgtaaaagctttaaaaacttgtgtctttactaagttttaataaatgtgatatataagaaccatcaaagaattatgccacaaaaactagtcgctagagtctgagagagtttaagtacttgtgaattttatgttagaattccacactttaaatacgagactaatatctttcagtacagcagaatatagtttactcaaaaaattattaaatgtgtaaatttgctaagtcttaaacgtggttaataaattatcacttacaatttagataaagttcatgagattatttatgttttgacaataataaaaattattttttaaaataaactaaaataaggtataaccgcaaacttaaagaaattaatacttaaaataattatcatgataactcaccaaagaaaaaccattagcaaacatttcaaaatgttttatcatttaatactattggatctttaaaaaaatttaaaatgttagttacgcatcacttttcttttacatttattaaagatgtctccattatctttatttatctattatgtgatttgtcattttaaggcttttcacttgatggctcagaaaaagttgacaataaaccttttcttatagtaagttggcaataaactaaacttcctgaatcgctttagttgtctataatgttggacgcgtagcattcattttttatataaaaataaactatgttaaataatcaatacaagtaatgtagcattaaatagtattaggaaaattgcttctcccaattaaaagcaccattgctatatatgtgaagaaggatagacccaaatttgttaagggaaaaaaattatctttataagtaattgaaggtgcacttatacagttatacacatcctcaaaaactttaattcattataagtctttagatcttaggtgcacttattcagttatacacatactcaaaaatatgtgataataaacttactatcctcggaaattattaataaaatttgttttatgaataatatattctccaaactaaccatttatattgttttgggatgatataatcaaatggagagatataggtagtatgacataattcaggtatatgattaggccctccatccttacctaaatctctctcagacaacgccacttaagatttctaccatattgggtttttgttccccctagcggctagctacttgatggaacttctaaacctattatacagactcatcgtcccctttccacctatattttatctcatgcatccaactgattgcaacaatgatgtgaaagcaaaattaatagttcccttgcacgtacactttaacataccatgggttcaaaaatatcccctccccctcaccagttataaatcacactatatatgatgcaccacctttccgtgacaagcaaaggagatttgttctttacaactaggtatacctttccaactaaaccattgcaccttccaatcattgatatcacattcaattcccttccaccctccaaaatatataaaaggcaactccttctcccacttctctcacaccccagcactccaaaataagcagtatagtagtcttaaaaaaaaacatcccacacactatcattcaccctagccaaaaccctagaaatgaggatcatgcaagaatctcaatctttcattattcccaccacaattctactactagcactatgctacaccacttcagcccaactttcaccaattcaaccccccacaacatcaccatcaccaccactatcccaaccctccccgccgtctccggcactccaatcccctccggcaaccgcgccggcgccagggatcaacactgttcctcttgtcccagtaaccccaagtggggcccccgcacccaccaccatcatccctaagggccccaccattgacatagtccaaatcctaagaaaagccaaaaggttctcagtcctcactcgccttctcaaaaccacacaactcataaaccaactcaactcacagctcgtaacttcaagctcaggagggttaaccctatttgcacccgaagacagtgccttctccaaactcaaagcagggttcctcaactctctcactgatagacagaaggtggagctcttacagttccacactctctcttccgtcatttccatctcaaactttgataccctcaccaacccggttcagacgcaggccggtgatgaccctcagaggctgcaacttaacgtcaccacttacggcggcagccaggtcagcatggccaccggcgccgtcaacgcctccgtcaccggaaccgtttactccgacaataagttggccatataccaggtggacaaggtgcttctccctcttgacctagtgcttcccagcaaggcgccggcaccggcaccggcgttggcgaaaaagggtttgccgaaggctgataaagggaattccacggcggcagacgatggcgttgttggcggcgacgatgacagcgacgggaaggccttgccggtgggtgtttctgcagggtgtacgatgaagtcggtgaataacgttgttgttgttggagtggtgggtttggtgggtggagttttgatataaggtgagtgggcatgaataaagggattccataatttttgttgtgattttgtgagtaatatatgtattgattccatcgtgcttaattggggttctggtttgtggtagagggtagggtgaaaatgtatgcatgcatgcatgacaagctgggtttcttttactatgtttcttcttcttttgttttgataagtggtgatttgtgttaatggatttctggctttgtaaccggatttataaaagaaaaagttctgtgtatatatacttttgcttttcaaaatgagtattaattaattgacgatgatttattaatttgctgctgaagagtaattaacgacatgttcgtagttatgattgtctgatatgatgtaataactaattggatgcatggtgcatgaatttcttctttagaggaggtcgaggatcacaaattttatacttctaccaattatataacagatatgattaatgatttacaaagtacataggatttcattgcagtttataattgactcagtgatcacatattatttaacactagctaaggttaactctaaaattaatagaatgaaataaaaagaaacatgatatgcaagaaatgaaagagttacattttcatagagtactgaatgattatttgttctgtttttttattcatcttctttttttagaaacaggttaatttgaatcttaactaattcaaaactaataaggttatttaaagaaatataaaaaatatatgataattaatagaatgaaataacaaagaaacattatatgcatgaatctaaaaagcaaaaaaaaaaaaaagaaggttaatttgaatcttaactaattcaaaacaaataaggttatttaaagaaatatagaaaatatgataaggagaaatacttaagatttgaagtaaattgaattccttatcacttaaattcacatttgttagttacatagcttacgagttaaacattagaataatttttgtaccagaaaaagttatagctagtatgatttatatgttaatcaatagtttacataaaagtataccctaccacaagaatatatatatatatatatatatatatatatatatataaacatgaactaatataagcatccatcattattctatttttaagttaacactcctactttatatatcaacctaacacgcaaatattaatggatatatataaaacgtgtaaaatttaaatttaaaatatttaataaaaataataaaaatattattgtttcattgataataaaaataaatttcaatagagaatacatggtatatatagtaagtttttggaatttttttatttttaagaaaagcttaataattaatttgattaataaatatgtttttagttgtcatttataaatttcttgttatattaatgttaatgaaagaaatttgagtgtcaattttaaaatagtaaaaactcacaaggttcataagacacgttacaaagaaagaaatatatgcatgtataactatataaactaaaattgaaaatacatacatggttttacgataattttaaaattaaaaacgaattctatgtggaaatcgatatttttaatttttttgaattatatatataaaatgataaaaacttgaaacggacaagcaaaatttatgaactttgggctttcggcctacgagctagtccaaaatatatcttgacttgatcaatttattgtttggtagctcaattacatttaatgttttattttgtccacaaaacacatgtcctcaacttcattacttgctaatacgattttttcctttacttattataacattattacagaggatttagcaattttgctggtgaataatatctataaaaaaactaactatttttagtgaaatatctcttctcttttttatttattacataattttacttggaaagaaaattaaaactgtagagtgtgcaatcatagggtactcataacaattgaagcgtaatatgtttaaaatatgtgtaaactaaaaattaatgttatctttatatattattataaattataattttttatcgtcttttatatacgcatttcaaaaatattataaaaaaactagttgtaatttttttcgattattttttttattgtgggagcagttttagtaaaaattaaagagtacctttgaagtaagtacttttgtcggggggagtaattaaagagtacttttttaaaaaatactactacataaattcatttttaaaaaaaatacttactgtgattgcacttagtcgctttcttacttacatataattactttattagtagtactgtagaagatcatgcagcaagctatatagatttaattatataaaagattttttagttgccacatttcaatttcttacatctacatatctgtcaaaaacacatttgaaatcttaaactcagccacaccacacaccactgttctgttaagagaacaaaaggctttggtccaaaagtcatctgcatttttcagtcacggaagaggcaattaatgcatgtgctacctagctttaaacaactccttccatcttaattcttagcggtcaaataatagaaacacattaatggagaggataggttactggttagagattattatttgaaaaaaaaaaaaacatgtaaaagtagtactactgtgttttaaaagcccgtttgaaaattaaagtgccttagccctgggtgcgtatttgaaagggtgactttatgtggctcttcatcaattcattctgaggagcaacaaatgttatattgttgactggccctacttaattaattactacgtaagaaacaaattaagcagaggaaaagtctaagagatcttccaacatttcccactaattggcaagcaaattaagatagaaatgcacatttcacatgcatgcccatctagtgtatgttcatataatcatgtatggttacggttctaagaaattatgataaaaatgcaaaaccaaagttgaagtgggtgtttgattctgccttgcatcttaatttcgtatgtacgttttaggtacgataccaaacatacacgaaatgagaacatgaatttaatattgtaaaacatttttaccatttaaacaatatcaatagatgatatatccatgtcatttgccgtaggacatagatgtatctatttttaaataacaataaagtcaaaggaggtgtattaatagttaaatacctcttttcctcatttaaggtttttatttttcttggcattatttttctgttcatgttagagagtttactctgatatattcataattttttaaagttactaatacttattgaaattaataaatttatcttttactaaattcattttctttaatataatattaaaataaaaataaatttaacaatgttttttttctttagaactggatgcgtatttaggttaaaagtttccttttaatagtgacttaatgcacattttatctaatttttaagagaaatatgttttcttataattttaaataataatttgagtgtgtgcttagttgatttttttaataaaaaaatcaatttgtaacatgatttttttatactaaaaattaaatatttctttaaagaaacgtgagacatgcactaaaaaaaattatacttaaaataattagcttaatcaaaattattctttttttaccaagtctttattattaattgttttgaaaaaggacatcacaccctcctttactttgcaaatgaaggtcaaaacccaaacaacctgcattaaacctaaccccttgggagatacccaattcacattataataacaataaaaatatataaacactcttttattttatacatcctctcaataactctcatctatatttttattatatcataattctaataaaagattttttctcattttcttctcttttgccatgtatatcatgggatgttaaacaaacatttttctttcatattatacccactaggccctatttcacaacaaactctgaccactcctcagtctcagggccatgtcttatcaagaaccccaaaactatactgcagaatctaattttcaatttccaaccaaaccctgcttatttttcagactaaaagtaaaaaaaaaaaaaaaaaaccccgaacccttcaggcttcatcctggtgtccctatgatcgtcatcttccttcttcttttacaagttacagcaaagttaaacaattaaaagaaacaaataattaaatgggccataataatctgaatacaaaatatactccataatcatccgtcaaactaataaggaaggtcattttctggacggctgcattgaatggaatttcctagatagagaaaatgagggaaaaaaatttaattatttatcacccgaaaacaaaagtctttggaaattcagtccctctgttcccacttcccaccttttctcattcgtacgcggttcggccgaaattattagcataacttaatccaatcctaacttcatctcttcttgttttcttcacttgctaattttatacccttcaaattttccacagccaaactgtttcatagtatgccaccaccgtttccacacccatatctctcggccttcgaaatttctctcctttccttcggggaactgctcagttcctgaaaccatcatctgggtaacacaagttttttgaaaacaaaaaagaataatctcagatggcttcggcggctatattctcgtcgctgcggcggcgccggtcgccgtcgctggaggcgtttctggtgccggtcgacttctccgacgtggcgctgctggagactcttatctccatcgccggcgacgtagcgtcctgcttctccggccaccggttccccttccagcgccggaactcgcgtgccctcatcggaaaagttgagattttccggtcaatgttggagtgtctgaaagactccgccggccccggagctcttcccccgacggcggtgctgtgcttaaaggagttctatctgcttctataccgctcaaagattcttcttgattactgtgcccaatcgagcaagttgtggctgctgcttcagaaccattgtgtttctggtcacttccatgatttgagccaagaattttcgacccttttggatgtttttccttttggggaagttggcatcagtgatgatgttagggaacagattgacttgttgcagagacagtccaaaagggctaagttgttcatagataagaaagatgatgttcttaggataaggttcttttggtttcttgaagagtttgagagtgggagggttcccgattctaaggacttgaggtgtttctttgtggataaactgaggattcttgatgctaagagttgtagggtggagattgaagccttggaggagcagattgtgaaccatgagggtgatgttgagcctacggttcctgtgcttaatgggatggtggctatcacaaggtattgcaggtttttgttgtttgggtttgaggaagagttggaagttgagattcaaaagaaggggaggaagaggttgattgctcaggaaattgctgaaacgtttttgactgttcctaaggacttttgttgtccgatatcattggatttgatgtgtgatcctgtgataatttccactggtcaaacttatgataggtggtctatacggaggtggatggaggaagggcattgtacttgtccaaaaacggggcaattgctttcgcataataggcttgttcctaatcgcgctcttaggaatttgattatgcagtggtgcagtgcacatggagtaccctatgatccacctgagggggttgatgcatctgttgagatgtttgtatcagcttgtccctccaaagcttccctcgaagctaaccgagggacgaccacgcttctcattcagcagcttgcggatgggtcacaagctgcacagactgtggctgctagggagataagattgttggccaaaactggaaaggaaaaccgtgccttcattgcgcaagccggggcaattcctcatcttaggaacttgctttcctcacctaatgctgttgcacaggagaattctgtgacggcactgctcaacctatccatttttgaaagaaataaaagcatgatcatggaggaggaagggtgtttaggatcaatagttgaggtgttgcgatttgggcatacaactgaggcaagggagaatgctgctgcaacattgttcagcctctctgctgtccatgattataagaaaagaattgcggataatgtgggagctgttgaagcactggcttggttgttgcaagaggggactcaaagaggaaagaaggatgctgtcacagcattgtttaatctctccactcacactgagaattgtttgagaatgatagaggcaggggcggtgaaagctatggttgtggctttgaggaatgaaggagttgctgaggaagcagctggtgccttggccttgattgttcggcagcctgttggcgccatggcggtggtgagggaggaagcagcagtagccggattgataggaatgatgcgttgtggaacgcctagaggtaaagagaatgcagttgcagcattgttggagctctgcaggagtggaggtgcagctgcaactgaaagagtggttagggcaccggctttggccggattgcttcaaaccttgctctttacaggtacaaagagggcaagaagaaaggcagcttcacttgctagagtgtttcagagatgcgaaaatgcatctctacattatggtggattaggtgtaggttatgtatttgctagcgattcagcttcaaccaggaatactacaacctttgtgagtgatgtttcacttccaatgtccatttctgttcctgttttatagttgtttgttgtgttcccgatttttgttgtaactctatcgattctttcattgaaatttaaagtcatcaagtataggaataccagatatgtattctaaggacttagagaatgatgcgttgttgaacagttagcttcaacccatttgtaatcagttattgcgagaaagaatataaagtgttctaaattggaattattagaccacctcaggcgttttatttcttctgtgctttactcctcccgttggcaatttattggatttttaagagtaatgctacttttttatatgtatgattcatgctccatttaactcatacaatttaaacttgttttgttaaatttacatggagtcaaaatgtgtgctattgtgctcaatttgttccttgaataaacagcatttttcttttctattttattagagtaacgatacattttggatataaaaacttgcattttcccaatgagggctactggttggttttttttaatttttaggtcattgatatgtcaactttcttgttaataaagttttttatttgagcatggaaaaggtgtcacaaaatttaaactgatttaaaccgcgggaaagtgtttaaacgttaagatagtttagtttgttataactttatttatctagttgtgaggtgtaatctttgcataaagcggggtagaataaattctctttgttctcatgttttcagtcatcaaatttgtagttttcacttcagataccgtttgttgtgtctaagatttcaatgtgagttagcctcaagcgtgttgcatgcacgattattccgtgttaacattttcagctaattaattctggcccgtgaagtatatgaatgttctattctattatttggacgctatgatgtcactaacttttctgcctaacgtgttagaacgaatgtggatcacacaatagatgctctttcatcttgactcttcctttctttgttccattcctatgtgctaggaaaaaaaacagacatcaatatgtctcgtcataatgggtaggtatcttaaaatattcttaagcatatgatatgaagatagtgagaaaaaagctaaggcaattcaaagatgagtgctatttttggagattaaagtaattgcttgcttccattgagcggtggaggatgatgggcctaacatattattctttggcatagtggcacgtatgaaatgacatgaggggtcgccaaaggaggcgcaatttgatttgttttgattagattattagattattgtcattggttgatggcagcataataatagcaatctaatgtttctttattatatatatgacaataaaaagaatatgaagataaattgaaatattgaatgttccattgaaaaaagaaaatagatggaggttgaaagttttacaagggtgtaaattacccggggattcaataacaatctaaaatgtatgaaaaaaattattaatttttaaaataattttttaaaaataatttaaatagtaatttgtgattagatgataatataatataattttatattattagtgtattaatgttaaactcttaaagtccatcaagtatgataaatttaataattattttaaaataatttaaacgacaattcataattagatgagataacacaattttatactttcttatactttctatatatttagattaaactcttaaaagataaattaagtaacaagatgttatttagtatggaatatagaaacatgaaattcacaagaatcaaaaatataatgcccgaggatagtctcaccattggagggaatagttgggaaaaaaaatctaatatcaatagaacatgtgtttgtacacttttgcatacataaatttcatccgttacatcattagtctcatcatgtgtagtatttaatattaaattttatccgttacttcattattctcatcatgtgtagtatttaatatttagtccaatttattttaggcttttcttaaaaaaagaagaaattgggttaaacaagatataaaagcttttctagaaattagctttatgagttttttacttctattcaaatttcaagatttaatgataatataatatactaaagaaattttatgttaaaaaattatggagtaattaaataattataatttttatctttaatttaaatttaaaataagttttaatctctaaaaaggttagaccaaacaatatttggtttcttttagttttactttctattcccacaccttcgaattccttctaagttcacttaattttgacaacaaaagaagggaaaaaaaaacaattttgtgatttttgataattatacgtttctttcttcagttgaagggatccaatcctcgaattatgtttcaaaatggtccaaaaagcccaaaaaataatgattgttatgataagttgtttctatcattcttaatgcaatgatcaaagccactcttgaccgcactattccaagctgttttcattaacctctcttgagaaaggaaaattgcaagtactacacgcacattcatgcttcgttgcttgggtcaattccattacatgaatattcttcatagtggaggcacacagagtgcacacatttaaaaaaataattaattggaggttttgtgagacacttttgttttgagacatggtggtagtcgagcttatcttgtttgatatgatgcgattgaattgttaacgatgacaataacactatatgattctcaattgcttcgttccaatccatccaccatatattttcagcccaagaagtggcacaagttattgtcttgggttctcattgttttctccatttgattgttgtgtaagatttttttatttttacagtgaattgtcactaatattgccccttattgacttgatgtattaagcttaagacctaatggacagagtgttgtgtcgttaggtttctagttaatagaccgtgacaagagagtttgttaagacttagaactaggtgtctatataagctacggttttatttattcattgaaaaacgcaccacaactagaggaacataggacaagacttaataaaagatttgtctggtcattagaaacgttttttcccctcatgtaataatgataaaagtgtcgtgttattttattgtaactcctattttcataaactaattttatgggtaaaaaattgaacctttatgcctaatttgatacactgatccatttgtatctttaattttttcaattttcctatacattaaaccctttcgcatttttaaaactaaaataatttatcggtccttgaaatttctacaataaaattaatttccatacattaacagtcccgttcaattcaaaaaacaagagagaaataaaattcccaaccaatcaataatttcaaacaatcaattgaacaagttaacaagattgagagaagaaaaaaaaaatacttttgagtgaacaacaaggacgaatgtcaatgcctaagtagaccagatccaacgatcccctccctcaacctcaagaagcttcggtgattccacctaactcaagttgggccaatgggtgtccagcacaaacctaggaaaacgaaaaaaaaaatctgacccataggcctacaggatgagaagtcagcccattaggaaaacacaaaggaaattatttctcacaccttccatttgcttcctgcacttattccggaatgtaatttttacactcctaaaagatctttctcgaatgtaattttacaatcgagattaggagttccaaaatcttaaaataggtgcaggaagaaacattggaggtataggaagcagccaaaacaaaacctgagcaaagattggtgttcaattactattgatcttgttttcaattagttagatgctcaagagaataaaaatttcaaatggaagcataactgtaatatgtcccctacatgcatattgattgggtttcggtaattcgaattacaatgtataatatcacaactacaaatgtgaaattaaggtgaaactaagtttgagtgtttttttgtttttataaaaaaaatagaaaataagagtgaaaatatatttgtttaaaatttaggaaacattttctctgaaaatattttcaaaaataaacttaaaattgaaaacaataaatcaatattttcaatcttttttgaaaaagttaaaatgcagtggcatcttagagtattttttttctctatacatgttttctaaatcttgaaaatttgaaaatgaagatgaaaaataaaaacagaaaataaacacacaaaccaagcatcacataaactgacttgactagcaaagacgtagcttaaaatagcaatggttttaaaaaaaatattgctaaatcaagaggaatatattcacatggaagtgacaataaatagatcctttgctaggagatataagatagattgaatagttaaaaaagagaagaaaagaaaaaagatcatgaattatatcccttttacttaataatttacaactaatatttaccgataaaaaaatagacccctttactatgtttaatcatataattgggaaggggtgcaaagagaggcttcccttcttaagcaacaaaaccggtagaggtaattggacttataagtcttcctattcaaatgattagttgaaacataattattgagaaattcagttaaacaaagaaaaaggagttgcaattttcttcctttataatattgtaataatacccctttttctcttgcagtatcaaatgcatacatggcatttcatgcaataatatggaaatgatgaaaggattctttctcaattcaagttaataaaaaatgcctagatcacgtcagaatgaaaaagaagaatggaatttattgtcgagttgaaggatttattgtgtaagcgtgaaaacgaaataacttgaaaaaaaattgtgtccaaaattattttatgtacgtagttcgtggtttgggccatctatcaaaatcggcaaccgaagaatcaatttgatgacctcttttgttgacaaaatagaacacaaccaatttagaatttcataactaaccgattatttatctaccctatggcttttttggtcttataccttgcttggaaatgaaggttcccctgttgaccctaagaaccttatttcttgtgttggaccttaatagctcatacatcataatttggaggagacaatcagaatcacatgatataataactgctatgacaagggaccattttctaaaatggtagatattgtgtcaagtttcttttgcataatcacatcaatttttcttctaaaatacttcatatgtaatgctggcacagaagctcacagaggatcaacattatccttgataattgttgaagagggagcccacgccctttgaattgtcattgtttatctacttttgatatgcgtgatttgagtagaacaatatgatcaaaactgtgtatttttcattagaaaattagaagtaaataaagtaaagataaaaagtgtaaatttaaatacaagtaaaaaaaaagtcgctacaaggcatatttttgtgcaactcaatcaataacacttagttacattatgactttttttaatacaaagaatgataaaatacgaagacactcaattactagcagaagttcactcaaaatattattgcagaaagataaatagcaagaagttttacccaatgtttatgatcaatgttatataaatcaaactaaaagttaaaaagaaaattgctttttagtacggcattttcataagaatgctcacggatgacttcataaagtactgcagagtctgcaaattgccttttattttctctctcatgtatggttaacgcattcaaatgattggcaaatttttagaaatattaaaataaggaagtgtgtatttttcttcaaaatataaaattttgatacaggtatatatgactttagtaaaatgagaggatgcatttatccaccttcaattacatagatttataggtctatgttcctattaatattgtaattgtgtaacttatttctttataggtcagtcaaatagattgtactttcatggatgataacatggaatttgacatgagcataataggtttgttgacatgatttaatattacttttgattcatgcatcatgagtgtgataccaaagagattaaaagtgtaattaactcacgtcatgtgttaagtaatatatcatcgatcagggtcggttctgggcccattcaaggggctcaaccgcacaggactccaaaaaataaggggtttcaaatattaattattgtaatatatgttcaatactgaaaactagaggaaatagtaatgtccctgtcatcgatacaatattatctaaagtcatgtcaaaataatttattaaatatttaaccataaattaacaagaaagccaaaataccattataatagctagaagatctaatttgcacgattaagatttaggggattaaaatcacaatgagacccgactaataatatgaaggaggtgattgaggaacaagtatcgaaaacacaatatttatgattgagtaaggtgcaaaatttgacaaaaatatcacattttggtcgcctatgaaaggatcattttacacgcctacacagacaggactaaatttggagcaccccaaccgtcaaacattctgcttaatcgtagtagtagtagtgtatgctactaacatgtgtgccagtatgtcacaatagtaatgtccaatgagtctttgaccgagaagaaaaagtggagaaaactgcaaataaataaagccaggaaagaaaaagatgagaaaaggattttgctagccagaatcataagaggaaacactcccagtccatcacaatccaaaaagaaactgttttattctttagtcttccaccttttactaatagtgaaaaacaaagttaatattcaaatgaactgcaacatttacattcagctaagtaggaagtaactgctgtacaaaatgacatttactggtctataattctagttcttattgttacaataaagttacagacaacatcttgtataatgttaagtgtccttcaaataaaagctcatacaatgacaatgtacccggttcataataacatataagcaacctaatttctggttaactgcttctattacggtgtatgtgtgggcctaaaaaggtggtccaccccttggcgcaaatcttttttttgtgtacaaaccaaaaagcatgaaaagtggcaaaagtggtcacaggaattggggcgggtatctcttttgaaaacatagcagaaaaaaaccagtaagaaacccacgttcctatttaacagcctaaccgtcccactaactgctagaactctctcaactctcactatgcacttcacttctgctctttatcttctctgaagattaataaacccttcaccaccaaatcaagagagtttcaaacaccaaaacaacaagagcagattatgaagtggggtggaaaaaagccttctccttcttcttcttcttctaggccttcttctttcatatctcatgtatctcctttttcatggctttccaagttcaagcagatgagaatcaactcagagccaaaacctggcacactgaagcagaattctactccatctgattatacttcaacccattatgctaatataaatagaggcaggttttatggaggggatgatgatgaagctttctggagactctcatttggagaagagggtggtaacgagcataggaaaagtgaagatattctgaaaccagtaaagtacaatttggatgctgaacatgccattccatcctcaagtttccccactggaataaataatgctaaaaggcaaggtagtagaaaagaaggcactcagaagatgaagcagaaggacactactggactgagagaagaaacaaaattgttgaatgaagcatcaaagagtataaaggaagttgaatccttaaggagaagatatgagaggaaagcacaaagagttttgcaagagcagctcttgaaattggaaaaggcagaagatgaagctgagtttgcatcaagtccattcttaggaaatgatctgctgcaatttgagtcaccaagaacaattcgcacaccaagaaagcatttttttgtagattcaaagagttctggccttggaagtctcggagaatctcgtgtgtgtagtcctcaattgggttctgagtggcaaagtttgaaacaaactgaggggttgaaattgaaaccaaagggtaaccaacaaaggcaatctcttcatgtgagcagagaaaaccagaggaggaaaccaaagcacaactccaaggttagagtatattctccaaggatgggttccaaggtcgaagtccgcaaaataaaggccatggaagagaagaagaaagcaaaacagaagatgaagaaagaagaggaaattgtggaggaaacagaagaagggttagatagctttgctgtggtgaaatgttctttggatccacagaaagatttcagagattcaatgattgagatgatcacagagaaacagatcagcgagccagaagaaatggaagatctgttagcgtgctatctgactttgaattctaaggagtaccatgatctcatcatccaagtgttcaagcaagtatggttgtgtatgagccaagccagttcgggtattcaatcagacaagcaatgttgctgttgtgattaacaacataaatgtttggcttgtaggaaaacattggcagaaattgtaaatagttaatcttgttctagttgtgctttattagctttgcttgaatttctttattctcttcacatcttttgtataaaattcaagagaagttgcatcaagatcccaacgaaattcatactttataataataataattataactactagtaagagttctttgtgcatgtatacctatataataccaagttgtttacactcaaaacatgattatcttgttggggttaggattcttgtaagcttgtagcattatgttcattctttagcaatatttttaatataggctctagggaaagaagtctgaagcactgatgagaggtgaaacttgttgaggaaataaggaatctaaaattccaaatggtaaaaatttccaaaaatagagaatgcacctataatacacataagacattgctgctttgcatatcagcatggtcctagacattcacatcagtataatacccataagacattgcccatgccggtggaagaaccggggttaaatgaatgaaagggaaaggaaactattcttcaatccttgtgatcagtatttgacaccaacagatacctttagcatgcatcttattctggcaatacaaataaaataccctaagaatgtgacaaatactaatattctcttatgctcagtgatttgtctgcatccttaaaaatacatggctttaagattagttaggcttaaatttataacttaaaaattaaattctgatatggtaatagattaaaatgttgtgctttttagttaatgagttgaatatgttaaaaggtaaatctggggttctttaacaaatgaacttgaacttttgattcatttagtttttatttattatttattcataaactaaacaagtttgatgagcaggtttcactcattgtaagccctacacaacaaacggcctacttaaataaattagcgtgcctccctttgaagacacccgacacacttcattgaagcctctatgacatttcaaaaaacatatcttagtgactgacccattcttcataaagttgataagctcttgtagcattgatgaaaatgtcatctaagagaaaaatgttagttttactaataaagcttcttataaattctccaactttcataagtgtcagcaggcatgttgggaggcacattaggtgaggccatcaaatggagtcatcgagtgagtgaaaaaatttaagagtttgtgagatatatttatcacaaaggtaccctttctgatcatctatgttagggataaataaattatacaacctagctacaatgcaaatactatatatttctattattataatctacatctacagtatggggaaattattaggagaccgaagtgtatatcccaacaccttaatttgatgactattctttctattgtgtaaagacccattacctaattactttcaagtggggcatttatgccacatctacacaataccaaattagttaataacatcacaataagtcccaagtttgtatataagatcaaagcaattcttaaagtcaactcggtggttacttgggatacctataaaaaagcacaagcaataaagttaacctacctgctaggggctcataaattggtcattcgactttaatcatgctgctgcaggtaggctttacatgatcaaattaattttttcatttattatttcggcatcgatcattctatatatgcatgtccatattaataactgaacataaataaaactatctagatgtagaattcaatagattttaaactaatcaactaataaagcattaaagttttatcttctaacatctatttcatgaatattggtcactcagagcgttgactagccatccgaaaacacggaaatttttctttgaataaaggcataaaactcatctagaactatagttagactgcggaaaaaggatggaatcaaatcgtactaagttcaattatttggattgttaaaaaagaagataaaatacatccttcctccaattcagatatcgatgatactggaatcatctatttcaatatagaatattcaaataataaaatagtgaagttattttatttcatattattgcactgcatttttcttctataccctattccattctattttaaatttatcattgtatacccaaacttataaactatatttttattgtccatcgtgttttgaagagagtaaaggaagttgtgtctatacttaaattttagtaggctagccttaaacgattacagtcttatcaatcaattcatttaaaaataaattaaatagccctaaagtgaatttgtttttaaagcaagcaaataaaggtttatttattctaaatttttaatatgttgaaatcacaatttattttaattaaatcagttatacatacatttttattaattgactttacagataaaagttttccaaaaaaaatcccttctctagctaggggaatatatatgttcgacacacaattgacatgcttttccacacaacatctgcatacaaacaaatcattaaccagcagttataagtcagagaaaactagtttcaaagtatagtattatatttccaaacattacattcttagaaatattatgtatataaaatattgaaaaaatagaagtagaagaatgaaatgaagacatgtggttactgtattagttgttagttttttaatactcacaacttctctctttcctcttcttaattgtgtataaaataactttcattctcataaaaatacaatatacatatctttttaccataaaaataagaagacaaatatgaatatttatatttttgataatcaacaatacctaaacatattatttttcaaaacttgtaccatgagaatataataattccaagtcccctcattggaaatatttcttttgcaccactccttttccctttcattcaaacttctttctccctctttctttcatatctctcgattagaaaaatgaaagttttatacattatggaaattaaattacttagctaaacaagaaatttgatacacgagattatgagaatatagaattgcttttttaaaatgaaatattttgaaaataaaataaattgaattgaactaattaaaatgtaatgtcatatatcttaaattcattaaaatttcaaaaatcctttgttctaagactactttaaatatttaggtgaaatataacaaatatgatattattaaaatataacgtctttcaacttgaaaaataaaattattttgagacaaattaaaatatttaaaagaatatatgatataactgaactggttgcttctttgtaaatgtcccacgtagcaaacaaaataattatcgtttagagtcaggtgaagtgttttaaatgtacttgttttattttattttattttattgagacaatgtcattcacaatagaccggctagaccaagtgggtcgcatgctacaatccacaagcattccctatagtctccatataagatcagtgtgctttcattttagtggttcaccatgtacatatggaagaaagagtaactgataattacatgaaattgtgaggaacaaataaatcattattaacattatgtacaaaaagaatatttaaactgtaccaaaaaaaagatcatgattaacatttagaaaaaaaaattatcttagacatttacattacagcacactgtatacaaacgcaagtatacaagagaagaagtgaagtgatcttggttttttaaaattctatccaaaatagctaaggttgttttccttctcatgataagaaaatcttttctgcgccgccatttgcccactgctcacaggatgaataatttttaatttaacctttgatgatatgaacctaagaaaacaaaaaggaaagaaagaaatcaccattgcaaacagctctcctgagtcatttgaatgattttcattatgacataaatgacaaaaatatatttcattttctatttttatttttaattacaaaaatatcactttatctcttgttttttaaatatttatataagaaacaataaaaaaaaaagtaaattataatagcatcccctcaagtttacttgaaattaaacataatatccctccttttttatgcttacactaaatttaatttgttttaaacattatattaacacctcttacgcattacattaatttttttaattatttgaaaaatactgcaccttatacttctataatgggttgttataatggtaaaaaaggggtgtgtgtaatttaaaaaaactccaagatgtaatttcaagaaatctcagtaagtcttgctataatttactctaaatataataaaaaattattttcattgttttttatatgaatttcaaaaaatggaaaacaaagtaacattttataactaagaataaaataaaaaaaatattttcttccaaagtcataggttcttatatactttttcttatggccgctaccgctagctattgctacttgtagccgctaaaaggtacttgcagaataacaagtggcagaaagaaatttattaacaagtagacaaaaattaaatgcaaattttaaagagatataaattgtgattgcaaagaaaatgtttaaaaaatcttaaatgttttcaaaagaaaaataaaacttactgcatagaaaaacatttgtaagttaccaacttagatcatgttttagaagatattttaggtagtttttgatttttcttttattaactaaaaaatttgtttgattatttgataaataagttattttagtagtttttatcattttttgaaacactactttaaataatatttttaaaacgctaacttttgatatttttttcatttttattctcaacacatttattcaattttttattatcttttttaaataaatcatgattttattatttttatgttattttatatcagctatttcaacaattaattttattaaacaattataatttaataagttaattttcagctattagctcccagcaagtttttcaactaattttatcgaatataaccttaatttcttttatcattgatacaagtccaaattatatttatgtatttcctttcaaaagtaattacatgcaatggaatcccttaacaataaggtttttggaattggaaagaatcattctccatgagattcttagttacattatttataacttttttgttcatagacaaaattaattcaaaattattttccattccaaaacataacttatttccaaacacttcatatttaactagaattcgctcccaaaaatataacccttccccttcatgaaatcccacaagcctcttatccattctcaatcattattcaatcataacatacatacaaataaaactttttagattagatttaaggatgatcagactacaacttataacttccaccacgtcatgttcattcataatttaaaagggaccaccccctaatttgaaagggcaaataaaagatagttccatggcatgtaataggcaaaaacatatcaaatcagtccgtggcatttcatgtgcctcttgctcgttaattatatgttgaacatgaagcagtccaatcaaatgaagagttacatagtatattaaacagcaatacaaattatggatttaatttgaatgagccatcaaagtaatataataaattttgtcacaacatttaattagtttgacctatcatgtatgcatttaattcatgaggtgacaacacaacatcaaataaattataaaactttattaaacaaagagtacaccaaaatttaaaaacacaaaccaaataaaattattgtaatatacaatttttaaaacaattgtttttatttatgtagttattttcttaaaattacaaaaaattataattattactcaaatatttttcttcaaaaaaaattgaataacaattattttagtttttatatttaactaataatatacattaaatttacatgacaaaattatcacaagacaatgtgttgaatacaaattttatatgttagtacagatgttatatttatcatatatgtatattgttattatatatatatatatatattatgatattcaacatatattataataatacaaagagacaaaagaaaaactatcttaccatattttctaactcagctcactctcaagataaaaacaaatactagacacaacaaataactaattgcaacaagggaaatacgaaatataacgttggttgggttgtaaaaggagaacgaaggaaaggagggagaaccaacagatccttaacaaatgtttaatttaaactccttacctgaaagtaccaatgcaaaccataattttgatattaaacgaaggatgaataactaaatccagcagccagtggtaaaattaaaggtatttaacagttcatccgcattacaccagagaatcaaagccccgtggcttacaagttacaaaataccatttcaccagatattgcatggacaaattaaagtcaaaaagcacctttatcttagctggtttctgctaggatttccacttgattagtaagtcaaacttggtggttctccccctccccccgagaaaagcaagaaaagctttgccaagttaggatcaattagaaaatttgctttctaacaaatggcatagcaagttagcaaccaaatataatgtggtatgcatcgactttctattctttgcttcagcattagatattatatataatgtggcctaattgcatcgacaagacgcatctcataatgttcgctactcagtaacaacagaaagatgaaatccataaactctaacgcaatcaatatttatcgaaaaggactatttgtgtaacttttccactcaactgaaaacatcaaactgaaccctgatagactgtcactgataggcaccttgtcctcaataaattgcttaccattcaagaatatatgccatatacgagtgacaacttatgatcctgctggtttgatcaaatatttagttttcatttcttatttttataaacaattacaaaaatactactttgttttcacttcatttcctactatcaaagatttgtataagaaatggtgaaaacaattgttttcaacaccatttttgtcaaatctatgaaaacaagaaacaaaatgacaaggcataatttttataattttttttaaacaaataaaaacaacaaataaaaggttttctcaatccaaacaaatcctaaataaaagctaatttctaactcataatcttagttagccaaatcaaactcaaaatgaccacaagtaactggactggcataattgtttgttgggacttgggagtggttttattaattatactagaactcagcttaaacttaacataatagttgattgtagtatatctgccagagaaacccccctttttgacattaaaagtatgataggttgacaaaaatgaacagctctggccaaacaggaaaggatatatttttcaatatcacaatacatcctcccaccaccctacccagctccctaccttttagccttcgaacacgagttcaacacccaagtatatactagaagttcattttccatcataggttctgttcaatccaaggtattttcccttcatcagtttgatgattgtacactagtttaacattacccttctagaatttcttcccatgaaccttgtagtcctctgcttaggctcacacactttgtgcagtttctggctactacaatactatagttgaattgacaagatgtaaatccctacaaaaaattattcagtgaacaaaattgaagtagaagtactatattgcatttcccaaatgggaaatcctagtttccacttcaaatgctatgtatcaataaattcaagaaaacaacagtctattccattccaggtcagtaagacatactattggtgttcttagtttcaaattatggacgacattattgtggttgcggtaatgtccacaacagcaacagaaccaccctgcaactacaggacaatttccatacaaaaaatggaggcaaaccaacaaccaaaagatggaaacagagggtatcagttggcagcttctgccatatggtacaagtaacatccagaagggatcaaaggaaaacagaacaaatgtcgactggagataaccataccaaggttctaaattgaggttatgatcacagtcacggttgcggttgtagtgcagtacagaagctgcatgatatggtccataatttaaaagcttgaaccaaacgacagttctgtacaaggcataatagaactctagaagagacaaaagagcggcatacttaactaatgaatcaatgagggatgcaacattcattccacccaaaatatggaatatgtatctattgtagagaaaaatcagaaaactgtgcatacatatatttattacatgtgattgtagaacagtacaagcaagaagaataatcaattgctactatgttttctctgcttgaccaacatgccccatctgttctgaaagattatttgcattccgtttgttccaccaaaatttgttaaggtcgctgggttttccttcattctttctgccatcatattcctttctttctgactgcacttcctgtgtttctgatgcaccaggatcctctgtcaagaactgctcccagaatacatcattaacaccagttactgcaacagtggttcccgcaggttgttcttttgatgcaacaggctcagaaacagcagctgtagttggctcagaattcatgtcaattccaggtgacttatgctgaacttcaacatctaattgcgcacaagatatagatggactatcagcataacttgtagattcatcaaaatccatgtttgactgaatttggacgaaggtgccaccaatatcatgtacaatagcctcccaaaacgccatggatgattcaagctgatccagtcgctccacgtttaatgtcaagacagtgatattgtctgcattttctcttggtaacatttgggaagtttccatagcatcttcaacactagcttcatcataaaagtggccacttctcggcaaccttcgttttctatccatggtttctgtcagaggcaagatatttacagaaatcacaggtttctgcaatacatgagaaacagaagaaaccatcctttgttgattctgttccaacttttccaactgatcttttgagcaatgtatttgtatctcatatgcctgccactcatgctgatatttctgtaattccacgaggagttgctctttatcgtgtttaagtttctctatttcatcagtaaaactctgcctttctgcctcccctagtgggccttgtgcttggagattctgcaaagaatggctatgaaccggcttccgtctatggatgttcttcataagatgaggttgccctctaacaaaatcatcattggcaaattcccattgttctgggtcaacttttctaaatccctgctcaagtaaagatgctaccactaagtttaagaaactaaaagcagaatggggcaacacataaacaacacaaaacaagtagtattcacatcaacaagaccaagatcaaatttgcttacatatgtgttcagctgcctgatgaaacttgagaagttgttgtgcttaaagaatctaggcagcaaatccctggcaaattcagggggattccatacaatgaaactcttgctagagacactccacgaaacaaccgaatccgtggaaggatcatccaccatctcataagtctttgcaaggaaagggggcagggaacttgaactaccctgtgtatcatccatcactcgaaccaaacctcaatcaaacctactccaaaatctcaacctccccaattcaaaactcaaacaccaatcaatttccaaactttcaaaagaagtcaacccttaattcccaccacgatattcggcagaacatcccacaaaaaaagaaactttttttctttccaaatctgacctagacaaaaccccaaaacaaaaatttcccacttacagcaaaattaataatagaacaatcatttcaaaaccccatttgcctaaggagagcaaccctaaacccatgaaatcaacaaaatcacaaggcagaaaaagttttcagctttctctcctctcttacctcaaatacctaaacaagcaacgtttacgctgaaacaaatctcacagaatcatgggttgaatttccccaaaaatgttaacgtaggattcttctttccctggacgggaaaaattggagaagcttgcacgtaaagcaacaataattattaattaaaaataaaaatggcagttacgttattgaagctttgcacctgaaaaaggaaagcgaagagtgaaagctgagaaatcgcagagagggaaaaagagtttttttcttcagtttctgggtgattccatatttccaattgttggaatcctttcttcaattttccagttttgttattggggtcaacgcgtggttgatttggaaaggaggggggtggtaccataggaataggattttggaatgaaaataaaagtaaagaattgctattggtggtgtatataaaaattaaaagcaaatttaatactatgagaattagaatgaacgacgatataaaaaaaaaaaagaattagaatgaatgatcttaacattttacattattatgaggtattgagctttaaataagtgagatattaactaaatggaaaaagaaacttaaagatacttttaatattattatttaattaaaataaaagttttagttcaataactaatattgatgattctcttttatttactatatattattgaagtaaaaatttaattctaacaatgaagtgcatcaaaagatgtttttatctaaattttattctattaaactttataattattatatgtagggataaatataaaattttcaaacatgagaatggtcattccttaggggaccttgaaaatgatctacaattaaaattgacatttattctaacaacaataatatttggatgccttttaaataagaattaagaattgtcgaaatttaataaagacttaatttttataacatgcaattaaaatttaataatatagaaattaaaattttattatatacaaaaaataatcattggacaaacgtttactgataaaaaaaaaaaaaaaacctctcataaaaacttgagtgtgtgttacaggacttttgtaacctcccaaaaaaagcagggctttaattatctataacaatttataaataatcactaaaagcaataaaaaaagaaacataatcaattacaaacaacagcttccatgaatgcttttagtaactcaatggtctctgcctatctggttcaccaaatgctgctcccttccattgtgccattaatccattaatccattatgatatcgttcacataaatgagcaaacgaagctttatggaaaggttcgcttcaatcgatacaatccaagtgcgagtctcaggaagcaaaatattgatacagcacatgtgaatatagtttttttgtcttttttgggtagcatgttaatatagtatgaaaacgtgtagataccaacaaaatacaaaataaaggggaattttccttccctctagtccctagatggaagaagatatatataatcatattttagttttgaatataataagataaaaagaagcattctgaaccattcaaaagaaaatataggttatctggaccacaaaaaggaaataaagaaaatggtgtgtgaaatgggcttgcttaaaaactacactccagataagaacattgattattagcaaacagtttcccatacccgtctctatcttgtcgttaattggttattttatttattaatcgattgttactttgcttgagatggttatttcgggagatgatgatgtaagaattaactagatctatagtctatattaacctaatggaggggtccattctaacaaaacagtagcacggactgaagccacatccatgaagcaatcgatcaccaatatataagtgagataacgtattcaagcacgcaaaaggtggaagagttatggttaactgttcattttagacttttggtgatagttgattgtaactaactgaccaaataatgtttgtttgttattgaggataaaaacgttcagtctagaaaaacttccactgaagagctaaaactatatgctcaaagagtaggacttgatatacaagcataaatgaaatcttcactttacttatcagatcgtgtggaggttcacaataatgattaatgacatgttgatctcagtcataccaccaacaccaagaacttgacttctatcttaaatcataaatgattccctttgagccaagtcgccattccagttctttctagtcaaacccattggctaaatgacccttgcaatagaatcctcaacaaagtaactagatccttttagacgttttgcttggtcacatacatagacatatggattgttatatgtggcacaggtatgcaggacaaaacttttcctaatatgtggtaaacttagtcggttcattatttgggatcaaaatttgcttaggaatcgatttctatgcatagactccaataattgaagaggctcattttagaaaactagtcatggcctataattatgtttaagtatattttctgatgctagagtatcccgtatggccaactttttccttctccaagacattgattacatcccatatcactcattcaccctcaggaaaatagccaccgtttgagtgaaaaccttttgcccacactgcactatcgccttccaacataggtacaagtgtagaactgaaactggtatcatccatacttcagtatcttcatacagtggagaatcattatggaaatactttccaagctttccaagagaacttaaatgttccatctcatctttagttactctagatttagtaacatgatccctttctatcaccacccacgccatcaatcagtcaatggcatcaaagcaccacatatcagtaaatgaaaattcaagatgtttgaagtcacaaaaacaccatccactaaaaacacatcatcaaaatcgtgagagaaaaaaatccagtttaccaaacacaaacaaatgtatgtatatctaccaaaggagggttcgaacggagatatataatgttggtgggtggtagctgttgagtcatttacaaacataccaagtcattaagtagtatttaataaataagagttatcgtttctacgaagacttgcacaatacttagtaaatatcaaaagtttttactatttaaactaacaaataaactatgatgatttgaacataatatttaacaataaagataaaacagaacaaaactacaaattatgatatttttgggattttcgacaaacacatattaaaacgatatgaatttcagatcacaaaggttatcagggttagatatcatcgaaccaaactctctttacgctaaaacatgatattcaacttgtaatccaacgttaatatcgaccacaatttaaaaacagtattctaatccctaatttcttaggtgaaaaaacttaagtttctctcttaaatgtcaatcatttgaacaattaacaaaagaacttgctttaagctcaatgacttaaagataaccattatccctcatcatattcctagctttgaggtttaatggccattttatcacagttcaaaataaagaaagtattttctaatagtaatctcatccaagaatcaagctatgagtgaccaaaaacaagaaaaaatggaggaacaatggaagaaaagagttggggaagaataaatttttaaatgaagtgtttttacaaaatgatgaagcgtgccctaaaataaacgagataatctatttatacatttccaaaaaatctacacttaaatgagtgtttaaacaattaatgtagttatacaattctacacatctgtctaaatttagcttaaaccaaaagttatttttatgaagttaatttttttttaactttcttttttatcttctacaaaaaagaattttgatttatctcctcgaatccaaacttaagcacatttgagctaaaattttcactttcagctttcattaaatcttgctccaaaaaattgtaatttgatccaattcaaaatcctacaaaatgatctattaataaagcatgtgaaatctaacaaaataacaaattaaaaagaacaaactataacttaacaatttatatataaaaaacataaataaagtcctaaaaataagaaagagatgaaataattatctaaatttatatgtctcaagttaaatatttttggcaattattatagtcataagagaaactagaaaaccctttaggataaattttctgctacttggacgtgttccttaaaatctgaattgttaccatccattaaaacaaacaagcaccaaattttaccatttaaattttaagctgtatccaagtgtctctctgtacacagtatcaacataaagatcagccaaaacagtcagaaaaatcacctttgcaaatagctaactaactttctgataaaattcaaattaatgtcagaagaacaaaactttcataatcaaaacggaaagggtctctatttaggtgccttcatgtcaagcagcgaatcttcaactttccaccctggccacatattatccggtttctgtactatataattattgttatatagtcatcataccttgataagacgggtaaactaatgtttggagtagacttacaaaccaaatattatgcaaaattaaattataaaattttacaaattaaatttctgaagaatcttactataatggagtatatttcaaaataactttttctgctattaaaatattaagtgaattttagaaattagtaatctgcactaaattttataaatataataaattaaagcaatccaaacgtgaccaaactccatgtaattttaatattctaagatccccacatgacctgacccagtcacgttgcagccacccccgagtttcaatcattcaaacaaatattgtctttccaacatccttttcctacatctgaaggtccactttccaatatcagctttggttctgttgtaagtaagaaactgaggtggtttagcattaacaaccactttgaaagctgcaatcttttttgaggtttgcatcatccaaaaatggtgttgaagtgcaaggcagagttccttgtcctcttggtccttgttgtgtgccaaccctcttgtgggttgggggaggattggtctactaggagactcagtaggcataataataagatgatttctccaagctgtggagagttggtgttgaagtcacagtgctcagagaactcaaaatgcaggtggtgcaccagtgaggaccttgatgacatgtgcttctctaaatctgaggcattgagattgcctcaccaggttttctcttgtgccttcatcccctgagatctattctctcttggatctcaggatctgtgttgcctaccctacactaaccaattttcaaggactacttttattttttgttgtgtttatgtcttgttttttgtgtttttaggtatgacttgatagagggtggcgttgttgttgtatattcagtttatgatttacttcaaatttgagacatggttagggtatatagttgaagatagagaggaaatcgccacattctatccttttgcttcattatctgttgcgaaagcctcattcaaatagctgaatagttcatctcagttcatttacatgccttttgggggcagctcagctaacaatgtaaaagcttcaataaaaacagccaaaaaaattatcatatgtttcatttttcatcttaaattggatgataacatgaacactttagtcccctcccccattgctttgtttttctagctactagaagattacttagccgattttcattattataagaaatacttggtgccattagaaaacctgtttacaaaacaaactccctgataatgttgttctttttggccagaaaagaatttttttttaatgctaatttaacgttttggcttggcttatcaatattgaaggaaactgctgtctcctctgttaataatgctgatggtgcttggtagaattgaaaataggagttctggttttaatgctattttaactcttagatatctaataagataacatcaagatataatgcacaaatgacaagcgcaggaaattccaggtttctggtttcataatagtttaatttgactttgattatcttaacttttatccaggttcatggtgataaacaaagttaagatctcttaaaatgttaatttgttcaaagtcaaacaaagagatcttaattgtcttcctggtagcacaaggaagaaaattaacatctcttaaaatgttaagtcttccctgctacattgaaatttttgcttataaaaaaaaaaaaaaaaaaagtcttccctgctatatttgctctcttacctctgtatgtgatttaaatgtttaaattcattagtcaataagtaagtttagctttgatagctgttaacttatttaattatttgaagccattcatgaaaattcccatgttatttgaaactgcaaactttatcaaatgtttgagctgaaacaattactgacatgtttacactaaacttgtttaatgttcaattcaactcatttgttttaataaatattcaaatttaactttgactttgatctttataatctaaatgagtcacgccgcccaatttatagccttgaaattaaaagtctataaataactcgcatgtgcatatatagaatgttacaaaaaaattgtaatttcatatagatatgtttagttaattgtagttttatcttaaatttttatcattttttaatctttatgtctaaatatttttctattctctttctccttttatctttatgaaaatgtttattaaatacttatttaagaaagggattttttatgtacatatatagacgggaaaattgaaactaaaatcttatataaactacctaaatctttctaccgctaatctgaacctggtgataaagggattgttaattgtgtgtttatgaatccccaatagaaaatctaattaataaacttaacaaaaaaaacactctaagaagtaagaatatagttaatatataaaaatagtcatattctaaaaggattgagtaaattaaacgtaaactttgtatattcttaacaaataaattttatattttaaatttcactcgttttaaatgtataaatcaaacttaattatcattttttttcaatcaaactaactagtgtcagctttttttagttgtcttcttataaaaaaactaagaaaagatatccatatcaataagaaacgggccaaaaaagggcccagagaacaatttaaggagtggcccagcagcatacaatcgcttagcgatattttcttcctccagccagcatatttctcttactgtgggtgtatgaagaaatatgatgaatgcagaaagaaaatccctccttagaataggatcataagcactttaatcatttgggccttagattcttataagagcttatagcctcaacagatcatacgcactacatcccaatttacgcaaacacgtaaactttagaaaaaccttaagaaaaagtgaaataagaagactttctagcagaggaaacaaataccatgataagcaacacaaattacactagaagttaattattattttcaaatcagtgtaacttacttttgtgggctccacaaagataatttaaggacgttaatcgaaaaccttgacctgaaatgaatggagttacacttattgaaaccaccccaaacaatcatttaatcaaaagtgacatataagagcaactttaatgcaagatcttgagtaaagatcttgagtttaagatctggtcttcattagatctcccaataaaggaggtagagagatctccaacatggagaatgggttcttgtagaagaacccgtaagatctgcatattgttcaaaaaagaataaatttttttcctctttctctctccctaagatctcaaaataagatctaccattaaagaacaaaataggagggatcttgagaggtccccaatcctacatggtactatagggtctaccaaaaagtggtctaagatctcaatttgagatctaccactaaagatgctctgagaagctattggaattgaattaatagtgaaaattttaaacagtttatactaaatcaaacttcattgtcgttattaaaaaagcatgacgtgtataagtcattgtctgccacccaaatattaaatttattaaaagttatccacatgtttcaagtttcaacttataaaagatcatctctttacgaatccattgagaaactctttccaaaatgatactgttcagattagtgacgcgttattcctgtcatgttgtaaaggaattggtggggtcaacccttttttttcagtcaatttaattttaactttaaatttagtgcatttagtgtaaaaacaattatattacggcgtatcatctaacgatatgtataacattaattaatacattacagttggcatattattaaatttattgagtaatgtaaaaatgtactattaaagcagtaaaaaaatgttctattaaaagtgtaatttttgtaattcattaaaattaaacactttaacttgttgttcttgcaaacattttttttttcatttcatgatagaaccatagaagaagacttcaacatgaccataatgagatccccgatggtagttacgtgtaaaaactctcacactctagttagtgagagaacgagggaatgtaaaaaatgagattagattcatatttgatgggttagaaacccttatagaacaattgtttaagtagaaagttagtgaatcaacttgataaggttaacgccaataaattaatctaatttctaaaatatcataaatgagtttcttaatatatatatatatatatataatttcataaaagcataaaaaacttaaagatgaaaataaaattaactcgatacaaatgtgtacttcaatcactttttcagaagtcttattgatgataaaatttttgagagttcttgtataaaaatggttctctaggctactagacatttcatttctcttcaacggggagaactaaacaaaaataaattcttgtttataagaactcgataaaaactttgtttttggagatggactcaatagccaatgacatcaaacattttaggcatttttgtcatttgcttacattttttttcaggttgtgttcttttttttattattattaaatttagctagatgtttaattaatagtgtcaagatggtagatcttgggctttagcttcacgtgttaaccaaaaagaatttaattgaaaaaagaataattaacaagtgtatttaacatactagttaaaaaaatgtcaataaaaacatctaatatttattttaagtgattaaaatattaaatttaatttaataattagatgtttgttaatcacttgataagacccatgttttaaaagcaatggagtatttaacatgaacagtttggcaaataagggaaatggtgaaaacaaaatcaatatatataacataaaatcggacaaggtcaaaatatgcttggtgttgaccatgtgctcagtagtgggaggttggaaattttttgcatgcgcattcaattaattccttttgcgtcaatgcttggactcgttgctaatttgctattgatgaactggttagaaaagaaaagaagcaggatttaatttttactatagcattcttgtatacttattaaatggaaaagtattgaatatttttttatatacttaagacattaatgcgcatttatttaatttctatcaaattctttgtttagaaaatattgagggaattgataaaaatatatagcagtattaatttttcatctcatacttctgcttcttttttttttttttactgaattacatacttctgctatttatttttatataactaaagtataaatattaatgaactgcataatgatggcttgacaaagtacttaaatattctccagcttagggatcttttttttcatttttgtctttttgagaagatcaatatgcaaattctcgcgaatattattatatatatcatcatttatgcaagaggacgtatatatatatatttacatatgttttttcaattattaaaatgttcagttttggaaaaccttgctactatgatctcttttcttttctcatagccttggacagttggactactatcatccacctcgggtaaactaactggttgacatttgaatttctagtttgcctcgtttggtaaaaatattggttctcatttttgttattcaataatttcgtaaaatataatgccttactcatttgcgtggtgtgataatatctaccaaacttataaacttatttttaactattttttttatttaaatgagagaataaaaaaaattcacaattataattttaataaattatattatatataaagacataatatttggttattttgttgtaccttctttaagagtttggtgatatattgttttcgaaagcaacagattttggggtaattatatagtttttttgtgtgtgatatttttacttcttaaaaataatatattataatttaattaaataaacatatatttttaaaatttgaaattatttacttttcatttttaattaatttttaaataacattgttttgaaaaaataattaatcattttataattttaaacatttaactgaaaaatattagaatttcattataaaattaaaaataaaaagtaaataataataatagtaaaggaagaattctaatgaaataatgacgattaaatgagaaaaaaaaataagttaggaatagacatattttatattatactttctataaattttattattgatattgtacacacacaaaatttatctattccagaccatagaagacggtttttcataaattatttgatttaattcacaaaaaaatatgagtaattttttattatatcaatttaaagttaaaaaataaattcagataacattattaaaaattaaaagtaaaggtaaatcataacaaaaacatagaaagtacaatcaacctagtaatcttttatagcagatatcgatcctcatagtggataaatcgaattacaaatagccaagtacgttgctatgacagaaatgtgagatcagcctaatgctaattcctaggggtaatgtgaacggagtttatttttttgggtgcatgatgtgaactgaatcctttgacaaacctaagcgtcttcgttggtttttaaaatataagttttatcaagaatttattttcctgaaacaatgtgtaaagcttttgataaatttgtttctcaaaaaatttaaattttagtttccaaataaaaaaagtataataaattcatctatcaattaacttttattcgctattgttaataaaagaatttaagtaacacactcattaacaaatttttcagctctatatatatttagagacaaaaatgattatttaatcaaaatataatttaatttttctcacattttaatcattataaacataaaattataataaatacttaaaaaacaaaaaaataaatataaatttaaacaatatgataataaatataatattaattaataaatataatctatttattctccttcaatttctaatttcacattactcttagtaagtgttatctaaagttgaatgtctataaattatttttcttgtgctatttatcattctctagttttgtgttggaatatttgtctcgaatagtccctgctcacaaaagtacaaaattgatggttacatatataatactactataatagtataattaataggtgctcacaatttccagtagttcctgcttgagtatcaaactttgtaatgatacctggatagcaaaatgatgtctgaatttaatcgccaattaaatacaattaaaaaggtgtccctagattttatcaatattaagatgccctatattaattaatcaaccaagcagatttaagacgacgaagaaattttacgtacccagatctttctgctgctccgtcagaactgaatatatctgctaagaggatcacagtccaaatcctacttactaaaataccgcatctgtttaaagaattgtctgagaagttaacattaaaaaaagaaaaaaaatattgtgcgacatttattttattcgagttaattcttattttgatcctcaaattttgagatatcgtcataaactcataatagttcttgaaattaaaaatggtaaataattttttaaaaattggatcatggagtgtgaaaactaaaggattacaagaggaattataaatgcacatggagtgtgaaaactaaaaatgatatggagataaaaaaaaaaaaaacgtcattttatgtattgaattttttggttcaaaatgttttcaattttttataagattttttcagcaataaataactacatatatgattaacacaaaattaaattattttcctgattgaacttgtttctcgttgatcatgattttaaagcattaaatagtgaacatttaataatatgatgaaatatatgttgagataattagtatcgttatgatggtactcaagacaaaccttccatattttggtcttaaataaataaataaataattactctttaaaaaaaaaaaattataagttcggtcaaatatttattgtatgtttaaaaataattcaattataaaacatcgttttataaaattctctataaaatatataatcaaatttttagataaattaattccaaaatatatttaatgtgtatttggttgttgttatttaaaaataattattttttatacaatatgaaacattactacagaatattgtcatttattaataagaaaaaatagataaattattatgagtaactccgttaatatatttgttatcaagcaaattaaactgttagcataaacattttaattttatactaaaattgtcattcaacctaaagttttttctaaactttatcatgatcaactttcataaagcaaaagacccattttgctaaagtttctatattagagttcaccaacacctataattctattcatggaacaaaagcagtccatactatttatttcaacttcttttttttttggaaaattttattttattttataaaaaaattaatgtaatttttttttgttggaaaagcaagttaatgtaaattgtatctcattgtgttagctcatgttattaggcaatacttttttgttaccatattattgttacataatattaataaatttggtgtaattataaatagaaatagagaaaatattagaaaagctcaaaataagtagacagcctttccgttttatcaaagttgttgtaaccgcgtggcacccaaaactcaaaagaaaaggaaacgatcgatactatctgaagacctattctgctattcacgattctattgtataatcgagtgggtagttggttcagccttcaatgcatttttagaggcatattaactaaccacttcatatgctcaataagccattttgaacattgattaatatcaacagccataaggctgatccaaatgataatcgatcactccccttacttggtatttgtattgtcaactactcgtgaacttaacaagaaattaaaaaaattaacattaaaagtatcatcaagatctaaatataattgatagatagttgtaatttctttaaacactttaaaaagtattcgattctttgattgtgtgtataaaaaaaatatattaagagaagtaaaattcactttcactatctttatattttgaatatcttatttccagaaaaaagtaaaactaaccttaagttggtatgattggaactaaatttatattatttaaataaaatctaatgtttgaattttgtcaacatgaaaaaaatagttggaaaaatatgggagtacttttattagtatatatcagtaactaatattaattaaaatatcatcttataagagatgaaaatataaaaggaaattaatgtcttatatatatataaataacaattttataaataaagtaattttgtatttttctcttataacatcataaaaaccaatagcataccataagatacaaaaccaattaataatcctaatatcttcaaaactacacaagccccaaagaggttcatttgtcttctatcctgatataagtccaaggtctgtgccttttttcacctctatattctttcccttttatttggaatatctgcatatagtatattcctctttggctaatgtcataactacttaaactatcttctgaaccatcgaccaaatattttaaaaagataattaaaataaataaatgcatttagcttaaaatatttaaagagattagtttttattcatcattattgtaaaaaaaatgataccatcaaatactcaaaaccctcttatatataacttttaaataatcattataaaaattaacaaatttattgtacataataatatgtaattagattagtttaaactgtgaaatgtattctaattaaatttgtattcagaacataagaatttaatttgcataaaattttagtgtaattttttttataatatcaacatcaaattatgttaaatattacttttaaaatagttattataaaaactaaggaaattataatacacggcgatcatatagtataaaaaacattgtatcgagctttaaaaaaacattgtattctaatttggatttaattcaaaatacaaaaatatctaataattaattaagagtgcaattagaaagattggttataagaatataaaactattccgcctccttgtgaacaactttttggttgtctataaattggagttgtttgccaagtgtttcatttgtagttgagtagacggagcagagtgtccagggcagtttacaaagccaaattttgttccttagttgtttccttgttctctgtcactgatggctgattattcagcagaaactgaatatcgcgaggtagttgtaaatgtaaccaaggacacctccaaaaccacggaatactcagactcctttgtctctgttcctttcttgcagaaggtgtctcctaatcttccttttgtaccccaaaaaccattaaaagtgctcttattacaatttaatagatataatggattgctatctctgctagaatctgctttccttttttgtgtgtgtatatttagtttctttctgaattaatctatttattatattaataagggtggttgagcaggaaatatgatatttcctttagtgttatgtagagttcaagtagcaggtggggtgtctactttgttgggattccgtatgctattttgagactcctgcatgccacctcttttgattacaaaaaatgtgattcaacagaatgcgtgaattgttgtatatatacttgtcttcgattttcttacagataaaaaaagaattattgaactagaagaattgagagtggaaatgacaatatcatggttttgtttgttgatggatacagttggtagctgaggtggtgggaacatatttcttgatatttgcagggtgtggttcagtggtggtgaataagaacaacgacaacgtggtaacacttcctgggatagcaattgcttgggggctggttgtaacagtgttggtttacactgttggtcacatctctggtgcccatttcaatcctgctgtcaccattgcttttgcttccaccagaaggttccccttgatgcaggtaattgacccttataacctttttcttaacttggttgatctataaataggtaaatgtgcccatttggaatattgtcattttccttcttaaattgttatctccagcaaccccacaaggaagatggatgtctttaaagcccaattatgttagaactgaaattatgagatgccataccatataccaaaaatctaaattatgaaagtaactcctaacttcatgatcgttgccaaaacaaagttgcctctttgcacatgcatataaagctagctaagatatttcatattcacaggaaaaaaaattctactatgaagttgttttaaaattatgtgttcgggcatgtgatttaaattgcaattaattactgttgttaattatgtaggtaccagcttatgtagcagctcaactcataggaagcacacttgcaagtggaactctgaaactattatttatggggaagcatgaccagttttcaggaacactcccaaatgggactaacctgcaagcttttgtgtttgaattcataatcacctttctccttatgtttgtcatatccggggttgccaccgataacagagcggtaacgtctctcacattactccctctgcttaaatttgtacatagtagtactttcttatgagatttgggcaccttattgataaagtttgttaaaccagagacaatactaattcatactttatttattaactaaattacactcaatctggttggactcaatgaaaaattttacatgtacgccctttttttctaaacactcatttgacacattcactcaaaggggttagatcatctgttatcaagctgataaataaggtggagagtgtgcacaggggtattcttgagtgagaggtttctgacttgaatcctggtgaaaaaacaaactttggaaatgggatgaataattgatacaagcccttacatgattacctctaagaaagaaaacctgtggacaacatctaaataaaattcatttaacacattttatctctttatttttcttattattacatcacatctctttttacattaattatttctctattttttttatctccctataatgggcatatgggttgcaccaaatattaccctaatcaaataatttttttaatccagagacaatatattaatccatagcttacttataatattggaaattataattaaaaaaagtaaataaacgaatttaaacatgatataatatttaatgttgtttagttcatacaataaatatctttttttacggaaaacaaatatcctaaactaatggcctgtagtgttttttttttctttctaaaggtttcaaaccaatttgactggtttttttgacggtgctttgaaccgttgttttgagtcatgtaaattgaatacttaattggatcgttcatttttttagtgacacgaagaaatggagagaggcatggcaacactgaggttaatggttgacctttcatgatgatattttcgaacataaaaaacttacactcttcttatactaattttaatagtaaaataatgtaaattttttaaaattgttcttacgtaacttcttttctacataatgattcgacaaaaaatgcacaatctaagtcggctaaacgtatatttaggtctaaaatgaaatttaagatgattttttttaaattactttaaatacatttttaaaattagtattatacccatttttatttataagactacctaaattaaaaatgatatttgttcttttttggtttattgcataccctttttttaaaatttttgcctaattttatctcaacaaattaatctgacatattttatcctaactttttagaaacttgagaattttatcttccatcattttattcctaacataactacactttttacttccttttttttgacaaattttacacctaatttttttatttttgacaaattttattccaaatttgggcaaattttacttccaacttttggtttataattcgataaatgatgaaagataaaattcataagtttcttaaaatttgaaaataaaatacatcaaattaattttttggataaaattcataagttaaaatgttgggactaaaagaatacaattaagccaatttttttataagatccaatccataattacctgtattaattatttttaggctaaaatatccctaattaaaaaagagagaaattgtatagataaacattcagaatggagatattaatgaaaatgatattttttgaaaaaaagaatctaaatataagcaaatttaactaacttatatgaaaattaagaaagttgattattttcatttaatttttctaatgacatttaaagaataatctttattttttaaagtgtctttcattagaacttgatattataatcacaattagttgaagaatttttatggaatgctatcattaaatagagtcaaagtagttaaattttacgtatatttaagtctagaaatattgttccttatatttaggtatatagatagtataatttaagataaatttatttttattaactaaattaatcagtttcttttaatgataattgggtcttcaaataggtagtatgatttttttcttcataatttaagatagaaatgtttattaaaataattatagaaacttatatattaacaattagtaatatttttaagaacttatatatttttaaaataattataaaatcacgagacttatgaaatactgcgacttaaagtaagggctattggtgtttgatcctagaataatgccctgtacacaatgtttaggtaccatttttttattttaatatttaattacaggagacggctactttgtgagactagattatggtaggggaaaggcttctcttgtttttcatttctacaatgattacgcattaattacatgcctttatgtactttttttttaatatttcacatagctgcctataatattttgttgcaaaatatatattccaaattaaagttcacacatctgtctattttcatttgaaagtatcatccgcccaatgcattgttgccaagttagaacttgtaattttctaaattacttccaatgtttagcaaattaggctttacatattaaaaaaaaaaaaagaagagaaattggtactacctaatttgtatcgttttgaatcgcttgcaagaatcctagaagtttacgttacgaggcatatctcatgagaatcaataatccatccacgaaatattcttcttagactcctttatttattaacttgagtttaaaattgtgcaggttggtgagttggctgggattgcaattgggtctacaatactgcttaatgtgatgattggagggtaatactaattattaaccaatccaaatcttaattagatgcaaaatcagcattgttggagttgtaggacataatattcttgtgaatggttatcatatttggcaggccagtcacaggagcatcaatgaacccagttagaagcctaggacctgctattgtacacggcgaatacagaggaatatggatatatttggtggcaccggttgtggggccatagctggagcattggtatacaacaccattaggtacacggacaagccattgcgagaaatcaccaagagtgtctctttcgtcaaaggccatgatagctccaaataatttaagcaaatgcaaatggactaatgttagggaaaaagttacatcaacaccttaacatccattgaatacctagaggaagaaaaacaatataagcataatagggtctataatctcgaatatgtttagataaatttctttaaaaatacttttaaaagaagaaaataagaagaaaaaaatgaaataaatttttcataaacaaaaataagttctcaattagctaatttttagaagttcatcactataacttctctaaaagatgagatgacatctacaaatgagctaataaaaaacttattttagcttatggagaaactcattttattttttcttcttctagaaatacttataaagaaacttatatccaagtagacccccgtaataggaaatataaaaaatgaaaaatattggtgaagtgtttaaaattataggatgtttatatataataactcttaacgttatcctcagctgtggtgtggagagtcaataacttcttccttgtaattgtctttgttacaaataataattagaagaaaaaaaattatgcatgaagttactcaaagaaactacgctatgatttttcatgtccttgttatattaaaggtcatgcacttgaatatcatcaccctctttttcctctttatttcgataaataaaagttgatttttgatatatattgttggtggatcttgaagctttgtggaccaagctagttttatttcttgtatgtgagttatgaggagttgaaggcacaagtttatgggctttgttgattcgggtttgagtttaattttgtactatagtgaaccctttgtaaagggatatgcaattggttaatttggtcaatttttcaaaattttaatttttcataacttttccccacttcatcagcccattgaattatgtgatatatatccactgttgtaaggatttggagcattcgtattcaccttagaaaataaggtgcatgtcatgttaggcagaatccataaagacgtggcattaaataattgactttttgaggtctgtagacggtggatagactcggatactgcgataataatatattaatcacataattacatatttttttaaaatcaaacaaaaaaagttaaggttcggtctgttaagagttttgataagtaaaaataagtacatggtaatccatttatatgtctactatacttgtctagtgattagttacatttataagtcgtttaacagatatgatcaaaattagtagattgttttacactttctcataatttacatattaaatgatttttccttttaatttcttaataaatatcctaataacactaattaaaaaaccctatttttgaaagctaaaagcacagtcattttggaatggtggaaatattattattattattagtggctaaactatgcttccccacgtgtatagtcgtcatcgctccaaccgcgtcatcatataaaattataaatagttcacattcaactttagtttatttacttcttcactgtcggaaacagttttcctcgttcatttatcagctgttctcttcgtttttctgccgacaatggatgagaattcagcaacaaatggaacccatgaggtggttttagatgtaaacaaggatgtctctagaacaactcatgcttcacgctcttgtgtcaatgtttctttcttgcagaaggtgtgtccttatcttttatttttttttttgtgtgcccaatcatatgagatttgattagatgaaatgtattggtatctctgctagaatcttatattttttattgttgtgaaacgctacagtgcatatagtctctttctgaattaatctattgaccatattgaacttgaaaaaatgagattagaaaagacaatatcatggttttgtatgttggtggatacagttggtagctgaggtggtaggcacgtatttcttgatatttgcagggtgtgcttcagtggtggtgaacaagaacaacaacaacgttgtaacacttcctgggatatcaattgtttggggactggttgtgatggtgctggtttactctgttggtcacatctctggtgcccatttcaatccttctgtcaccattgcttttgcctccaccaaaaggtttcccttgaagcaggtgaaccaaccacaaattttttttttccttcaacattgatttttggttcaagtaggtaggaaaattagaggtcaaattagtttatcatgattgaaagagaaattttgtttatattgtattttcacacaacttaattttaacaaataaataaaagagagataagaagaaaaaacaaagaaatgtgaaataagatggatgatgtaagggagagaattattgagaaaagaatgtgttgtatacttatattgcatgtataaatataatatctcaaattaaaatacttatttgccttgacctttttacactagtttataattggtaaacaaaacgcgtgttgaacataggtagcaagaaaaataatggaattagagaaagccttagtcctctttcactacatccaattgtctcattttatcttgaaattattggcatattcacggtgatataactatcaaccatttagcattgtaggttccagtttatgtggtggctcaggttgttggatccacacttgcaagtgggactctcagactattatttagtggcaaggatgcccagttttctggaacacttccatctgggtccaacctgcaagcttttgtgattgaattcttaataacctttttccttatgtttgtcgtatccggggttgccactgataacagagcggtaaagtttcttattccatcattaaattttgtttttttgtttgtttggttacaattagcttttattttctataaaaaaatttattaacacgtgtctagccaaattggctatggctaatcacctcctaaattctgacataaaaaatggagtacataaattgactagttgtctacatatattcgtagcgttttggatcacttggaagaatgctacaagtttatatcacacgagacatcttatacgaaacaaaaatccatataacatatttgaatatttgtctttcttggacctcaattccatggatttcatttatttattttatttggaaatcttgcagatcggtgagttggccgggattgccgttgggtccactgtgctgttgaatgtgatgtttgcagggtattattatcttacccaaagataattaaatacaagtgtaggcacacacattatgacatttaaaacattacattatttattcaaagatgttacaccttttggaagcaaaatagaggtcaaagtatgatctcatttgcgtgattgaatattattggtgtgtataattgttgaactaaattgacaatacttactacattatgttagttattatgtaactatatcttgttaaacataagatatgcgaattgttgtaaatctatttgtttcttttacgtacgaataaaagaatatattatgtaactaatgacatggtttcatatacgacaggccaatcacaggagcatcaatgaacccagcaagaagcatagggccagcgattgtacacaacgaataccgaggaatatggatatatttagtgtctccaactcttggggctgtggctggcgcatgggtctacaatagtattcgttacacggacaagccactgcgtgagatcaccaagagtgcctctttccttaaaggagtagggcgtagtggaagctctacgtgatttaaccaaattatgctagaaattaaggtgtatttatgtctcatttacagaggagtaacttcatttggaaagtagttgtctccaaaatttattactactttatcatgtatcagggtcaaagtagaaggaagaaatcaaaatttctagtatatttgtaacttcattagtatattgttgcaaacacatccacagaaatcaaaatttcatctctttgtttttcactttattaagtttatattcatataatcactgggttttaggccccataccttgcacagttttttttttttttatattgcattttaagaaatacaataaaatatgtatatataaattgtgtaaaactattttttaaactatcataaaataaaccagtattttaatataattttttatacgtgtttaatatgtataagaaaacatatgcttatttatgtatacctatataaatactacattaataaaattaaatattataataatacttattttcaagtttaatattatattcgtttctttttatataggaaataaattataatgtattttacaaaatgtaacttgtttctataggaacaaaggtaataatataatagagaaaaaatatatactatattaacatatattacaaaaattctattataaaatatatttatttagtttttaatacctataataaaatataactataaacacccaatttcattcggacaatgaaaaataaaaatgtaaattataagaaaatttaaaacaaaaataaaaacagaaaaagaaacgagtataataataataataataataataattaatcaataaataaaaataaacgaaaatcatcatttttcttgatctaataatatccattataaaaatgttgaatttaaaaattttaaattatataataaaattttagaaaatcattctatgaacatgaataaataaactattaatttcagttttggttaaacacattgtctgattttcttttgaaataaaattaaggatcgttgacaagtaaaaaaagataataacaaagacaagtaaattaatgatatggacatagatttggccaatttacattacaattagaaatgtacatactaatttggaaaggaaatttaataaataatattgggaactgggaaggaaaaaagaattgaagttaggatgcctcactaaacaagatatacatgtcagaaagtgctaggttatattattagacggaaaaaaatctcccattattgtcacgatgccttgggaaagaaactagtctccttaatttggggcctgaagattattttgggtaccggtaacacgagcagcaccactgctttgcctggttcttggaataattataggcaaacaacacactagaacgagtagtgactccattatgaaagccatcattgtgatccatacaaatatgcaaatcttccaatgccatataatcctcttgaataagggaagttctgattcaataaccactgatgaatcataaatttgaggaatgccggcaccaggtgaatattctgctcgctgctcaagtgttacttttaagcatgaagtaggtacatccccttcaacaaaacctctcatcttgacattcagtgtctgggtttctgatatatagccagtgacaagtggtacaatcttgaggaatgtcgtgattaggcggataggctcacttgtgaattttaacatgcaaggttgatttgaactccaaattgttttgccatcagaagacaagaagtctaccctgatctatagagctcaaaacaaagcaacaggaaactatgaactttaattatcatcatactaatagttcagattctttaagcagaatgatacaagtacaagaaaatggcaattttaacagagtgcaaatcatgagaggaaacataatcatggaaattttaacaaaagaagtataattgatctccttctttgcctaataaatctaactatcctcttaaagcactcacaccacaatgataggaaacatagtacatagacaaataaaagaaccattctagttaaaagttttagcttttatgtaaaggccagctaagtgtcttagtcgtgacacttggcgtatattgcataagagggttgtgctgataactctaccctgttgtcatccattaaaatttaacaattagataaaggaaccaggaattaaactctcttagccagttcaattccttccaaatgagtttaatggctgacaaatcgttccaataactgcttgagctacaattgcacggcgacagtaaaagctattgaacccctaattcatgatattctagaatcatgttttcatcatttcttctaaccaaactccaacaatactcaaataaagcaaatataaagatattgagagttaaaactagcaccaacttgccactcaaaccctttaaagtcgtacgctagtgagtagtgaccacaaatagcccatccaccatcaaaggtccttatgctaacatagtaacattacatatttacacattaatattagaactagtaaaacatcatgcaagcagttcatgtcattttctggattaaaatgactgagataagtcttaagtacctgaaagatgccaagatttgtgttgtattctgactccggcacaaccaatgaaacagtgacgtgtaccttttggttagcaggtataacccttctacccatccactctctaacagcaatgcccttctcagaatcatgcgcacccccaacaccatcacaagacatcacaggcacaaatgcaacaggactctgcttggtgtaatcaaagttcaaaacctgcctcatctgaaacggctcctccaccaaacacctcaccaaaaacccactcaccacaagtgaagaaaccaaaagaccaaacaaaatgcaacaaatatacattgaccacaagaatccccacccacacctaaatgcaacattccacaaagatttgtgctctttgaaccacccttgagctgaagaaccaatgcacccaaaaacaaaacaccaaactttacccaaaatcaccaccaaaagacctttcccctttctaattgttccaaaagggtccacgaaaaacaaaaaagcgtgtaacataaaccacactgggaatttcattaagacaacgaaaatattgatttgaaacacaattgacctaatcaccaaccccgttacataatcgagcaaattcaaaggggagttactgaattccaccgccgagtcaacggaatcggtgacgccgtcttcgttctcggcggtggttaacgtcgattcctcgttcccctcttcggtggcaacgcttggagatggaatgggaataactttctctcgatttgaatcgcatttctcggggaaattctcgtttccgtttgaagttccgagatttggatcgctccgatggttcgtgacgtttccggtggtcgaatagtcgttggaaccggtattcgtggtctccctaaccggtgagttacggggggttgaacggcggcggattgtgatcgccggaggtggggagggtgggttggggtcggagagaattgaagaagaggcggaagattccagcgatttatcggcggcgccggagcaatggtggaaggggcagtgaggaagcgcgtcgaggaaaacgtcgtcgttttggtcgtttgggcctgaaaacgatgagtccattgaagatgacgtgattggatattgaacttccgaggctggttcattttgaagccacaaaattgagaattttttgctttctcaaaaaggaaagtatattttcgaagaaaaaaaattatattccaaaacaatacacacaagtttgtggtataaaataattacatggtttttcgtcacaaaagttaatttacaacattaaattttcttaaaagaaagaagcatatattcattcatcactttgaaaataaaaaccaataagatatgttattttcatcaccattagcatttttgtaattttttttaggatattttttgtcattctttaaatgataacactttatatttcttttttttgttaggtgaagaatgaacatttagcttgaatatttttctctccttttatgatgattcattgttttagattttgtagtgttattatgatagacgcaaatttttagtgttaattttcatagattgttatcatattttggtctttagaataatattaagacattcaagtattatgagatgtatggtgaataagattttttgcattctcctaaaaaaagttttttgcattaaagagtaaagtttcacatgaaaaaatgatttaaaatactttttatattcgaatttggggatgttgcatgctggaaacattaatcacaccatggttatgtttatagaaatttatgttctcatgcacatgatttacattttgattatcgtaaatcttatgcccctacaaatattttttttttgtctttcccatattattattcaatctttaaatcttagtttaattaatgctcctaaaaatgatcaagcctggtgcacttttagcctctaagctctttgcaatttctttttctttatagccactgtctgcatctctgcacagaatcctttgcattattcttgcataattaatgaagcatcattcaataactcctcgtggattctccttaaaagaactttcatggtcattgttgttctcctccgatccttcacattggttgtttcctccaaccattattagtatatgtttcacctctatatataaagggaacttcagctaacatatgacatccattgtcctcatcatattttgcaataacaataaagtgaactttgataccatattataatttgaaaaaatgatacaaatgatatcattttcgcgtgtccacttatcataaagattaaagcaggggagagaaattttataaatatgaaaatgtgattaatataaaaaatatttgagtttcatatttatttgttcacattatctttctatttattatttttcattacaaaagtttgtcaaattaataacatgagagttcatataatattattacacgttaaaaatatggatatatggtgctataatactaaagagtcctatttaacaaattcagaattgaactaaataaagttgcatgtaatagataacaagtatagtatagatttctgaaacgtacaattttctttttatacattttttacaagtaattccaaaatctgagttgttttttcccctctaaatattgataattcctgttggaatatgagcctaatcaactagagtcaatttaatggtccagagtttggagatatattattatatatatcaatataggaggatcggaatatttctccaacattatgtgatataatatatatatatatatatattcctttctgatttcatttaaggagttttgagaaacattttcctactaaataaaagctgatgataactaatgacttttaatttcaatttttctgccccaatttcatcgtacatgtagccctcgaagtattatgacaagaaggtacgtagttgtaaaccaggttaccgctaacacctacttatcaattacaaaggataagcataccaagtgttaattccctagctaattaacacaatgtatcatttcactttcgaattcagcattccttcgatgtaggaatttcagcctaaattaaccaagctagcctccctcgtaaagcctcattcctgcaaaataaacgatgcctaggatggttaattaattcttaattggtttcatctatagatatcattcaatcattttgtttactccccagcaatataatcctattaaagacatcacatgtacaaattcacttttattaattataaattactgttgtcctttggaggaatattgaaatatatataagagataaaagtaatctgttccccatctcatcgaaaataacaaaaggtgaacactaaagccatgcagatcgaaatatatatatatatatatatatatatatatatatatacatctcaagacgggtaatataatcatttgcaattcattcatgactattaattaataatattattaaccatatggatgatgtaacaccctaactaattttatttaattaattaattatttgcttattttaaattttattattttattcttttgagggaaaatataaattgagataagaacaagaaaaactaaaattttacaagaaacgtgtattagtacaaaaattcttcgttataaaatttacaaaatatgaagattgatacattagtccatgtctctgatataaacatacaagtacaaatctcttttccaaaatccagcctagtacaatgcttcttcaatatatcgatactactccagccttaagaaatctgatcatcatttccatctaaaaacataaaataaatctagtgagaaataaatttctcagtaggcaaatttaaaccaccaaacatgttagaaggttagtaaataaagcaaatttgattcaacatacactttagcagattagtaaataactcaatatatctgaatgaatgcatgaatgtatgaatgcatggaaatgaatgcaatggccacaggtgcacatggtatctacatatcgtactgtatgtagctacatctcgtactgaatgtagacgctgtgatcgtcttacacaaacatgcatgaatttccatgtattagcacctgatctcttgaagtagcataggcccggttgtcacactcgggtcattcttaaaatcataacataggcccggtgttcacaactcgggtcaatctcataaaatcataggtccgatctttgaaaaccagatcaatctcaataattcataatataagaaatgtattattttccttccataaagtatgttagttaaccttcagtaaaagcataccaactagaatttatttgaaatttttacaaactatgtccggattctgagtttatggtatccgtgttcaggatgtccgggttccggatatatggtgtccgggttccgggtacaaggtgtccgagttccgggtacaaggtgtccaggttccgggtacaaggtgtccaggttccgggtaaaaggtgtccgggttctgggtacaaggtgtccgggtttcgggtacaaggtgtccgggttccgggtacagggtgtccgggttccgggtacaaggtgtccgagttccgggtacaaggtgtccgggttctgagtatatggtgtccgggttctgggtacatggtgtccgggttccgtgtacatggtgtccgggtacaagatgtccgggtacaaggtgtccgggtacatggtgtcagggttccgggtacatggtgtctgggtacaagatgtccgggtacatggcgtcagggttccgggtacatggtgtccgggttccgggtataaggtgttagggttccgggtacatggtgtccgggtataaggtgtccgggtacatggtgtccgggtatatggtgtcagggttccgggtacaaggtgtccgggtacaagatgtccgggtacagggttccgagtacatggtgtccgggtacatggtgtccgggtacaaggtgttcgggtacatggtgtccgggtacaaggtgtccgggtacatggtgtccgggttctgggtacatggtgtcagggttccgggtacaaggtgtccgggtacaagaattaaaattattaaattcctaaattagagattaaagcctagcctacctgtgaaaattgtaatggattgcttagagaactaccgggattattttaagagaaaaggattttacgtaaaagaaagtgtttgagaaagtttaggaagagagtgaaagctgaaagtgtttgtatgtagattttcggtgcagagagtttgaatcttccaggctatttatagtgcttgatttagttaggattaaaagggatttggttggaaagaaacttagttactagaaaatatctagattttcttatgtaagtcatcattactaatattctcttcataaatggtagatgcaacgtggaaaactactgaagcttgttcctgcttatttattttgcctaatgccatctggaaaggtcataagaaaaatgtgcacaaatatttggatagattaggaaaaaaaattgctacgtggctggaggctttatttcagtttaaaaattttcctttattcttttttaaagcctatcaatcagaaacaaaaatatatttttgtgaatgttacaatatggatatccaagaggatttttctagtgattttggacttagctgaaattttcacgtggtcaaagactcaatttttggatgctaaaatttgtccttaaaaattatattttattattataatttagatcatgaatatttatataattatttgaggattttacatttcatccctcctaaaaaaaattttgccctcaaaatttagtaaatacctgtaaataaatccggatacttcttcctcatctctgactctaattcccaggtaggttcttccaaacgtccttgtccccatgctacttttaccaatgatacagacttatttcttagttgttttatttttctatccaaaattcttgtcgggggtaagctcatagttaaattttcttttaactgtattgattcagattctagaacatgacttgggtcggaaatatatttacgaagttgtgagacatgaaaaacattgtgaaggttggaaagatttggtggtaaggctatttggtaggctattgtacctattcttttcagaatttggaaaggaccaataaaacgaggactcaactttttgaccttcattgctcgtcctattccggtaactggagtaactttgagaaaaacatgttctccttcttgaaattctaaaggttttcttcttttatcagcataatgtttttgcctattctgagctgtcactaatttttctctaatcttcttgatttgctccgtggtttgagttaccaagtctggacccaaaagacttacttccccggattcataccaacataaaggagattgacatttcctaccatacagagcttcaaatggagccattcctatactagtatgataactattattataaacaaactctactaatggcaaatatttctcccaagaaccttgttggtctatcgcacaagctcttaacatgtcttctaaggtttgtattgttctttcagtttgtccatctgtttggggatgataagcagtacttaagcatagcttggtcccaaatactttttgtaatgcttcccaaaatcgagaagtaaagcgggggtctctatcagaaatcagggtggaaggtacaccatgtaatctaactatttcttgtatgtacaagtgagctaatctttccaatgaataagaaatcctaatgggtataaaatgagctgacttagtgagtctatctacaatgacccagattgagtcatgtccggaaacagttctaggtaatcctaccacaaaatccatctatatacttttccatttccattgaggaatttctaaaggttgtaaggtgccaaaaggtttttgatgttctatttttactttttgacatactaggcatctttctacaaattttgctatatcctttttcatgctaggccaccaaaacattcttcttaaatcttggctcatcttagtaactccaggatgtattgtaaaattacttttgtgagcttcactcaaaattttctctcttaatccatcactttgggtacacatatcctcttttgataagtccacaatccatcattatttacctcaaaatcttgcaattttccttcttggacttgtgttaaaatttgttgaaaatctaaatctctctgctgttctagcctaatgtgttctttgaaatcactagtaatttgtatttgactcaaaatgatacttttagaattaacagaaaatcctaaattaagatttttaaaattttctatcaattccatttccttgatcatcattctagatacatgcagagatttcctacttaatgcatcagctactacatttgcctttcctggatggtattttaactcaaaatcataatccttaagaaattcaacccatcttctctgcctcatattcaactctttttggtcaaaaaggtacttgagactcttatgatctgaaaagacttcaaatcttactccatacaaataatgtctccagatttttagggcaaaaactactgctgctaattctaaatcatgggttggatagttagcttcatggggtcttaactgcctagatgcatatgctaccacatttccattttgcattaacacacagcctaaacctttcttggaagcatcacaatatacttcaaatgtaccatgagggtctggtaatactaatactggagtactagtcaaccttttccttaattctagaaaacttttctcacattctggtgaccatacaaaaggcacgtttttcctagttaagctagtaagaggtaaagctatttgtgaaaatcctttaataaatctcctatagtaaccagctagtcctagaaaactcctaatctcagttactgtggttggtctttcccaattcatgactgtttcaattttactgggatccactgcaattccttctttagaaacaacatgacccaaaaattttacttctttgacccaaaattcacacttagataacttagcatacaatttcctttctctaagggtttgtagtactattctaagatgttcctcatgttctttttctgactttgaataaaccaatatatcatctataaagattattacaaacttatctaaataaggcctaaatattctattcatgaaatccataaaaactgctggagcattagttaatccaaaagacatcactacatactcataatgctcgtatctagttctaaatgcagttttaggaatatcctcattcttaactctaatctgatggtatcctgatctaagatctatttttgaaaataccactgctcctctcaattgatccataagatcatcaatcctaggcaatggatacttattttttatggttatcttattaagctgcctataatctacacaaagtctcattcctccatctttctttttcactaacaaaactggagctccccagggtgaaacactgggtctgatgaatttcttttccaataattcctctaattgctttttcaattcttccaattctaaagggacatcctataaggtgccatggatattggtccagatccaggaattaagtcaatagagaattctatttccctttctggaggtattcctggtatttcatccggaaacacatctgggtattctcttaccacaggtattttagagagttcatcagttgactcagttacattagctgataaaagaacatacccttgaatttcattgttactagaacaggagataatggagttcacatacagacactgggtttgactgttttctgagatttctgaaggtaaaacaatggttttattcgaacagtctaacaacacatggttagctgcaagccaatccatacccaaaatcacactaaacccagtcaaaggaagacaaatcaaatttacagaaaaagatttatgatcaatttgaaaatcacaattaaaacaaatttgactagtagtaataggtttagttgtaggggtagaaactaagagatcataaggtaattgagacaagggtaattctaattgtacagcagtgtcataagaaataaaagagtgagtagcacctgaatcatataatacagttaaaattttgtctttaattatgcacttaccttcgatgagattttcagattgagaagcctccgctgcattcattgtaaaaacctttccagtatgctgaggacgtgtggtgccttgggaattttcagctctataattattagcataatgtcccatctttccacatctaaaacattgaacattgttgcgattgcgacaatcctttgccaaatgtcctatctttccacatcgggaacaagtaatctgagctatagggcatgacctgtttccatggttcttgtgacatttttcacactccctgcttgaactttgccctgtctgaaatttctgctgctgaaacttattcttaaatttaaatgactggggtcccaatttcttcctaaaattattacttaattctcttttctcagcagacctccttttatactcttctattattctacacttatttattaaggtaccaaactccctaatttctaggggtccaactacctctaacaggtcttctcttaatccgccttcaaactttatacattttcagtgctcatcagggttctgttgatagatagttgagaatttaattaactcttcaaacttagcaatatattcagtcacactacttcttccctgttcaagcctaagaaattcaagttccttagaattcctcactgacacaggaaagtacttatcaaagaatgttgttttaaatacctcccaggtaatttctatttcattacttattagaatttgcttgtggctattccaccaatactcggcattagattgtaacatgtacgtagcataggttactttttgttggtcaaaacaatctaacacagtaaatattttttctatttctttaatctattcttcagccacatatggattaaaggctcccttaaaaactggggggttagattttctaaattcaacaaacttatgatattctgtatcagtctcctacctcccatggtttatttgactagaactattatgattgttgttattttggcttaattgcatcatcatttgggtagctgcggctgcttgttgacttgctgtggttgcctgctcttgcataactgctagcatagcatgaagaatatttgtttcttcttcattgccactagttggtgttgtttcacttggacttcgcgaagccatgaattcctattcacttcacaaaaatattgaggtgatcaggctcaatatagagtaaagtgcgttagaattcaataatcacaaatattaacacacaaacaattagaatcaaacagacaatcaaagcacacagaaaaacatagtcagtccatttccctcaagacctaacaagatgaactgctctgataccaaactgtaacatcctaactaattttatttaattaattaattatttgcttattttaaattttattattttatccttttgagggaaaatataaattgagataagaacaaggaaaactaaaattttacaagaaacgtgtattagtacataaattcttcgttataaaatttacaaaatatgaaggactgatacattagtccatgtctctgatataaacatacaagtacaaatctcttttccaaaattcagcctagtacaatgcttcttcaatatatcgatactactccagccttaagaaatctgaccatcatttccatctaaaaacataaaataaatctagtgagaaataaatttctcagtaggcaaatctaaaccaccaaacacgttagaaggttagtaaataaagcaaatttgattcaacatacactttagcatattagtaaataactcaatatatctgaatgaatgcatgaatgtatgaatgcatggaaatgaatgcaatggccacaggtgcacatggtatctacatatcgtactatatgtagctacatctcgtactggatgtagacgctgtgatcgtcttacgcaaacatgcatgaatttccatgtattagcacctgatctcttgaagtagcataggcccggttgtcacactcgggtcattcttaaaatcataacataggcccggtgttcacaactcgggtcaatctcataaaatcgtaggtctgatctttgaaaaccagatcaatctcaataattcataatataagaaatgtattattttccttccataaagtatggtagttaaccttcagtaaaagcataccaactagaatttatttgaaatttttacaaactatgtccggattctgagtttatggtatccgtgttcaggatgtccgggttccggatatatggtgtccgagttccgggtacaaggtgtccgggttccgggtacagggtgtccgggttccgggtacaaggtgtccgggttctgggtacaaggtgtccgggttccgggtacaaggtgttcaggttcccggtacagggtgtccgggttccggatacaaggtgtccgagttccgggtacaaggtgtccgggttctgagtatatggtgtgcgggttccgggtacatggtgtccgggtacatggtgtcagggttccgggtacatggtgtacgggtacaaggtgtccgggtacatggtgtcagggttccgggtacatggtgttcgggtacatggtgtcagggttccgggtacatggtgtccaggtataaggtgtcagggttctgggtacatggtgtccgggtataaggtgtctgggtacatggtgtccgggtacatggtgtcagggttccgggtacaaggtgtccgggtacatggtgtccgggtacatggtgtccgggtacaaggtgtccgggtacatggtgtccgggtacaaggtgtccgggtacacggtgtccgggttccgggtacatggtgtcagggttccgggtacaaggtgtccgggtacaagaattaaaattattaaattcctaaattagagattaaagcctagcctacctgtgaaaattgtaatagattgcttagagaactgccaggattattttaagagaaaaggattttacgtaaaagaaagtgtttgagaaaatttaggaagagagtgaaagctgaaagtgtctgtatgtagattttcggtgcagagagtttgaatcttccaggctatttatagtgcttgatttagttaggatgaaaagggatttggttggaaagaaacttagttactagaaaatatctagattttcttatgtaaatcatcattactaatattctcttcataaatggtagatgcaacgtggaaaattactgaagcttgttcctgcttatttattttgcctaatgccatctggaaaggtcataagaaaaatgtgcacaaatatttggatagattaggaaaaaaaaattgctacgtggctggaggctttatttcagtttaaaaattttcctttattcttttttaaagcctatcaatcagaaacaaaaatatatttttgtgaatgttacaatatggatatccaagaggatttttctagtgattttggacttagctgaaactttcacgtggttaaagactcagtttttggatgctaaaatttgtccttaaaaattatattttattattataatttagatcatgaatatttatataattatttgaggattttacagatgaaacaagctcaatgctgttaactgtaagccattaaccagaaattcacccatcaaactattttcaactaaaacagcatacagttttgatgtaattcaagttgcaaaataacgagtcccagaatgaatacataaataggactgtatgttaagagaaaacagtgggtgcttggttattcaagtattgccaagtcataaaaaaaaaaaaaaaactacttaccccattgtcggaacgttatgcgtaggtaaaggagagtgaaattgtacgcagccttacccttacatatgcaaataagttttttccggattcgaatccatgactaacaagttatcaagtcaccaagatacaattacgtgccaagtcataaataagaaaatcttttaaatgctaacgatcaaaatgcgtgcgataaagataataattcatgctattaatttcatcaaactaatgattaatacttaccaaccaaccaatttggatgctttgttgattactccccttgaaacgctagtcttgcaaatacatagacacttgctttgtgatcaaagtgtttcaccttctcaatatatgtttttcaatctccaaaagcaattagcatagaagcatcaaactctttaaagctcgatcgacatcacatgcatcatcaaatagcataaattgggcttacttctaaatcagtttctcacccggagtttgatccactcgtgaacaagttcttctcttttctcctagctctttgataacgtttactcttgagcacatagtacgcatagtaccaagaacaccaagcattataactcccccaacaacagtaacaaacattgcagcccactcgtgatgcctaccaacaactatatgagacgctgatgtgaatgcaacggtggtgcatatagacgccaaccacatcatcttattgatcaccttcactaccctcatctcagactttgttctccctctcacaagtgtgatttgaaccaccacaacagccagcgaagagaaatgcgcaacagcgttgaagatgaagaagatatctaagggtattgtgcctaccatcactgccaccccactatcatagtctccaccgggaatgctgaaaatggccgcaaacgcaagcgtggcaaagagaaccacaaccacctttatctgttggaatgaaattttagaagtgaagaaaatatttgagaatgagagattagaaatgttttggaggaagagggtacttgtggcttgttccattgtttctggtgagttgtatgatgattcagcttgtgtattttaattttaatgtgggatgactttttgttagatattggattataagatagcatctcaactgcaggtcattttacatatttcagttcccctaagggatattttagtgtatgtaatataaaaacaggctactaggttagttatgacaggacatctttccttagtttttcttgtataactctattagtacttgtaaaaaattccaatttgaaaattcttagctcctcactaacaatgattagcatgggctgagtactttgagtttgagccaaacttaggtggaggtagtccaaccacagccactcttctatactggtttgtgttctcaacttatctgggactaattactgttttatatttgtatgctcaaatgttcaataaaatgacccctttacctgcaacattagcaattgtatcaactcattatctagtctcattagcttgtgctaactttcagagtcatttagatgttgcaaacacggagctttgtaaaatttgttaatgatttcttgggccctttattttcaacaattgtagatagtaaccttcaacttcacgatggtgctatattttacatggtaatctttattgtttaaacgagtttatatatgcataatgaaaaggaattgcagtaggacagctctcttattctccacaaccatcctttattcatatagacgaataatgagcttgtttgtttaatttttccatttcactggtatgagaaataagcataactgtcctgcccttggaatatggaagaatttatgggatattttttacatgaataatattcaaagggaacgaaatggagttgtgctatcttaaattgttggaactctagaatttttcttacacgctacaatttgttacattgtattattgtatgggacttggaaagtaaacatgcttccctatccattgggcaagtcaattatgaataatggcatggctaagctgagtttctttacctttattctgcattaacactaagcttcttaacatttgaaagttgtagttctaatttaaatattttggcaccgttttcttttatgagataattagatctcatgaatttttttcttttccagattctaaaccttgtacagaccaaaaaaatgtaaggcataagataatcgttggagttggatttggagttacagctctattccttgtcattatcatagttggaatcttttggtggaagggctacttcgaaggaataattaggaaaatcaaaggtaaatatatactatcatgttcttaccattctgaaattagtttacttcatttgcttcttaaagatttccaagttcaacttcccaaaaagtcaatcacttgacttagcgtctaggaactgtgaagttagctaggtgctacaagacgtggtcaggtaagattgaattaatatagtacccattatgatagacctccttagggattaactatgaccaaagtgggtaagaaggttaagataataggtcaaaagcaaagaacttgccttgattttttactatggcctccaaggcatccaagaatatgcatttagaaaagtattcattcttggatccaatagcctttgaggattggagataacgatttatctcttctgtgggtggtgttttatgcgtatgaattatttgcatccacttattgccttttatggtgacaagcatttctatgtatattgacacataacaagcatttgtactttcctcaaatactcttaaacaatgcagatacgtttaacttactacgtaaaatgaaactggatgttcctctggaacacttattttacggctgacatattgaacaggtactgaaagacaagattgtttaacggggacatttacgttaaaacaaattagagatgccacagaggatttcaatcctgataacaagattggagaagatggttttggtcctgtctacaaggtattagagtgaacggccttttttcttccaagcataaaaattgatgttcctccctagcatttaaaattctaaacaactgttggattgcagggtcaattatctgatggtaaattggtagcagtcgagtaacactcatcaaagtcgcggcagggaaaccataattttttgaatgagataggcaagatatcttgtttgcaacaccctaatcttgtgaaacttcatggattttgcatcgaaggggatcaattgatattggtgtatgagtacatggaaaataatatcctggctagtgctttattcagtgagtttctacccaggagtgcaaactattatgtttgtcttttgccttgtcatttattatatgttttgtaagataaggtgccaagtgttaattacttaattatgataaatcacttggagatctgattaatctgaagaagtttgtttcccgcccttttccatttttctggatacaaaataaggaatgaatgagtgctatagctagttgtttttccttccccttttgtctagacaaattaataccgtggttagatttttatactgttaaacttttcctttttcccatttctatcactttagcagctaggcaatagaattttgaaaccgtgattcatattaattcaaccacaacttctttctgcatcttttataggctcaaaagatcaacttaaacttgattgggcaacaaggcttaggatctgtattggcatagcaaaagttcttgcatttctacacaaagaatcaagactcaagattgttcatcgagatatcaaagctactaaggtgttactggatgggaatttaaaccctaaaattaacagattagtatccaaagctactaatctgttaattttgttttacagagggtatatggcaccagaatatgcattatggggttacttgtcttacaaggctaatgtttacagttgtggggttgaggtcttggaatttgttagtgggaagaactataagaattttataccaagtgataattgtgtttgccttttagacaaggtattctactatgcttcaatccctgatacatttttggcgttatgaatcccttttgttttggtagttatccaatgcaaatatccatattttcaccattctaaagaaaggtaacaaaattcccattgcaggcatttcatctgcagcgtgcagaaaatttaatagagctggttgatgaaaggttgcgaacagaggtaaacccaaccgaagcaatagctttgatgaaagtagctctcctatgcaccgctgtaacaccttcacgtaggcctacaatgtctgaggttgtgaacatgcttgaagaaagaatcagcattccaaatgctatccaacaaccaagtgattttagtgaagatttaaggtttaaagccatgagggacattcatcaactaagggaaaatcagtttgagtacaagccgaacaaacaatacaacagaagtccttacacttagctctccctaaacatttggcaatgacctggtgttagttcatgatttcattgttgctgaccatattgcaacatgagatatccttagagcatagctgagatttaatcttttgggataaccaactgtaatgatcaccatttttaggatataacatttttcactccgtctttcagagaatatatttacttctagatccgtgtaaatttctaattgctcttgaagggtacttttttttaacctgggcatttcattttgagaaattattgtatggttcggtgtagtcccagttaatcttcatatatgacacaatcacaagttttcaatttatgaaaacaaaattggcgtgtcatgtggagattgcttgaactaaaatgatctcggaccatataatttctcatttaagaggtgcatatgaactccttttcactggatatacacagtatttggagaaagaatgtacatacgcacccttgaacttgggtgttatagcaaataacaacttggcgaaagaatgtacatacgcgtcttaataatctttgggagactaaaaacccgtttgttatatctttctcaacttaagaacggcaaattgtgtttctcctttttatcaggtgtgtggtgtgtgggttcactgggttggggagttagtgagaatttcaagttcagtgctatgctcagtatgacaatttttagggtaaaaagtaatagtgggtgaagtaatacacctacgtagtgaagaagtgtctgtaaggaataagaaatcaagtttcaacgctgccagccatcacaattatgagaaaagaaaacttcgagcttgttcggattaatttgtaaactaagccaccttccccctctttgaaaatgatttagttaagactgatgtgtataaaaaacactaaattttaaacctctttattttgaatattctactttggaaaaaaaatgattattaaaaatttttattctcacattaactccaaatttgattctaatccattataaaggtgctgcaaactcgagtataatcaggtattaaaggatcaggaagagacgcaacacaagcaaaaatgaaaataaccatcataagttgatacaaagaaaccaaacatactttaagaaaatataactaaaaagacaacttaaactactaatggttgcattccataatgatcagcttgggacgtaggacgggataatatagagaataggtaacattcatgaacactttcaataatcactgtaggttccaattcggtcaattatgttagatgttagcaacagtttccttgctctcccttaggactttgacactcctctgcagcttttcacgcttcccagaaattgaaggtgactcctccaataacctctcaatcccaccaccactatattggaaatcgacaatcacacacaaatcgaaaaacagaaaagagaataggaaagagaaatatgacacagtattttaccctggttcacccaatgtaggctacgtccagcttgtctgtactataatctcctcaccgccactcgttacaagtcactcggtttacaagggaaatataaataggattaaaagaaaccctaacagtagctattcatgggccctagcccaaactactaataaaaataaaatattacaaagaatcagaggcccacaacagtacctagcctctacgggcctaggggcgctgccccccggacccccgccggggcgacttccctggaccccgcccgctcacctgggagcgggaccccagttggttttctgctgaccccgccaacaagaagggttgtcatctgactgcgaaagatgagccatatccaacacactaggggataacagatcatgaacaatctccttttccaaatccttgttaacaagattgttaatactcagcataagatgtaaggcaatggtgtcaatcaatcttttctgcactatcttccagtacgaaatcatcctcaccttcaaatcaaatgcttgagtaagcacagatgggtattgcctcaaatgaccaacttcaattttgcccacaccttcaagattcacatgcgatggattattcgaatttttcaaaacttcattcagaaaagcatcttgctgagatattaacttgttgtattcctgcacaaactcaggattacaagcgtaatcagtatgcatctccatttcaatggcctctattacatgcttggtggaacttttcttcttcttagaaataagaacctggcttgcacgcctggtagacatcaaaagctgatagtagttttcagaatgacgcgtgataactgaaatcagcacatcttcaaggtagttccacacattttcaacaaaacctataggcttgttggcaattccattcaccttcccttgcaatatagaaagaaaagcagtgcgaggcaagaaatttggaagaccaatccacttagcctcctccagcacctttatctcttgcataagaaaattcttgcttgtatcactttcagcacaagtgtaaagatcatttgagtaggaatcaagcatatccaccaaccgggcagtacaatgcatgtttttgtcttcggggtactcatcaaattctcctctaagaagaatttttctgagagattcttttgtcaatccaataatatgcataaaagctgtcatggcatcggctactgaagccaagtttgttggcaacttttccaactcagacaaattgttagctagcttctcattgatcttttttactatttctggcaaagttttagatatgctcatagcctgaacctgaaccagtttctgtgctagaactggaacacccacgatagactcgtctattttggaaagaagtggatggaactcaaacagtttctgttcttccactctagcatcctcataagactcatcaccaatgcggtttctcacacaaacataaccaagaccaatgttcacatcatcggcagtaactttttctaacaagccctcaggagacttgtctgcctttgtgaccacagccagtgtcctgaggccagttttgtcaacactctgagacattctaatagactcacaagtagtgaaatcaacactagccgaaagaacattcaggataatactttcttctggcttaatgtactccatgatcatgtctttaatctggtcataaatgttctcaggttgaccatgaaccggaacccgagttataccaggaagatcaaccattgtgagatcaggaacaccattcttcttcaccagcaaagtcaaagggttgttggaaatccctttaccatggcctgcaagctcttctgtggcagcatttatggcatgagaaacatttgcttcatcagtggaaacgattttgccattgaactccaagataagctctggggtttgaagagggtggttttggagcctcatgaccaagggcaccctagtgcaaatgccttggccacgtggcaagctgataccagcaagagattcaagaacacttgatttgccagatgattgatcaccaacaacaacaatggaaggaagctgaattccctcctttgtaatgttaaggcgcctgagattttccatagcatcaagaactggacgtatcctctcattgtaagaggacacaattggtgcaacaatagcaagaggctgaggctgttctgcagatgggtcagtttcacattgagaaacagatggtgcaacaatagccttagtgataggtctccttcctccagccattttcaatcacaatcacaatggtaaaaaatatagagagggagtgagagagggatagtttggtatgcttatgcttatgatgagtgagtgagtaaaatgccagagcttaaatgcatatttatagattaaaaaaaaaaaaacttagaggaaaatgaaaggaaaggacagtttggtttggtatcttgaaagttgaaaacaagcgtgaattgagcttttcatgggaaccgcagttacagagccgttggggtcttccatgtttaggtaattgaaaggtttctcgttaaatgcatgcatggtagtaattgaattgccataaatattagtaatgaaaatttcttacattaattaattcaactcaagtagttttagttaaaccaaaccagaaggggaatatgtactaaaaaaaaactgaagggaatgtagttaaggaaaagggacaattcattttataattcatctaaggaagctataaagttttatttatgagtagttattactattgataacatgcttcggcagtatgtcctctctagtctctcacatactatggcatatgtatggtcgtgacctgtgacctgtgacctgcatgtgacttgtgagaaaatctttgggtattgcttttgttgtcttaaaataaaataaaaattaatggtgctatttaattagtatggaaaatggtgaatatatactttgtttttttatgtattttttgtgtgagggatttttgtttattttttgatgtatgacaggaaaaggaagggataaagagagaaaatactaatagatgataaaagatgcgatggaaaataaataagttttcatcattgataaaacaaaaatactattacaatttaataataatataaagttctcttagtatttggaattttagacttaagatagaaaaaataatttgtttcattttgttatttttaaagaatttaaaatatttaatataaactctaacgaaataaattataaaggtttagagtaattctattctctataagtatgaaattatgagccagctatttttaggagaagaatttttatttttatgacttttagttttcgattaaatcctagtaaaactaaaattttatagtcctgcattagtttttcttctaaaatagtaatttcgtttacaaacaaaagggtgaaaaaaataaaaatgacgaaaatacaattccatacaataaaatcgtatttttttatatttttattttatcattgggtgttactattacgtaaatggaagtaaaaaaataaaacacaatgttattatgtaagtgtgcatgacaatcatatttttgttgtgtttttttcttttttttatccgatttacataattgaaacacatttttgtttgttgtgtttccattcaagagttggaaatacagctaaaaggcccccacttcgctagtgccaataggcaatactctgtagaatatgcaaaggcccatgattttcattcttctactgggccaacacaaagaacctcgggaccacaattttatatgttcgagttaaacccctttttatggcccatgattttaactttttcaaaaagatatttttaatttacatgtagtataatttaattttagtttaccagataaaatattttattttatttctttcttctataaaattttacaaaaaagtttattcaaaaggaccttaattaaaataaattaactttaactcattttttaactttcaaaataatattcggtaaaacaaaactatcaaaatagtaaagaaaaggaaaaattgtatgagaaattcaaaacaccaattaatcatgactcgtggcatttgaaaaatcacaggattaataagtaagttgccataacgaaataaacctcgttttaaaataaaaaattagtatttgcaaattacaaaaattatgaatacaatatttatgttttatttctcttaaattttcaataaaaaattcaggatttaatcccacaaacatgataagtcttacatttataattaattatacgcatatatatttttaattactccctccataaaagatatgtgtataataataaattaataatggagggagtataatatcaacaatttttttcataagagatactccgtcaatcctaaaagaagagttatcttagattatttacatatatcaataaaaattaataaatagatgaaagacaatagtaattttacaaaaataactttactattaatatttattacattgaaaaactataataacattttaatggtaaaaaataattaatattatattaaaattaaaatactaacacttattttaaaatacttttttccaggaactttagaagatatattctctccaaggttgtattattctatatggatcaaacatagatcctccccacaaacacaacttatattgttaactgaattacatctattccattggattgttgaagttttatctattcctatgttacaacatttataagtttaaggtttcattcttaaataaaactataagactgattttaagagttattccattcttcatctaatcatgtatgtatggtttcttttctatagactattgagcatcttattttacttttttttatataattttttattcttttcaaatactatcactcatttttagtttttattttatttaaattttaaattctaagttcttttatagatatagttaaattttagggttattataatcttaattaatgcaaataaatttattttgaattttagcattatattatatataccaataatgaggatttgtttaaaatgattatgattcatttccataatttcttctccaatttggaaaagtcttatacctataatttattcctatttaatataacaaaatatgttattaattattaaagtactgatattctccttaattttttttcattaataaatttatgaaaaatcatagagtgtaaaaaaattagaaatatttcatccataattgaacaaaatataaaaaaaaaatatactgtcatttaattataaactactacatgtaagataaaattgttactgtttataataattatttttataaattataaataaaatcaagttgattattaactttacattgataacataaatgaaaactacacttaaaaataaaattacaggtatagtaagctagcaaattatatccattgcctgtgtgagtaaacgaacatgacgaatcgatgatacaatattttaaagtgaactgaatcaactcatcttcgcagtcatactattatttagccggctatagcttgctaattgaatttgtaatagattgaaacatcatccaatgggtccaagtgtcaagtgggattctgttctgctaccctacctgaatcgaaaagataatcaataaagcaaattattataattttcaccatcatccaaatttatatattgtatgatgtgatgtgaacgccatgatgtctataatatctgttggtactctttaaattttatgtaaagtgtatgaacaaaattattttctttgtgacattcataacagactggagtttataagttaattaatttattgcccagtcagtattaattacgtactagaccatttttctcagcaaattgtttatttttaataaacaattaatctccaaataagaagttttagtatgccatattttatttttagccgtgagtgattgccaacgattcaaagggtgctctggcgttgattaaatagaaacacttaagtgttgggaagctcttgtcttggatgatcccctagtctttttcttgctggagagttgctttggttacatgcataaccttcaaagaagatttcaaatgcctaatattttatggaacttcttccatgactaaaaataaagtaattaatcttaattttttataagaaaattaacggataattttttttaatatatatgtatgatttgtatatgtgtatacacacgaatatatatcaactttatgttgattttgtcattagcaatgaaaattagttgttttattttctaaaataatcatgtagtttaaattggactacactactgaaaacaagtacgtgatgaatctttttaataaaatatgttttttttatctttataaatatccttaaatttaatttattatgtcctttatttttattttttaaaaataaataaaagacatgataaattatacaagattaaatttaacttatatggaaaaaatagttaaacaatgagatatagattgatcttctctggaaagatggtgatccggttcatatgattcattttttagtcatttttcatcttcatctctcccttcttttattattcttttcgtttatcttttttttaacctcctcatatttattattgggttcatcgatcactaatctcaattaacttgagttaaaaatgttataaatgttaatgttatatatatatatatatatatatatatattaggacactaaattatgtgatttggtaagaatttaatgttttcttttttattcgtgtgagaatcaaattcagatatcatcaaatttatattgaggcagaatgcacgtatgtagattagattatggtagttgtttctaattttagtgcttgagaattgagtttcactttgttataatcataatttgagatcccccaatctattttggtaggatatagccattttgtactcgtcattatgcttcttgctgacgctgatggaaaactaccttcgaatcttcctgttctagagtcggcgaatttccatgtaaatcaattttatcaaccaagcactacattctccttctaattccgcagaactggtcataagccaataaatgatagtgaccttattaattaattatgaggcatttggtgtgtgcataattatcttttacacatgcattaattgcctaattggatggatgtatgtatatatagggaagagaatgctattcccttgttgtatttgactacttccatttcttttgaattggctattacaagaagttttctacagagtcatggaatttcattatttttgcttcatttgtttatattattgcatgcttgttccttactgttttcaagtttcttgcatgccacttactgcttcatttgcacgcaggaaaatcgtgttgttgacgggaatgtggagaagatgcagcgggaggagagagcagatgagctggttgttcatggaaaagttgattggaaaggaagaaaagctttgaaacacgtacaaacatggggggatgaaagtttcgtacttggtaaactaggattgacatatataatatgagttcataaacagtaattaacatgaaaatgcatgtatatacatatactaattaaggtgtggattaattatactacctcgtagtactaattaaaccctgaagtgatggcaagtccttaatttaatgaccacttaccatgtgtatataaaacaatgcaagtttggtgtggattaattatactacctcggagtactaattaaaccctaatgtgatggcaagtccttaatttaatgaccactaaccatgtgtatataaaacaatataagtttcattacatattgttgtgtctttaatgtttaaagcaattaattaattaagacaagtggataaccagttacacttagtacattggtaaagaaattaaaaaatatatttttattgaaatacataaaattatattatttataatttttttacattcttttataatttttacactatataaatatattttttaaaattttttaaccaatattctaaggagactggtcgacacaagactcataaattaattgtgcacagtgcatatacactactcgttcattaattgatgcagtacgcaagtgttaatttgggtttgcatgggtgcatgcagcggcatttggtatagagaacttagcaactctgtctctagcagtgaacttggtgtcatacttcactggtattatatatgcattatgaactagcagatgcagctaacatggtcaccgatgacatgggtgctaattacatgctctccattgtggtggccgttcttgctgatacttggattggtagatacaaatccgttgttatttctggaatcgtcgagtctttggtaagatccaaacttaccttaattccttattgcataataacataagttactaatcgttattggtaaacccaagactatatatattgtttatgtgagtttgaccaaatatagcaacgtaaactattttttaaacccacctttatacctattctcttttttttttttcgattacctcatttattatttttattactttctttcttttatctctcaaagtatgtatataagaaataataaacctagattcaaaaaaaaaaaaaaaaccgttgactctcaagtatatagtgggaagaggtatacatataaagaaaagagggggggaaataaatgtgaaagattatatgattggaaaacatcaataaaaacgtaaaatatatggtgctgatttttctctatcatactcttgaccaatatatttacatgaatcataatcaagtattataatttatttcttataaaatgtgatatttttaaatatgtgttacatataaaaagtgattgggatgcatgaataggtggttgtctagaatcatctcataatttttctttagtaaatagatatgatttttcttgttcaccaataattttcactaattatgaaataaaataaaagatatttattggaaaaaatatgaaagtattgaagataaaaatgttttttaatagctttaattacttattttgatttttggaaaatatttttaaaactaaaaaggttaccctaaacataatataacagcccagtaacatcaagagctggaacatgaatgagcatttgataattaaacaaataaatgaaaaacagtacagtaaacggagatgttaaactttattaaatgatacctttagttattttttttactctaaatcaattaattttattattaaatttaattaaattctcttaaagttatatatagttaaataattagtttatacttgattattttattttaatgtatgatatattttatatatctgccaatatttaaattaatcatctaaaatttaacaaatatatataattactgaaataataccttatttctctgtcactcggataacagattctagctagggtgattattagacattatataattgcatgtactcatctactgattaataatgatatcaattatttaatttaattaaataaaacgaattagataagaagtattttaaagctattatttaacaacttatattaaagtaaaaagtttaatatctttaatagaagatttcattttaagatcttaattattattttgactaatcctataatgttatattactttaaaattttattcatattttattttaataatatatcttattttaagatcttagaacattttttatatatcctacctacactaataaaatgcaagtcaattttgtgaaaagagtaaaagattattatttttaaatggatactctaatagtcatgcactaacattatacattgtccaataaataaatcagttatatatatatatataaccaataaacttatcacatataatatacaaatgttttacatattatcttttttctcttaaataaaaccaattgaaagtaagcccaatttatatatgcaactaatttactttaaataattttctaaagcttattgaatgtgttgtatggactggcattgcttacgatacaggcacgcgtgggtagcctgacaccacccatttgcaacctgtactatgtgagagatgcacattgtgaaaagcttagtgggaagcaagaagcatttctcttcattggcctctacttgttggcctttggcagcgcaggtttgaaggcttccctgccatcacatggcgctgatcaatttgatgaaagagaccccaaagaagcaatgcaaatgtcaagcttcttcaaacggtatctttttagcactttgcgttggtggtgcagtcagcttaacatttaatgtgtatatacaagacaataatggatgggtctggggctttgggatctccaccgttgctattgttttgggcaccattatctttgcctctggattgccactataccgaattcatgctgcacatacaacaaacggaatattggagatcattcaggtatacactcttttgcaaaccttgttctgcatgtgctgtatatatttcaatttgaaaatcatatttttttatacttatgatattagtgtgaaatatttattgattttattgataatcgattaatctccatcggaaaacctagttgatcgctttaagtttaagtagctctttcctctccaccatatttttttcatccataaaatttaaattcaagagtattacccagaataaaatttgttggttgaaaaagtatatttttgagttcattaggcatgcattatgaaagtaaattttttttatacaaattgttaaccaattaaaattgattcttagtatgacttttaaatagtatattataaaaagacaaattaataaacttttatgaaaaccctttacattgttggtagatatattacttaattctatttttatttacttatagtctgattctgatacaatacaatagttgaagtttttaatttagctcgatattgcaatgatcaagcgcattagttttgaattcttcgcgtctattttccaggtctatgttgctgcaattcgcaacagaaaccttccccttcctgccaatcctatccaactatatgagattcaacaggacaaagaagccgcagtggaaatagagtatcaacctcatagagatattttcaggttcaatccgacaatgtctaatatgactgaaatactatatgttaattgttgatagcttaagtattaaagagtaatgataaatgtatataccatggagattctccacaatgtctacctgtcacacatggctaaccatgtgtgcaaataaatatgattaattgtatacaattatccatttgaatttatattgcttgtatttaattaactatatctgcaagtggttaatagtatcacgaagttatgaggttattgaaatgtttaacgttggttaactttacctaacaagtcagaaatgattaataggaaatgaacttgtatatataattatcattatgtactattgacacaaataattaaatatgtctcacaagtgattaattttcttttgcacagtttcttggacaaagcagctatcaaaagtagatctaatgagcaacctgagaatcaagagactccaaacccgtggaaactatgcagagttacccaagtagaaaatgccaaaatcattctaagcatgctcccaatattctgctgctcaatcataatgaacctttgcttagcacaactccaaaccttctctattcaacaaggctcaaccatgaacaccaggaacgccaagcattttaacatcccacctgcatctataccaatcatcccagttgccttcttaattgttttcgtccctttctatgatcgcgtttgtgttccttttctaagtaaattcaccggtattcccaccggcattacacacttgcaacgcataggagtaggcctaatactctcttccatctccatggcagttgcagcaatcatagaggtcaaaagaaaatgagctaggagacaacaacatgcttgattccttgctgtaatgtcttggatttaagcatgtgattaagcctatgattaggatcataaccaggccttagagtctcaaaaaggaaagcaataggttgttctgaccatgtggcgcgacccgcgtggggtctggcccaatccgcgccagatgtttagatcaggccaattcttacggccttctgacactattagcgtggacatggtgctactctcgtggattgttcgagcctgtggcgcggtcagcgcgagatccggcgcaatccgcgtggaagacttgaatcaggccaatactggcggccatcttacgttatccgcgtggctttggcgctaacagcgtgagttgctcgagcctttggcgcgatctgggcggaatgtggcgcgatccgcgcgggacccacgggcaggcttaaatacaactcattctgggctgagagaaaaagagaaaaagagggtgaaaatgaccattgatgaccctgtaagcttcatatcttttttatttctcatttaaacacctctgacccaactgagaaagtgttcagagcctcgagataagctagagacccagctttattctcgacacgaggcagtaaacggcgagatcgagtttatctgggagaacccttgagagctcgaaacccaaggttgaaggaagctgtgtatggttgatttgtcttgggaaaagtgattccctggtcttccttgactgcatagaggtaagaaactcgagctctagccgttggttctgtgtattggattttgggggattttgagtaccttgagaggtgtttttggaggtgttagagccgttattaggcttggacactgtagagttttgtattcagagggttactctgatgaagttagagccttgagtcatcattattgataaagtttgattttaactctgagtatgtatgagcagaggtaaaaggctgattatttgactagtatgaaccttagagtagttgacaaagttgttcatgggataatatagatgttgtgtgtgagctggaattggtgataatgagaagcttgaaattgatctggataaagcagggatatgttttatattagcctgatcagagtcttagaagaggttctggagccttgtgtaggctgagtaggatccttatgagggtctgagaatcacttgtgaagtgattgttcttgtgttatgtagaaaggattataagtttcctttcgttataaacagcttaaaatcatatttgatgagtatgtgttgttcttatgtaggacgtgagcttgatagtcctagtggtggtgaccacgaggccgggagagccggtattttgcctagagcaggtaagctcttggttcttgcatgtgcgtcctttactgtgttctaccatgatcctgatagggtgatggttctgttgtgattacatacatgtatatgaaaattgtatgttgttatgattacctgttgaatggtgttctgtaccctgtgagagggcaattgatgtgaattgatatgagatgcttgacctgtgagctgcaccctgagatgggtggttgatgtgtatgaccataaattgtctagcgtatgacttgcatggttgattgttgaatcctatggtagtaggatagatgacatgagattgagtaagacctgatgtgagatgttcctgtgatatagacgtaacctcccgaatggagatgttcctatatctacagatatagcctcctcaggtaattgtattgagataggttatgagatgttcctgcaatatagatgtagcctcctgggtggatggagatgttcctatatctgcagatgtagcctcattacaaagagatgttcccgttatatagatgtagcctcctgagtggagatgttcatatatatacagatgtagcctctgatagatgtattgagatcctgccatgagatgttcctagtatatagatgtagcctccctgggtggagatgttcctatatacatagatgtagcctctgcaggatagtgatgtatgtgatgaatgactgtatgccatgagtatagcctgattgttgtcaggtgaacgtgcattgatggtgcatgatgattgattgagtgatttactgatgttcatattgcttgtttggatatactattttcatgtatatgtatgaaagtgaatcgggggaaggaaatacctccaagggccctgagtttcctgggattttatatttcaccccttttgtgggacttatgttttcaggtgaaccctcaggaggagcagatagatcccaaggcaagaagcctatgcagggatagctgtattttgaaacattaggcatagatgacatgagcatgtggctctgatgttttatattttgcctttggtttggttttgttgtaccctaaggggatatatttgtacagttttgtacttaaaatagagatattatgaggtacagtatttatgttagtgacctttgatgaagtcactcttagtttatgcttccaaactgcttaaactctgatgattatatgtgtgattgttgattaatgtttgataatgaccctgatgattgaatgggacgttacacttgccagtattacagccattgccaattagtatattctggatttcttttcagtattttgtatttggcatagctgacatgttaacctacgtggggcttcttgagtttttctattcagaggcaccaaaaagccttaaatccacagcaacatgctttctctggtgtgctatggcccttggctattttctaagttccataatggtgaaaattgtgaatagtgcaaccaagaatattactgcaagtggaggttggttagaagggaacaatatcaacagaaaccatctgaacttgttctacttactcctttccatattgagcttgatcaacttctttgtctatttgttcgtttcaaagaggtacaagtacaggcctcaacaccctgcagttactggtggcaattcagaggagtgaatattgggagataaaggtttagcttaatatgattaatatggagcagtgaagatttagtgggttgtactgttcttcgtttgtcaaaaatctatgtgagtaaatagatagaggactgcacctttaattattttccttgtaatgtcttgaattagagctatagtttccaagaaatccatgtgaagtttttattttacctttgcctttggttacatttgatttctattttcacttttgctagaaatttttaaaattcatgaaaagttgtattttaaaaccaataataattgtacaattaaatttaaaatagttattttgaaaatcaatacattagaatttaataagattaacttatcctaaatagaaaaggacttatatatctaattaatgtcttaagatttttttggattaatatgtagtgtaaagttcatttgtatgggttgtgtgtgatttattaatgaagatctccctaatgttttatccattgttttcctaaaatcttttttttttgacaaatcctaacatctatttcatcataattttgatccatgattaattgattaaagcttattaacctatttttaaggtttaaatatatttattagttcctcaaatttttgaaaagttactttttattcaatagattcatggtttcacaatttataataatttttaatcaccaaaatttatttttaaattttttaaaaaataatttttcacaattttaaaccgacaaaatatttaactctatgacttgatggccattgtttacatattgtgtttgttttgaagaaaaatatagttgtaaaattgtcataatttttaacaaattaagaatgttttaaactatcataaatcattttaacaaattatgacagtgacaaattgtgaggtattaaaatagaacttcagttttgcaatattagagtattacaattatgacagcgacaagttccggagggagaacggaaagagactttttggaatgaccgaagcaaaaacagaagcggctatatatatatacagaatcccttcatcgtgcaagcaaaagatattgcttcgtctgagccaagtaaaccagtaatgttacacaagaaatgatagttgaaagtactgaaaaacctaaatgtgtatcgataatatgatgccaaaataaaaacataatctagataccaaggatcaaacaaaagggcaaataacatgttgcaccccaatgatcagctttgttcataataataaataaataagtgaaaacttttcaagtcagtaggtagaacatctaatttaaaagctaaaacacgaaaaaaaattctataggcgttagggttcacaactgtacagaaaatcatacaaagtgtcgtgagagcagcaaaggaaccaaaagcttagaagatttcatttctgtgttttttgaccgaattgaccttagaagtagagacggaatatttttgcagtcgctgatgaacaaatatttgtcaaatgcaatttgagtagttctttcattaaatagttctaacagattttattttatttaaaattttgtttgattttgaggtattaaaatagaacttcagttttgcaatattagagtattataattctgcatatgaatatgttttggccataacatatttatttttcattattgtatcccctgtatcattcttacttgcaattagcacatttaaaggttcaactcttattataactcaccaattttgagtgttcaacataatttgtccgactaattaaaaaaagatatatttatccgtacattacacggaaaatcgtattaatttatcttaaatttatattttttcaaattatcatgataattaatgttccttttttaattgcttgacaacacattctctcttattttaattagcaatattctattataaaaataattaatataagaaatattataaattaaatcttataaaaaaaaccattgttttaaatttagatcttctaaataaaaataaagtatttaaagatagtgtataaataaagtatacaagttgttatttgattatccttaattgatggtcaagaggactctattacagtcttataaaacccggtttagcccggtcgattgtaccgtgaaccgtagatgtatctgggccaagttgggtattgaaccggccatgcatatggcccgatttggtccggtgaaatccgactgattttgttcaaacctgggaactcggccagttattgaaactcggaccggattgtgcttgaaaaaaaataagctgaaaacggtgtcgtcatcgttgccgcgccattgtccagcctccttcatgccaacgccatcacaccttgcagtaggaaggaacgaaggtgcagcgtagcagcaagcatgaggctgtcatatatgttgctggtcccttatctttccgtcccttgaatgctcacagactcaccactaatgtctcaagcaattacctttgaccatgcattgagattcatttgaaggaggaaggtgtgtgtagcatccggcaataggaagaaggaggaagcgcagcagcaacttaaaaagaagaaggaagagctggataagatatacatatagtgggaattgattaggttttccttatttgggcggggattgggccatatccaaacgtttactttctgtaccccacttattgctttatgcagtttctttttttgctattttgatttcgataattgttatttacactcgtttttagtattaatatattttatttgtattatcaactttaatacttcaattactattttggatttttcagtatagaattatgaatgaatttttcttaatcaaataatgttagttgtatacgtatatataatataattttgaattttttaatataaaccggatcaaaccggaccaattactgacccactagttggaccacggatccaatgactcactacctcgaccagatcaatgatcagaccgattttcacaactctactgtgtttggttaaaaaagacacaacacttattatattgtaaactctctcccattattgtcagttctgatgaataaaaaaaaaatctttaattgatcatgttatattgacttcttaagtgaggagtgggagagaagagagtatatacctggaatatgcgttatgccacatcacatggttccatccaagcataactaaccaacacagtcgattccaaatcctagtcctaatcaatctggttccagtttgagttgcgattatggcaagccaggcggtgtattccgtgtgggcgattccaccggaagacgtgggcgccagatgcgccaacctcatgaccgccctccgatccgagttcggtgggccccacttccacccccatatcaccgtcgtcggagccatcaaactcacccctgaagacgccgtgactaagctccgatcggcgtgccaagccctgaggcccttccacgtcaccgtggaccgcgtggccgccggcagcttcttctaccagtgcgtgtatctcctcctccgccccgaccctcacctcctcgaaaccagcgcacactgctgcacccacttcggttacaccaattccactcgttagtgcctttctctttctctaattaattattcttcgttttcgaaagaaactttagttcgcgaatgttgatgattgattcctttgcagcttacatgccacacttgagtcttctatacggagatttgagcgatgaagagaagcggaaggcgcaagagagggctaatgctatcgatgacacgctcgctggcttgacctttcagattacgcgccttgccttatacaaaacggacactgaggacaaaacgctcaaatcttgggagaaaattgctgaatgcactctcactccaaattagtagcttcttaacttcaatattagcaaaatccacaactctgatgaagtttttggttttctacactctctagctgtcttcttagtctttctgagtgctactgctatgtgcttactgcttaccaatttccaaactcttatacataatgatgtcaaataataaggcactagtacttcttgttgtttctactttttttaggcccataattatgaaggcattattaatctgcataagttttgctgtgggtaaaagattgttagacacccttggaatgtagacatcaacatagcgattggaagagagaagagatgagtaattgttataattagtgatgtgatttgataagaagtattaaagggtagtgccaatcagtggcgaacccagaaaaaattatttatgttcgcatagttagtgacgagagatagtggcgagagttcatggtgtcccggaattttttttttaaataaaatttaattaggtccagaatgggtagtaaatgatccgcattatggtaaaacacaaaacgaaaagaacaaatggaatgctagctattgtttccaggatccatgaattttgcaatttcattaacaaggttacggaaaagattcaaaggaatgtggtcacggcctcagaggaccaaggtcatggttcatgcattttggaatttaaaaaagtacccaatatgtataaaaatctcataatagaatttgcaaattttcagcgtccaaatgactattttcttgtaacaacattattgacaattagaattatggcagttacatacatacagtaagttttgctgcggcaagagaaatgcttgcaacaaaatctcttgtactctagtttcaacctagtattttctaatggctcaaattcatgtaagtctcattaaatatatacatctcatttctcatttggtaggtctcatcctcaagctaatcagacttgagtgaactttaactaacaagagaaagtatgctactagtatacacactaagttataacaatatacatgcatactgcagctccgtacagttgtgtaatcaaatattgttatactagtttgattatatatatgccaagagccttaatacaagtagcaacactaggtctctttaggtattgcttcatgcaccaaagccgcttttgcttcactagagctttctttatccttaaaataccccaaggagggcagggctaatagaagagtaaaaggtttccatgagatatatttgtttgaaaaaaaaaaaaaaaaaaaactattagacctgtattataccagaagtctccgttgtggaaggtggtagtatggattagataaagatgttgtcacagcggaacaacagagcagttgcaatgatgttggatggggcaaagctccatgtggttcaatcaggtttatggttcctaaaataacctcaccagtccattaaaaccaggatgccatgaataagaactgtacactgtttcttatgcacgagccgaagcaaaaaagaaaaaaaaaaaaaaaaaagctgttaatctcaaaagaacagaatatatattctttttaagtacttaatcaacacttaccatgttttttcatttcttttctcttatcacatcatataacctataatacttatatatatttttttttctctctctctcactaggtgtcatatattgaatgtttatagattattttccaatctcagaatatcccattaggcatatggcgactattcttgtttctgttttgtttatatatctgtcgagttctaaatataaccaatcttctataaagtttaaactaatttgacataaaacattttttagatatttcttcctttttttctttttatgaacaaaataattctcttatgaccaattaatttaaatatcaacagaatcttcaaaattcaattcgtcaatcacgtggggtgtagcagtgtggcacgttacttgaactgtcattgttgtgatgattaacacaatcgataatttcgttatccccacatctttcgtatacaaaaaaaaaatgacaacatgatggttaataactgcggctaccgtaatttaaactctttatttgttaactgctaaaccaagcccaaatgcccaatcactgaaatcaacactgatgacttatgtagacctaaaacagcttagttagcaaacggacagtaagaagggaataaatggttaaacagatcaaacttatattagtagtacaattttccatatcaccaaaagacaaagtagtaaaattttccaattaaaatcaatattacatctggtttcacgcttccatttttggttactagatgaaattagcaattactaagatgagaaccactataataatacttaatgggtactattactacatttaaaatttgtactaattaatcaattttaccgtatgaactataattgcggagtgttggtggttctttctcggcttttttacacaaatgagtaaatttaaaattaaaaaaacactgtagattttgaaaatattacgggtatgagcaagtcgtgttttaaaacactacttcatctagagaaagatcaaagacgtattttaaaataaggctttaaaaactcactttttgtttaaaataaaaaaaataatgaaatcacgttaacaactttagtattttttttcttttttaaatattgaagttgtttattaaatcacaaatttaatctttttttcttttttctttttttaaaaaaaatattgaagtcgattgttaaatcatgactttagtttttttcttttttttttaatttgaaatatgtaagtggtgtttattttttatgccataggtattggtgttgtgtatgaaatatattatgcgtataattgtatattatttttattattttataagtgtgataattatttaatgagtatatttaatttgttaaaatattaattattttttaaaatagtagtaatataaaaatagaaaattagtcatagaaatgtaataaaaattaacatgaaatatattataaatacatggaaaataaaataaccattgggagggtgtcccatatgttagtcttttcatcaattattgttgacttaatatttcaaatataaaaaaaaataaaaagaaagactaaagtcatgataacaaataatttcaatattataaacttttttttactaaagtcatgatttaacaaacgactttaatattttttaaaaagaaagactaaattcatgattataatcacgaattttatattttttttaaaataaaataatacttgaaatcatcttttaaaatacgattttagtattttttttaattcaattttctaagattgtattttaaaacatgactttctttatataaaatcatattttaaaatacgaacttataatattttcaaaatttatcattgttgtaattttttaaaataaattacccatttatgtaaaaaagcctgctttctcagtataagtaacatgtgcttgattagggatagaaataggccaggtcgcctatcagggcctttgacctggtctgtttaaggcctggtctggcctaacttgtttataataaaggtcagacttagactttttaaaaagtctatttaaataaaaaggtcgggctcaagctttataaaaagtctgttaggcctaccaggctagcctatatatatatatatatatatatatatatatatatatatattaaaattaaaaagatataaatcaatctttttaaaaaagaaataaaataagataagataaaatctaaataatctatcttacttaaaagataaaatataaaataggaaatttgaaatctttgtagtaggtttgtaaaaaagcacatatatatatatatattaaaacaaaaaatataaatcaatctttttttttaaataattaaaataagataagttacataatctacttgaaagataaaaaataaaaaataaaatgtgtaggtttgtaaattgtataaataggcttttcaatagactcgtaggccaagccagacttttaaatagactaaatcaagcctaaaaaaaaagcctataacaggtaaataggttaggccaaacttgatgtttttaaataagatcaaggtcagacctaactaagcctgacctgccctgacctatttccatccctatgcttgatatataactgcctttcaatgctatgtttaacatgttttgtgccacaatgagtgatgaggtacgatccatgaatagaccaaactgtacccactaggcaatttcacttgctatgtccaatcaagtgaaatatgtgggagttgcatgcctagttggggcgtggatggatggtaaactcaggttgggataagctacaatctgtaactatgcacaaaaaaggaattaaatcaaatagccaagatcaaatcaactattgttagaaatgactccatttgtcgtatcactcgattctagcacacaaaattattcttccattgaataaaattagaatgaaacaatccatcctaatcaacgttcaggaattaacgctgtgttcgatttgcaagagagaaataagagacaaacaaaggtaatggggactgagtttggttggcatgattttggagagagagtaaagttataatttgtggggtttatagcttaaaatttccgtctttggaataggggtagcactaagtgggagtttaaaattttcggtaaaaagataatagtaaccttaaaaaatcaattgtttatgcaaaaaaaaaaataaatagattttcttttttggctatcatactcataaatgacaaaatggattatccaatccaagatcgatccaatgtgggatatggattataatgaattagataaaaaaattaatttaatttaaatttaaataataaaacttaagttctgtcagaggctgacttttgtggacttaacctgtattgaaccatgattgatttgtcataaagtttgcatttaatttgaactaaaaattttaaacacaaattctaggttttatcatatggatttgggttgattgggctagcccaatctatttttgtcacctttactcatggctactcccataaacataataatatttttgtctctatttaattctttcttttccatatatatcaaactcctttacaatattatttttactctatttctcacatatttttcttaaaccagactaccaaacatatatcttcatttctctttttttaaattatctattttctattttcatctattatatttctctcttctaaaccgaatacaacctaagagatgaaattgtattgtaaaccattacagtactgtttcgcacatagataatcaaattgaaattatctactaacatttatgtctaacataaaaaacattcatatttgtttatatgagacgaatatacattcttgaaatttgaaaataaggtttgatttattttagattttaacaacaaacgatgttgttgctcataaagaagaagaaaattgttaattttacgagactttttaaaaattctttgagattttaaatatggataataattgtcattctgcatacgcttatcaaggtatgttaaaatacaaaactaaaattggagcatgcatataaaataaagtatgaaacaaaaaaatgaaagtgaaaatttaaattttaattaaataaattgaaagtgtaatatctaatcataaattatgctataattaagaatttttaattttataataactactacaaaagtcttatttaaaaatgagtttttattagttaacggtgtattatgactaaattatttaaaattttaaatatgtataataattgtcgttgtgtaaaaacttgtcaaaatatgtttattttatacaataacaagaatatgaggattaaatcctcatctatttaaccctcgtcactaacccagtggattactttacttatcaaagtatgttaaggataaaaaaaaatgattttacatagatcatgcaaataatatcagtataatgaataagggtgacctacattacttgtcagcaaacaagaagcagcagaagaaggaggtgagtggatgaattaaatcaggttgtcacattcacatggcggttgccttcaacttttgggccaccgcatagaggtacaatgtgctgtcaatgacaatgatagggatggcaaagtgggccagcccacccaaaaacgggccgggctggcccaacccactaaaaaagtgggccgggtcgggctggcccacttttgcaaagtgggctgaaaatactagcccgccccactttaaagtgggttagtgggccagcgggccagcccacttaaaaaataaaaaaatatatttttttaaaaaggtaaaataaattattaaaaaaattcaaatataattgtttatactaaaaattaataatgtactaacttaatcctataacaatgatttttaatatataatacatgcctaatagaagtaaaagtaagcacgaaatacatatttaacaatggttttcaattagctcctaagtcttaacaaattcttagaaatttggttcacaatgatgcagacaatcaaaacataattgtacatgtagtatagctcattattaggttctaaataaaaatgtattagggttaaggattccaaatcattaatttctttttagtcactctccctctaagtcactcatttaattacctattaaatattttattattttttattggtaggctgctggcccggtgggctggtccacccctggcccacatttggcccacatttttgtgggccgggttggcccgccccgtttaatgaatgtgggctcaaagtctcaacccagcccacactttttcgtgggttaaacggaccggcccgccgggccaggcccattttgccatccctagacaatgacgacgaaagatgtccaacagtataactaatacaaattccaagattaaacatacatatttaaatacaggtttaatatggtagtcattgtaaatattagtagaagatagaaccttcaaaaaggactaaaaagaatgaaaccgcgttgttcatgattgtcagtttgttagaaaagttaatacgatacttggaattaagaatgagagttgtttgaagtccttgtatgtagaatacccaaaatggaaaatttggaacatgatgcattaaatatgtgtagaagttaaaggaaatttatacttggaagaacacgcctattttcattttctatcttttttttcccactctaatttgtaattataaaaaacgccttatttttcttttgttccctatttttaaaaccttgtataattgtttctcataatttattttaaaaacaaaaattaatatttttgtaactaattacattaatggtataaatcgcaactatgtatccagaattcaaactctagagttttgattatgttgaataatttcaggttaattaataattgttcaaaaggtttatttcacaattgtaaataatgttaaataaaacaaaagtaaaaaaagtttagagaataataattgtgtatattttttcaataggaatagtttatttataggtataaaatataattaaaaaagttacaaaagataaatatatataaagaaattaaaaaaattataaaataatgaaatatatggacaatcacaaataaattattcataacactaatcaatataaatataacaataaatatcataaataattatctttgtttcctattttaaaattattaattaatatgtatataattatttagattgcatatacccaaaaatcatttgtaatattctaataatatttaacaaatggaattacgtgaatcagaacatatattaacaaataaaatattaacaataagatattacattatcttaccagaattagatacacatacaaaataatataggcaagaataatgatgttaggatatcacataaaaattgagattttaataaacagtaaaatgtcacattcttcaagaatgaaaatttcctttttttcttgcactatttttccatttctagtgagaaagaatgatcttttctattctcattcttcaagaatgaattttttccttttttactttttgtgttgtttttccacttctagtggagagaaaaaaaatcttcaatttttattttattttataaggtcttcaagaccttttacaaaaatatttttagaatttctttatttgatagtgctttcaaaacacattatatctgaataaatttcatatttatgtaaataatataactatacacattataattatgaataatatgagttgggagatgagaatagtgttatcttgaaatgtgaactaaaaagaatatgacattctttagaataagatcaaattataataaaattcataggcctcaaccattgcaaccttatttttctcacttggagtgagatcattattttttattttcacttttacattattttctcatttcggatgagaatagtatcctaaaaaattccttcttgatagtatctttaagactctcaaatgatcaaattcacaattacttaaatagaacccaaatattataccaaactcatagtatgaatgacaaaattagagagagaaaaaatctagccttgaaatatgagtctaaaagaacaattttctccaatttttacatgattttttcttataagttacaataccaattgtcgataacccatggaagaaagacaatcatgtaaataaggtgttaaataaaatataattcaaataagagaaaaataaagaagaagcgaacacaagagtttaaagataatgataaatatatatatatatatatatatatatatattctttctaatagtagtaacatatttttaagtacaaaaaataattgaaaagttacataagataaatataaataaggaaagattataaaatacaatgaaagatatgaagaatcacaaatagattattcataacaaataattttttaaacttttttctataaaaaaaatcatttgacattgtgaaaaaaaaaacttttatacttacatagtaaattaagacactagatatcaattaacaacatattatattattctttactttagattttttttaaattaaactgaattttaagaggaaaaacaatgtttatacaacatactcgttagttatggacaaggttaaattttttaaaaaactgtttgtctgcaacaacaattacaatggcaacatcaaaaattgagtcatatttgttcacaattttcacaatatcaagaaataatggccagaaaaccaccaccacaatttaaaacctcacacaagatacacgagagaaaagaggttccactgactgaatcatttcatggaatatctcttgttctaagtttccaacttcgctccacgtgtctttcaccccattaataattgcttccagatctctctctcatgccctacttccctcactagctagtgcatgaatttcttaaaagtaaaaaaaaatgttaacaaaattaaattaatttgattcacctcaggtgattcaataaataaaaacaaaagaaacaaagaaaagggaataaaatatacacagatgcagatgagtgtgtgtatccatacacaatttgtttcatatatgcataaaccattatggaagaaagacgtttttcactttataaatacccatttttggccactttgcttgcattttctgatatctcctgcctgatctgctaagtggacaaaagtgagaaaaatatatacacactattcttctaagggctggaacttgctctcctgtcctgaatataacttctccattttgtttgctcaccaggtttgtggagcaaaatactgaaacatcatctaaaatgccttctcaatggttcacctctttttggggtaaatttttcccttgaatccaagattttgcaacacatgaactagattgcaatttgcaaactagccattacaagcaaatgaaactttttgaagctaaatatatataaatagctaatgatttaaatgttgaactaagttcttgaggggtgaagaggttgttccaagctttcattttcttctacatttcttttcagattcttccccaacctgacaaaaatagctgaaagatcaaaatttacttatgtgttttgtcaagaaatacttttttttttttgtgtgtgtgtgtgtgtgtttatacgaggacaataaaatgataagatcttctacttgattcagcttgattaagtcttgagggatattccaagcttccatttcctcttctttccttttcagattcttcacctgacaaaaatagctgaaagatcaaaatttacttatgtgttttgtcaagatatactttgtgtgtgtgtttatatgaggacaataaaatgatgtgatctttttacttgattcagcttgaaaacatggctcttccaaaccaatccatgtcatcagagtctccccagagaaagatgggaaggggtaagattgagatcaagaggattgagaacaccaccagtcgacaagttaccttctgcaagcgcagaaatggcttgctcaagaaggcatatgagttatctgtgctttgtgatgcagaggttgctctaattgtcttttcaaatcgtggccgcctctatgaatatgctaataacaggtacctgcttttcttcaatctcttcataaatattttgggaacattgaatttatataattttgctcatgcaaaaaaaatcttctgaaggagttaagcacaaagagcctaatcactgttgtgatgcagttagaatatggagttaatttttcctctttgttttctgtaatcaacggttcccttgtctttttttttttttttgtctttaacactcatcaagaattgtttcttctattttggcccttttccttctatgagcttttaacctcattctcctcttttttcttcttctgtttatgacaattattttcttagttcttgatttggtgggcacatagatctggtgtaccatatagacatagaagcactatggttgttaactagtagcaagaggaaaggatttggggatgttatgaaggtctgtgagatcagccaatccctagaactcataaactttctgtttcctttttcctctttcccttctctctctttctttactcatctaaaaactaaagctgtcatctttccattagcccaatttccttagtaacaaagccagttgattagacaaaaaagaaaaagaatcacagtacacttccaacaaattgtcaatgactgaatgagttaaattggaataaagaaacgagtaaaaaaaataaaaatggatatttgtaacccatcacaacaagatcttctcagaaacattgacatttaaaaaaaaatcaaagtacactttcaacaaattgtcaatgactcaatgtgttaaactggcataaagaaacgagttaaaaaaaaaatggctttttgtaacctatcacaataaaatcttctcagaaacattgacatttgacacccacttgcaagatctcgtactgggttaaaaataaccctagaaattagggttttattagggactaatacatgagctgagcatagctaattagcaaagggagaagaaaaaagaaagaaaccgttttctcttctcagcatgaccagaaaatagtcaaagttaatctcttaatatttattgctcgttgattttccccattttaggaaatggagtttggcaactatggttagggctttaaggaaaataaagggtggctctagactaggattttcttttttgtcttggttggaagaatctttgaacacgtcacacgtgatttttcagttcttgacttttgaaaaaagagtttaaccaagtaatagttggaagatggaattggtatctctttaactcttgcatctgaaccctaaagttggatcttctacaacacccctcctatgggaaactctctcttcagcatagagtaaaaaattcttttacatagtttggaaaacagcaaaagacaatgaaagaaagtcatgaaacaatgagggtccaaaacgctgcatcatcataatttcactggtagcttttggagcctctgcatttgctcaagatcttgaactttacatatttgtgaaagttgtagtctgagaaagaaaaagaagggttttaagctgaatgagagagagagagagagagagagagagaggtaaatggggggcggggcagagagccaatgagagagttctgagcattttggcttcttccatgcagtgtacaactactgcttttgcttgctgaaaatttgcggtagctgaaatgaacggctgtgatgtacacacactttcacacagaaaagactattttttttaaacaatatatggtatcagattcagtaaatgtgacttaaaaatcttgcacgaaatttagatggctagaaatcgaggtgagcaatgaggagtggttgagagcattatccactgtgagatgcgtttccttgaagtggcagagaaaaaacataggtctagaaatggttgaaccaatcatattgtgggaacctgtgccgccgtggcagcagcagccaatcagtggctcgaggatattaaggtatcagttcattgcaatactgaaaaggttttcttcttttcttttcctttttcatccctaattttctattattattatggaaactaaatcattttgttattttaagattttatttttatcacatctaatcagactttgactccagtcgaggtttctgaataatgagatcatgtgatgtttattacttttgtgaatttagttgcgtttgaggttcggttaactgaactagttggatgatttgacattaatttcaaccttggacaagctctatggttaacctcaaattaatatcgaacacagttgttcctttttaatttcttttatttttgtttcttttaatttacgcacaaagtaagaaaccgagttaaattggaagattcggatgaagacgttctagagactgaaatgtatcccttagagttagtgataaaatgataatactgttttaaaattagttgtttgcatttatagaatttaaagttattaatcagttgtgaatttctagaatttactaactacatttttattactagttatttacactttattattctattgcactataaagtataaactgcagaagatatgaatctattaataaagctgacagcttcacgaaagagataaaataaacgaataaaggaatataaattcaaaagatgtgatatatataataattcattaataaagtttagtttatattataactttcattaataatgttatcctagtaatttatacactcaaaccaagagataaatgtagtttatgtgacaatattcctctttctcttcaaccatgcaaggaaaattttcagatttccaattactaattaccctcaacagggttaaggatacaagataaaaaaaaaaaaaaaactggattgggtttatgcactttagaaggtaaagtgcacaaatcctaatcattcatattaataaatgatttagataaacacaccttcattaaaattgccacatcaaatttttctttaacgaaataaaacttattaaattaaaatagaaaataaaaaaattattttggcttgcttcacctaatcatcttcattggttacacagaagaaaagcccccaatacagttgttacaaattattcttcttaatctgcagctttatcttaaaatttcttactactcttaattggaattttttcttccaaccacttatccagcaatgtagaagccaataacggaagaaggaaaaaaaatcatttgcctaattaagagccaagtagcaaccagaaattagtagcatcaagaaaagaattagtacgagcctaaatagtggcccctctgtccagaagatgttgtctccagcatgacctcattggtcgatgcaactagtttttttttttttttttcattttgtgataagcacatacggaatcaattgagagagagaaatcacgttgaagacatggaggaaaaaaaattcagataaagcaagatttagaataacaatgccgcaacaattgtttttagggtttttgttcttttgtatattatgaagatgatcaagtgaagcacacgagaatattttctatttttatttaatgataaaaaatctatacggcaattttaattgaggtgtatcaatctaaatcatttattaatatgaatggttaggatttgtgcattttatcctctaaagtgcatgttgcactttagaggagtccaaccggggctagtcataacgaaagctagtgcactgtttgatttagctaagattctcaaaaaatccttttataatcaattaagttgcagggtttaataataatcacaaggaacctaaagcctttaacataactatcctagttagatgattacaaattttgtaagactaaggcatcctacaagttattaagattaaatatttgtttatctttcagaacttttttattttccaaaaaaatttgttactggagaaggagattgaatgctataccggaaatttggtcgtcaatcatgttctttgacttttgggttatgcttatataatcttgtaacaggacaacttgtgaatctatataaggtttttttataacaagggtcatactcttgcagattattagataaaaaaaataagtaattttctgtgcttatataatgttctttcacaatgatcagaaaaagtcctttatcacttagatgatgccactgtcatatcacttagcacaatgatcaatataatttataaataatcctactgttattatagcgtcaaagcttcaattgagaggtacaagaaagcaagttcagattcatctactggtggacaatctgcttctgaggctaatgctcaggtattaattcattattccttctctacattttttcaagagaaactttatttgaaactaattaaacaatgatagatacattaaattaatatcatgcagaaaaggaatttgaatgtaattgcaatgaattataaactaacatttttaaccatgatttcaaatctcagttctacgagcaagaagctgccaaactgcgggtgcaaataagcaatctgcagaatcacaataggcaagttgcattagtaaaaatttcactacaatatcgaagaaaaaaaaaacatatgaagagatctcaagtattatttcaatatttggtaaaaatgttttgaatcgcagtcaaatgatgggtgagggtttgagcaacatgaatggcaaggatctcaaaaacctagagactaaattagaaaaaggaatcagcagaattcgttccaagaaggtatttgtatttctagtaacaagaagtttctttctatgattttgaaagaataaagtatgcagatttactatgttgatctaattttatactttcttcctttgtttgcatgtgctacttcccaaacacctacatcagaatgagctgctatttgcagaaattgagcacatgaagaagagggtaaatgttttccttgtattcttgttttaatttctaaggtcatttttttttttttgcatttattatctaagtggctcccattacaatttaatcaagtttcttaagtttagcccaatggtctctagttaagatttcacaaatatctgtattagggctctacaattgtttttcatattctgtttaagtttcctcttggtcaaatttggagatttccaaagatggtagtgaggatatatagatcattccattgcatgagtattattcatgatagcttgagtagctcctagagcctaaagatgaatcatcttaaaaagatgccactccataaggtctaaggcccccactcaataagatctagaaagaaaaatgaaaatttgtaaggattcaatcttgtgtataaaatataaatgtgaattgtagctgcaaatgttgtcacaaataaataaaacagaattagatcatataattattaacttgagtttggaattttttatttatacactttataatattatagactatagagtttaatttattttatactatttctacgcaaacatttttcaatattttcaagtagtttttcgagagaaaaaataaatttaatctgaatgttattaaaccgctttaaataaataaaaacacaattgcacaataaaatatcaattttaaagcaaatatgtgagacactgataactaaccatatcacaatattgtagacggtgtaacgtttgacattttgtatatgatgaaactttggcttagactatatgttcattcttatccctaaataaatctatatataggtgcctataattataatctgtgtttttttttgggagagggggtatacaaaatttcttctacaatgactttcaaagtatacatagtaactaatatgtacatttcacaggagatacacttgcacaatgacaaccagcttcttagagcaaaggtttgtcattctatcatcaatctacactctttatatatatatatatatatatatatatatatatatatatatatatatatatatatatatatgaagtttgtattgtagtttcattatcaattttctttttttttttgagtgtgtagatagcaggtgagaggagtcaccataatgttaacgggttgtctggaagcataagctatgcatcgatgcaatctcagtttgactctcgcggcttcttccaagtgactggattacaacctaataataatcagtatgccggacaagacaacatgtcccttcaatatgtgtaagtttctcccttgctaggtttcacattcattctataacttgatatgtatttgtttttaattccttaatgttcaaatcactagttactacctattaacaaatctcataagagtcatcatagctttatatggtcatatcatagttccattgggaaagcagatatagaataaatgaagcaaatagttttatggatagatattaacttgcccctatgtataatatggtgaaaaaagggtaaaaaatgtgaagcacaagcccaaccaaggggtttagttgagtagtgttcgtctgagttcaatttctataaataaataaaaacacaaaaaaaaattataacaaatgaatctttcaagatacaaagggacatgcttgtggacatagttgttcttcacacaaaagagtcaactacaattatgatttcagaaaatcccaatagtcatagcatgtcaattaaaaaaggtaataatagaattgaacctctagtaaagatgattcgtgaaagaaattgggatttgtatatatgaaggaaaaaaaaaacatatggctaaagaattgctttagttggctttaaataaatgttttctcaacataaattgaaatttagtttcaataatagcttgagttagcacatatatacccgtaccatgacttgatttcgggcaaaagaacctaaataatacaaattaaataaaaaattacgcatttgggacggttttgaaactatttacaaatctggggcagtgggaaccgcccagaattgggcagcactggaaccgcccaaatccaggtggtaccaagggggtagaaccgcctggatttgggcggttccagtgctgcccaattctgggcggttcccactgcttttaaaccccaaaattttactgttcacctacatttgcactattccagcttctctctaaaagctctgccttctctctaaaagctttgccttctctgtaaagattttgcattgggttttaaggcgatttaacacgccgaaatagggcatgattaaacacgcccaacaaatagaggcgtcaccagacacgccctaggttaggcggcacacaaaagggggtcacgccaacatttgggcgtcactgacccttatataagggtgaccatccacaactcgtcgatatcaataatatggcattcctaggagaaacaagcagtcagaccatagctaattcaacattagccttcatttttccaaatggatcgatgaaacacaacgacacaggtgtttattttgagtgtccctctccaataccaatgcgggttcctgatcattgttcttttcaaacactgaagagtaggatgtccgacacccttatgctaagccgtgaccattttctggacgaaatctactatagaaagccaactgtacgtgtaggtcagcaatgtttttatcattctgctaaacttaccaatgataacgatgtttgcctaatgttaacgtgcaatgaacaaatgtcgagcgttggccctatagaaatattatgcagcatcaacagaacacctgacggtatactcagcctacttgaatccacaatcgtcccaacacatgatgcagtgctatattacaacggcaagtggaacataccacggcaaggcgattttgtgggatatgcattcactggaacaaatccaatcagatttgacattccttcaggatgcaacattgaaacactgaaggatctaatcaagcaagttgtgcctgttggccttcctccttatggaattaacaactcacaggtggtaagaaaattattttttagacaaccaacccattacgcttattcagacaacacaatcgaatatcacataaaagagttgataaccgatgcagacgtgttgaaggtcttagctgaatccaactattggaagcgtttttgcccaatacacattttagctgtttttagcaagcccgttgcccaaatggaagaagacatgtctgctacacaacatatgtgaaactgctaagtaatgttgttattttcgtatgccattattgttattgttagtgttatttgtatttgcattttggtaaacactgtttattaagtgtggttaggccgtgtggttattttaattgttattgttaactcaagtgatgtcgttattgtatttttcagttgacaaataatgaaaggctcaaaagttgtaaaacaaatttgcaattcgttagaatgaaatacattaacatccaagtacttaagcaaacatcataaaaaattcatgaaacagcacgacgatccggacaagctctccgattatgtccaacagccttgcaaattccacatctgctgcgtctttgactggtttcgatttcgtccatctcgtttcgaattctggtcgcctttggacgaccctttccatgcaacatttccctgtcgggtatgataactggaccatcactcggtggaatagcaccttcattaccaattggttgccacggaaatgagtaggcgtgcaccaaattacttatgaggaacacatcatccacgtactgaaaaggattctgacgcacatgtaaagcagcagctacggcgtgactacatgggtatttgaaggccttaaacttgccacattggcaaaaacgctctccaaggttaactgaatatgtggtctcgcagccctcaaacacctcaaattgtgttcgctcaagattatatatgctgacgtggtggcctgtaccaacggtctggttatgcctcataacatccatcacatttttgcaatatggcattgaaggatcaacttgtgaaagagctgcctgacccctagtcacaaaatattcaaccaatctgctgtacgtgtgcttcaccagagcagtgataggcatgtttcttgctcctttcaacaccctgttgactcattcggacaagttagttgtcatatggccaaatcgcctcccctctacatcatatgcacgtgtccacttctccttcgggatgctatcaatccattctgcaaccttagggctgctatcacgaaatcgtgctaacgccacgtcaaattgaatcatacagggtgtataacctgcaaaacaatcatcccattaacactaatctacttacgcatatatccatttaatatattcacagaattgttaatcatacctaaattcatcagcgtcttcttcaagcgttgatttctgaacttttgattaaaattactggcaatatgacgaaggcaaaacacgtgatgagcatgaggtggttgccaaccaggatgattcaccacagcatacagtatgcttcggtgcctatctgaaatcagacaaatattttgcctttgagtaacatgcaaacgaatgttagccagaaagtatgaccaggcttccaatgtctccccgtcaactatggcaaatgctagtggcagacattcattgttgccatcctgagtcgtggcaatcaacaatttccctgtatacttcccatacaaatgagtgccatcaatctgaatcattggtttgcaaaaattaaatgcctcacaacactgtctgaaagtccagaacatgcgatgaaacacgttttcctcgtacgagtcgatttgccacaaaataatctttggtttgaatatcataaaatgaacctggtgaaaaacgaagcatgtagccacaccaccggggcaaatatgcatatgattcttcccaattcccataaaccattgccactgctttctgctttgcaaaccaggccttacgatatgaaactctaaatccaaatgaatgggtgatcctttcctgaaccaatgcaatcgacacagacggctcctccctgatcattcctaacaatgcaaatgtaacatttactttaaaattaacaactttaaagaaccattatttaactcatatacaggaaatttaaaaaatacgtacctactacaattgatgcaataacatcagcatcaagctgtctatgaccctgtgaaatatggtcatttaggcaatggtggttgccaccccatcttgaaacaatccacttctcaccgaacgccggtttaattattctaaccctccatgggcaaccctcgttatgagcaacacacctcatgttaaacttgttgggcttgctctcaaccacatatgcttcttgatgctccttcatcaggttccgcttacatgcgatttgtgcgtcctttttggaggcaaattcttgtttaacaaacaacggatcccctaattgccatggaccctgaactgaaccggaaccggaaccggtaaaagattcttcttcgcttggatgactccaatcaatgtatgtgtagtgaggaattccatcccaaaaaggagtcacctcagcacctacaaataccaaatcaattgaataaacataacatgcacactaaaataatataacatacagatatataaatgattttagtcatgttacataccttcaacaggttcttgtgattgtctacctcctacgtccggatggtgatggatttcagacgaccccgcagcagtgcctgcttggaattcagtcacatccacaccagcattgtcatcattatccgacgcactagcatcctcttcaagaagacgatcttccatggcaatgttctcatcatcgtcatcctcttcgtcgtcatccataacccaggttgggtcatgtgaatcttcctcagacacatttacaaatggagcagcacatgacgcagccacatctacaactggagcagcatatgacgatctacgcctactaggatttaaaggaactgacctaataggtaaaacatcatctgccacatactccacgtacaactctaaaaaatctttcgttgccaacttaaaaaattccaccattagcaactctacgtcttcgtcgtccacaacttcaaaacccatgtactcttcacgttggcataatcttcccgtaatacgtgtgatacattggttgtcttgcagacctaatttttggcgtatcttcacatgtacatcacctattgtcgagcttcgcttcatacgtgtctgccttttttccccttcaaaaacaacaccttgtctcccttcaaatatccttccattataatataacacaacacggacaaactcctcaccacctgaactcatttgtttcactcaacaaaaactacataagttgaaaaaaattatgtcagaatatgttgttaccattactcataaaccatagaccctaccccttacactatcaaattttataatataaacactaacaatttcataatataaacattaactaactaaaccctaaacattaagtaaattcaattgaacaaaaccctacttagaaaaaccctaactcgtaaccctaattcaattgaacaaaaccctaattcataatccctaattcgtaaccgttaaccctaaactgaagtcactaaattgacaactaaactaaatcctacaacctaacattttttctacaacatgaaataaccaatatggctctaacaaatttaaaattcaacaacataatatattaaataatactcataagttaaataatttaacttacctgttggcagagagaggtcagacaaaaaagctttagagagatgtcagagaaaaaatttatagagagatagaaggcgcaacaggttatgtctgaaaaaaagtaaaaagaggaggatttaaggcaggtggaaccgcccagaattgggcagcattgaaaccgcccaaatccaggcgattctacccccttggtaccgcctgaatttgggcggtttcagtgctgcccaattctgggcggttccgactgccccagatttgtaaatagtttcaaaaccgccccaaatgcgtaattttttatttaatttgtattatttaggttcttttgcccttgatttcgtaaaacaaagagaagagataatggggagtgaatgagtaaacaagtcctaatataaaatacaaaatatatacagaaccgaactaatttgcattgcaaaagttatgttttaatattcaagttattttgtccgttgacaggcatatttgtgtgtcccatggagacttgacttattgtatatttggaattaatgaacataaatctaatgcttgttcttttatcttgtactctatcttgtgcagttgaagagtttaagcttaagaaggagaaagacttagatttcctattgtttgtatttgacatctagtatgatatatagaaatgctaaagcctaggaagtatatatccagaactcaatggaggcaattcatttaagtattcccctcagtactatgttatgggctatttagtatgtatacaggtactctgattacagagatttgcaccatgtcatattttgtcaacttttgtatacttttcatatttctcctataataggcttctatatatgtctatttcatatttcacttactatgaattcaacatcttactcatacatgcacctgttcttgagtatgatttttttaggaagatcattgttatttgtgcaaagtatccaccacattttgaatatgattaatttaagatttaaatacattttagtctttgtgatttatcatttttttatattttttccttacaatttttttacttgttttgttttttagataattaacgcattaaacagtaaaaaaaaactatctaaaatgttataaaaacaaaaaataaaacaaacatttttgtagagactaaaaaaattataagaacaaaatgcaaaaaaaatattataagaactaaaaatatatttaagtacccaggctaatttccagcattgttaagcatatgcaagtgcatatcggcatcgactgcttcaacatctacatactcagctctatgagaaagcttgaaaggaatgttgtgatctacaaccataatgtttctttcctgttagtaaaaattgttccaagggcaaaagcattaacaaagtgagaaaataaaactggaaaaaataaaagcactcaagtatctgcaatatcagtataatatgtattatgtgtatctgaatgctaattaatcaagtttgttagattaaaagttgagagaaacaaataaagaaattagatctattgatatatatatatatatatatatatatgcgcaagggtaagtggtcataagttcgggaaacagtttttttgaatatgtaagagtaaggttgcatataatatttctcctccttacttgcgcataacgtgcaacctccggataataaagtatgtaaattttttatatatgcaaggataagattacatccagacaatgaaatatgtaatttatatatatatatatatatatatatatattgtgggtgagagagacaatctttgaactttttaaaatatataaaaacaatgacacgagctgatcaaaagggtcgtactgatatgcaagatgagaaaggtggaatgttagacaagataaaagctcaaaatagacaagcagggtaagaagaatgattaaactcagtgagaagtgtcacatgaaaataagcgaattgagaaaggctactgtgagtgtgaccatcctacttagcttcactgcctgacaaagtcactttcttgatacagtagtaaccacttctctaacagcttgtttgagtattagagcctcacagaagtgttctaagcttcatgtggttatattcaaagcttataaataggattacaatcaattaaaacactgttgggcaagttgagaagccatagaacagttataaactgttttctctgccactctgctcaaacaaactgagtagcatgaaacttttttcttgtgtagtgtatccctgctctgcagtaacttttgaccctttcctagagtgttttccagtgtagatatgatacacattcaacaacttatacaacaattcatgcaacattacttttttgcgtctatctctctccatcatcctatcatttattatatttcaaattcaattttcctctctttttctctattggttgtacattttgttgtccaagtatcatttctcattgttttaattcagtctgtttgttgagctctatctttttttcactcttccattatttatacctttgacattgtgaccgttagggcaattgaatgttttcttaaaactcgttttcaaactcagcttgatgattaaccaaatcatcactttagttaaattttttagaaggatactattttgcaggtgtttatttcagctataattaggtaaaggtttcaagtattgggttgctgtagcgaatacacctcattcttataggtctacaacctttatttatatcttaatcttggtgataaccggttataaccataaatccaaaaaactaacaattaacatttaccaaaaaaaaacaataaatccaaaataaattaaacataattaatgcctataccactatatacaacaacagcaataaaaactatgaaagatactggatagttttccctttccttgagggtaagtggcccttggcaactctgatatctgtagattcttttttttttaaaacttcaatttctgtgattagttagaaaagatctggaacaaattaactactattcaaactatcataaagaagttcttgatctgcaggaacaaaagtacaccaatacatatgacatgaaatagctatatataacaccacaatattgcaaatgaaattccaataattgattgcaattaatctccttcgtctacaatatgattattataagttctagcaaaaatcaggtacatccttaaataaatatggttgtaagagtttccatcttcatgttaacttaacaagatgacagatatccattgggtgcgcgatggttggaatgggagcattataagcacttcttgcactgagttggttggccatctcagtaggatgaaatgcatcaaaaaatacgtgtaggtttctgttcttgcatggcttctcattagggatacactgcccattcggccccactttgcagcacataacagtttctgaaatccctacatgcatggggccaccaacgaaagttaatatatttaataaacaacatatctatttacttcaatttcttaaaacgatatgatcataattgtattaacataatagtaaaaattgaagacatgcatgtgcatccttttggtcatagtttcaattatacaaattcaatttagccaatcttttgtggaaagtacaaagatacattatatatgcattttacaagctttctgctacgaggaaataacaaatacgttaaaaccattttagatgaataagtgtttgaatatatacaggcacagtaaattatacaaaatccatacttgctggtatatcatatacatcaattgaatcttagtactactataattttggctatgaaaagaagaagaaaaaaaaaattgttaccttgtaactttgaggcgtgtaatgagaccacagcactattaatgaagataaatttggcatgaggtaattctttattgaaacgatcaactactggtttaagcttatcattaaaaatgagtgctgctctattttcctcgtcaacacataatgacccatttttcccatgaatagagatttcatgcggaatgcagcctataagcccgaggcctatcaaaacaaacttccttgccccaagtgcgtgcaaatcctgcacatagaaacaacaaaagtagataacaaaccattaatttggtgcatcatgtatattataaatgttacttatattacgtctgatcctttttttaagaaacaagttttagtgtattttatactaaaacttgtttctgatattatctttttctagaatttgaagtaaaataatacctttaaattccttgcatattcttggacaagggccacagcatactgttcaggagaatactttcgacttgatgggtaatgctccggtaagaagtagttgtttaagtagtcattgctgcctatattcacataatataagcacttatttaggtggtggtgtgcttggtcagggcctccaagtttctgagtgatttgggaaactatgactttatgattttgcaactgcaatcccaagctaatatcctcacccttcaattaaaaattaagtaaagtaaggtttttgctccattagcatgagaggataaattaagtaatacatccatgatatattgtgtatatacacctaatatcaatagctgattttctaataaacaattgaaattactttacctttaaagtgcgttttagcttgtgagttgttcaatttaaagaaatcagattcaattaagtaaatgaacatgtgatttgatttaatgcatgaaacaaatgacacatcacacaaatcatgacaaattaaatcacaaaggcaaatatctcaaaaccaaattataggtaagatgtatatatataaattagatatatgtagtaaaagaatttgacatataccaaatgtaacccggtctcgttgcgaatccccgctgaaccggatgcataattcacgcctttgagtatgtctgaaccaccggtatttgcaaagggtgggataaaattttccaatcccaaaagctcagctgcaataacataattttatattgaataattaactgaaaactcatctatacattaaaataacatgaaaacaaatcatgttaatctatggaatttattcttttcaagttatcaaacttaacgtgacaaaatcattgttttttttattagaattgagtttggattccttaacaaggattcaaattctagtctttttatgaaaaaaagaagagatcttactaaaaataatttctgaagagatcaactatggataaaaccggtaaaacatcttttgcacctataatccaaaaaaacttgattgacaaaattaaagatcacatgtccactttcattaatcgtgtctcaacactcaagctcttcaaatgaaactccagacaaaatattttttgtccatgcccaattgcaactatgtgaaagaaagatatatacatgttgagaactgaattattattgattatatcaactgaagtacggccgttggtaaatcttccagtggggccaagtggaaaatcaatcccataaggcaagttattaactttggcatctgtttgtagattgttgttgtttccactatcagataaagagtctccaaaaatgaaaagacaaggtacttggggcttcccaacaacacaataatgttgcatgtatgttgcactgaagaaaaaaatcaccactaaccataacttggtttcataatccatatcaaagaaaaatattaagagggcgaagttcagatccaaaatattagtggtccaaacacaagggtgactagataacatatatataaagggagagagaagtgagagaaaggaaggtatgacccagtttaatttgtggagaaattcgttgaaataatttatctatgtgacacattgtaaggccatatgttgattttagtaagtgaatttcatgcacacactattagaaaattactggaacctacatacggcagaaactagaatttcgccaagccatgagattgtaactatctcaagttttcaatttggacaaaatttaaatgaagttccttatgagtgatttttatttattttatttacttgtttaagaaatttggaggtaaaaggagggaaaaatgagggagggttaaaatcactaccttttaatttctatctccctctcaatgttggtagagtaggaaaatgatttataattttaagactatgtgacttaaattattttaatattttattgtatcccttttttctctattatcatttattagatataactgcatatattatcagtttaaaaaaattacatatattctctagattttttcttttcctatacgaactaaagaaagtgatctttcatgatcactaaatcaaattaaaaatgacctctttttttcctcctcttttctctgttaaaatttctctcctccacctttactcccttgaactaaatacactatacatctttgtattaaatattgcagtttaataattcacacaaatatttatataaaattccatgatacatatatttattatttataaaaacatctaaatgtcgtcatttaaataataaaaaatatagtaataaagaatttaatttaaatcctggtttgtttgaaagaagtcaaatgaaagcaactataaataaacatagaataaaatttattcataaaaattaaaaataaatattagaagatttacaacactatctttatcttactcaaataacgaaatttgatcactcattagaataatatttcctaaaattataattttttacaaaattttcacaaactgctcaaggtaaagtttgaatttaatagataccaaaaattgaatttaattacatgagttgtttcattaattaatttagattcaaccacttacaaaacaagatacaaccactttttgaagttttagatttttgcccatttgttttgaagcatttgcttttctctgatacttctgctgctacttttgttatagattgcagctagttttctgttttacttttattttttactagctcaattgattaaatatgatatatgaattattataaatcttttattagttcttacgaataaaaaaaatacaacacttcactgtttgtattttctaatacaaaattacatataccgccggcagctcaatggtaattgtggaaggcagtaatgctcaaagccacatagcatgccacgttaattctaggtcaataccatcgagctactacacctcttacaaaatttgagctactgtgttactcataaatataaatattgtaaatcttcacaggatcctaaaacttggcattggaaaatggttttgggaccttccacaacagtcgacgttattgtgttcaaggcaattctgcgtcaatcaagccaccaatgaacatcatatcctcatctccaacggctagtattttgaaagaaagaccaaatcagacttcataacgtccagcaaaatccaagctaaagagtatatttggtaatgagaaaataaataatataaatgaaaataaaaagtggcaataagtgagatataaaatgataatttgagttgtttagttaaagaaaaatagaaaaaaaataagaataaataaaaaataattcaaatgaatcgcaccattctaaaacttattttcgcactttccttcaaagtttccttcaaagtgcagtgagccgaatccaaactctgattgtatatctctagcaaaaataacaaaactctgtttgtatataatttgtccattctccataaaaaaatagttacttaaaaatagtaaaatacgtactaactctgttttttttagtgatttactctgcatttttatttttaaagttcttattttaaattttaataaaagttgggtcaaatataggcacacgttttttataatgtgacatatcatttatattttaatttctttttaatttaaatttatttttcttaaattaaatataaatactctttataattttagttttcttatttgtattttttaaattttatatacaatataaaacacacacacacgtattataatttatatgtttaaaaactatttttcttttcttgatgccgtgaattccatttttttttaattaaagtaaaccttttaattttctactcagttaatttatactggaaatatatatatgtatatatatatatatataattataaattttacatgcattaacgatagccgtaaaatatataaaacccttgccaatttgacttctaagtttattttgtcatcaattatttgtattaatttttttaccagaaatgttaaagcaaacagtttgttgtgaaagttatcttaatcattttggaagaaacattcaaaaggagaatcgatcagccaacaacatatatactattattcactataattaaataagcaatcttccaaaactttacgacaaattacacctgtacttgtgaacccatgaacatttagcatatatgaatatgtaagagaaagagagaaaacttaagactcttatgccttaaaaggaggagaaattcttaggtgcacctggagtaagacatttttcttgctctgatcctttcattatttgccatgtcagtattgtgggtcattgttgtttcttacattaatgacaattgttaattttcctagatagattaatgacaatttttattttttctaggtagattactgacatgacaaacaatgaatggattagagcaataaaatgtcttgctccgggtgcacttaagaatttctctaaaaggagtaacacattcgaagaacattgaatatggttgtggcacagcttaatagccaccaccctctggaccatgttcattgttcagagatcatatctgagctaagcgttggatatcaaaagggtaagcatctgatgcagattgaacactgtaagctctctgagccacaacaacattgccagcttcagtaggatgaaaagcatcccaaaacaagtactctctcctgttttggcaaggtgtttgcattggaagacatgtaatttgaccattgttccttccaaacccacagcacccagcatttgtaacactgaaacctgaagattgattcatgtcaacagaactttgtgagttaatattatttgatgctaaaaaaaagtgacaaaaatcatgactacaaaataaaatgcattggtttgaaaataattaccatagactgaagggttgtttataatatcttgaaagatgtcataacagttaatgaagatgactcttgcatcaggtagtttgttgttgaattggtcagtgagacctttcagttttttgttgaatatttggattgcagaattgatcttttccacacatgttttaccatctgggctgttttgggccaattcatttgggctgcaacctaattggcctattccaaacagcacaattttccttgctccataattgtacaaagtctgaatgacaaacacaaacagtcaatatttcaatttgtggaaagcttttcaattttcaatttcattcctgactttataattgaaaattaaatggctattttgaacactgcatgttaccactatattataatagaaaaattgaagatggtgaatatcaaatggtaaaagacagagagagctaaagactaacttttagtttttcagtatatgcttgaataagaacatcagcatactcatctggtgagtactgcctgctgctggaatagaattgaggcatgaaatagttgttgaggtaatcattgctgcccaacccaattgagtatatgcacttgctcaagtaatttgcagctgagtcctcacttcccagtaaatttaccacttgagacactatgttttggaaattttgcacctgcccactaaaactaatacgccctccctacaaaatatatgaacaactttatagcataaataccttaacaaatgaagattaaaaacagtgatgttgcatgaagcaaaaggaaactataaaggggtacaagttgctgcccagtttcctctctaattccagcagcagcagatgcataattgactcctttgagtatagcatcgacgctagcatcagcatatggaggtatgttatcatcgaatcccaaaagttcagctgttaaatttcaacagaaagttaaaacaagagtgaaacctttctatggttatatacttacaagaatcaattttatgtgccagatctacttttctcttgttcctgtttgtttttaccaaattagttcttctgataagtaaccatctggccagaggcggagacaagacacggggtcgcccccctaaaattttattatatatattaaaaattaaaaaataatttgacaataaaaaaaagttacattgcataatataataaaatataatattttttaatattatattaaaaaaatagaataaaatattttttaggattgcattcaaaaataggatagaatattttttaatattgtattaaaaatatttaatattatattaaaaaataggatataatatttttatgattgtattgcattatataaaatatttataagattgtattgcatattataaaatatctttaagattgcattgcataatatgataaaatatttttaggattgcattcaaaaattggttaaaatcatatgtttaaattagtataaatagaaatgtgttgatagcatgcatttcattccaaataatattagagcgctttagagagtttatatttgcatcattaagagaattgctatgagattatatagaagtgtttgacaagtctgattcttaactctctatcagaatttaaaggtacttatttattatcatagtggagttgtcaattggattaattatccaatttgaacgtagtcattttttatccaattggatttttcacgctaaaactgattgtgtcttctttatctcttatctccatattattactttgaatttgattttaaattgtgaattattttattaagactcactaaactttgccagtttattcatcaacccaccctatttgcaatttgtctagtatgtggtttgcggtttacatctttttgtatattagatttgtattgtcttcaaagtacttttatttatgatataattatttttatgttcatttcctctcaataaaatttttgtctccgtcactgacagtaaattttcctatttctttctttatctgtaattctagaattctacctctttatcaatgaaatgaactacacaaaactctaatcttaaattacatattcaatgcgggcaaacagatccatgtaaatggaatttaagggtcagtcacaaacctttttgaggggtaactaactcagagtagtgccaactctagtgtcaaaagttttactttttttcacggatgacatctgcatgttacgccttttttaatttttttatttcaccggtaaaaaatattaatgcatcttaattataccctttccttctaggtggtggacatttattgtctgattttagcataatacagcttgccatccaatagaaaattatgcatgcatatattaagatgcttttagttgcagttaattgataggttcaaaaatagggaagaagaacaacagttcttagaaccattttgatgccattgactcactataactatgacttttacaatgacgaattgatgattgttataagtccatgcatgtgaatctagttttaagaccatgcaaagatgcaaacgtgtataaatttcaactaaaatgctgcatgccatgcaaagtttataagccaattaagcaagtgcaagctcaccaattgcatcaacagtggttttcccattggaaaaccttccggaaggtccaccagggaagtcaatcccataaggcgcgtaatcagccctagccaaagattggagctggttgttgttcccattatcaaccaaagaatcaccaaaaatgaagtagcaaggcacttgtggtgcaccttgaacaccactccacaaaccaagagaaacaacaacaatgagtgccaacatgcttattgtgagatccaatgcttccattggagcaagaaacggtgttgcttgcgaggaattgaagtgaataatctaggtagctaaggaagataggggcatgtgtgagtgattgaatgtggaaggtttgacacgagtataagtatatatagtagtagagagataaggctctatactagtagtagctatagtgtagcttttacgattgggagtgttagttaggtgcattaaatggacgcggatataatgtgagattgaatgaaatggctccactaccaattccactgtaccaccccacctcattgatgaaatctgatcattgatgtgatccagctttaatttagagttgcatcttgcagggatggaaatttggacattacaacgactagttaaaacacttaggtattatgatacgacactttttatgtttttgttttgagtttttccggaatgttagattaggaatgttaaagtttcgttcagtatgggagtttttaaaattattttcaggaatttaacaagtctggaaattggttttcaaataagtttcttactggtttcaaaaattaagtttcttcctcaattttttctctgagaaagggtggaaaattcaagttttatgtaaaatagaaaaagttttagacacttgtatacgtgattttgtcgtgttcaacagaacgagctccgcagcacgagggcctctatatgtctagatgctacatcgtctccctatatgtatccatagcctacccgtcagagttgtccaaccattaatatttgaagttcattcccaagaaagaagacaaagataatagtattaacaagttaaaaaaatataatcactactataaaactgtattttactattccaatcgatttccaaaaattgttttaaaataaaatgcgatgtgttaaaatatattaaggtgacaattttgtaaataggaatgtgcaaatcacgaaaatcacgacggttttgttttgcgcgctcaatttactatttcatctccaacttaacgtattcactcactcaccctcattgtggtttccctcacttagctcgtgctcatgccttccctcattgtcgccgccgtcgaagatgtctccattttcgcgtctcctccattgtccccaaagcgcttactctatctcgtccctcccttctctctctccctcttctctccacgcgccgcctcaccttcgccatttgcgccgaatcccaaaacggcgccgacaccatcaccgcacactacgacttccacctcttcaccatcggcgccggcagcgacaacgtccgagccgctcgcttcgctgccaactacggcacttccgtcgccatctgcgagatttctttctccattatctcctctaaaatcaccaaaggcgtcggcgaaacatgagtttcttattttcaatgtttttcaatttcgctttttattgaactagggtttgtcgttgtggaggctagtgaaacagagtttcgtgtttctgaagatttgttaggtagggttcaggctaaccaagctttttcaacaagctaatttgtagaagctcatttgtttgatatattctaacggatagcattctatcattggttctgcttattcttaatagttttcaatttaatagtttcccacttcccctacatctcttttgctatatatgctactagtcaattgttcaggaatctcattgaattataaatttatatatccatattaaagtaaagagctattatagtgaaagtacgttgttcccaacttctattttatttattttaacatgtcctgcatattagaattggtttctgatagaacataataacattattttatccatttagtttatggcttttggggtggtagtttgtatattctgtataaccctctaatcccatatatattttccaacttttctgcacttgataactcttgaaacaatgctttgggtgtatgaaacacatgcccgactggcactggaatctggggacctgtttgagtataatcaggtttgttctgtatattttttgaagaaaagagacttttatgttttaattcattttagtctttgattacttttttgtacttgtttttgcttgttatgcttctgtttcttttgttttcctgagatcaaggattaatatacttcattaaaggtaatcaatgctatgaagtagtgatttataattttaatcaacgagtaaaatttggtcccatctttgcttgttttggaaatacgaatgatttattatagaagttgaagatgttattaaccttgtaattggactttagatattgacgccatttgagtgaatgtagtgccaagtctcagttacgaactctttatgccgaaggcattgaggggtccaataataatataattaatgataagatatattcatattttacatcaacttatatgttaatctgatatatcttatattattattatcattattattattattattattattatttgtaatgtttacactaacactatataaaatttttgttacataaaaatataacaataaaaaacttaatgtgaaatcgttaatatatgatttcgcaaaaaaaatcattaaatatatgatacttttataaaatcttgatattaatttttcaatacaaaataatgtaatataagttttacataaatgcactactaaaaaaaagctctttcatctaaaattttaaaaagttaatataaaatttattttaattattaaaaaaagattaattcattttagctgatataattaattaaattgactcataattattagtttattttaacaagtttcaattattaatttactttgactttttaataattttacatttacgtgactaatttgtattttttatattttgtagtgatttggtgattaaataccattattagatatgaagatcataaaagaaattaaaagaaatgggcagcatattttttagaagttaaaaacaagcgatttaaaaagatttacatgatataagaggaatttatatattatataaatatttattgtaatcattataatcacttaataatttattgacaattatttaagcataaatatatatttatttattataattttttagatctagttttttgaaattacatgttgggtttgttataaaacaaaggtaacattttaaaaaataaacaatactgatttctagaaaattgtcttaaaatgtttactttttaaggtgattttttgaaaaatcatctttaaattgtcacatgttttttaaataacatattttacgacgatttctaaaaaaaattgatatagaaatcgagattgtaagacgacttaaatatcgttgtagaaagtgttgactttctacaactacaaattcaaagacgattggaaattatcataaaaaatattcaataataatctttaaaaggattttttataatagtaaataagagtgaaatagtattttaagtaataattttttttattttttttaaaccttatcattttattatccctctatttctatcatatttttcttcaaccaaatcatctcttttgtattcaatttctcttattttctcttttcatttattttttttcgttctctccttttaatttcatcctcacaaccaaatgaccccttaatgaacacttaggagataagcaactgaattatacgctggaccaaataatgaattaataaagtaagatgttggtatttgattttgacagaatagatgtatttttttagtggctgaaaatagatgtatgtgttaataatgtctacttggctgccttgcaaatcatcgtagtcatctcgcgtattaatttaattaaataattggtcatgcgaatggcaagtgagttacaaatgaaaattactgtcaagttaacgagagagtaattaaaacgtagaaaaatgttagaaatacttgtttttcttaatctttgtgagagaaaagaagtttaaacatcaataatttgagatggaggaagtaattataacttgcaaattaaaagagaattgatcccgaataaagaagttacattatctgacagcgttcaatatttctgagtttatgcaaagatatggatatgaatgcgttgtaaaatgattagatcatctgaaaaccacaaatataaacttaacttataaattataatcgaaaattcattaaaaaaaaacttatatcacatatatcaatcattagatggaagtgcatccttcatacagttcttttatggaatcttgaggatacgtttcctgcattaatattacgttggagatatctacatgaaagtaaatgtcaattaattattgtgaataaaagaaaaatcgaccgcctattattacctcaaacatgcactagaggatattgaaggacgtatttcacaccagctttaactagcaataactaaaattaaataaataaactttaggccaaaatataagaattgcttttaagaaatattttttataacataatttatttctatattataaattcgattttttaatttcaaagaaaagtattactattttgtacagcttaacacatagatcaataaatatataattatttcaatttatccaataattttaaatttaagttttgaatacataagttaaatatttataaaatcagaggtatctaaataattataagattgataaagtggttgagggaaaaaaggagaaaaaaataatattcgttatttaatcacaaatcaccatttaaatatatatatttttatttaaataactgtataaaaactttttagcatatcggtgtataatcttttttcttaaataaacaaactaacaaacatccacagataaaaagaatcagaatcacccaccagattaattgacatgaacaatagcatgcagcagctagggtaggaacagcatctacaaattaacgactatgaatccggtctttccaatggatgaactggttattagtgattatgatttatggcccagcggcacatgctcagaataagaatgtctttttctctggatctaccccttttgggtttcatgtatgggatggtaatttggaaagctggaatgatcaaattataaatatgccccttttatttgtctccttgattgtccctctacacataacttaatgacacggaacgaaaaagacaacgatttgatatataagcatatatgtcttaataaattataaaatcacttaatcttttttattatttaagactctcagtattaaaaaattgtatcactacaagaaaaaggcctgtttccgataacatatttccgaagcattaatattccgtcggaaattgcattttttttgtagtgtatatattatgactcaactaatttaaacagttattaaggttaatcatatttttaaatataataaaacatatgacgactgatcaaattaattgggactaccttttcagtgctaatgtgatcatctaataaaaagacaagcaaaatattagcgacaacttgttattaattagcattcgataacacttatttaaagtttttttattctaacagtttgatccatcctatgaaatcatatcacccatgaaagttgttaattaagattcttctatctagcaacaccttaattaatatggcataaccttaagagtttgttaaggattagattcaaagggccgggaaaagtatttatgatgaataccttgacaatcaaagacagaaaacagaataataacggacacttttttattagccaaaagagatttatttataaggtaccggcaaacgccaaaaaaatgatgatgatttacaaagacctaccccttgcacatacattcaccagcttagcaatccaactcgaccaattgtgtctattcccaagcccataaatatccaacccgagacatcaacatatcgcatattacatgttgatattcatccaacaccagtttagacccgatttaagccatctgatctcattttcctccccattacaataattcccatccatcataaatattgtatacaagacaaaggatttgataccactcaaaataagagaaatgaaaagctttaagtttagcctccaaccatgaccaagacttatattttgttacctccatgacagaaatccaagtcaagtaattgatagcggaagatgatgttgtttctatagcaccataataacggacataattaatgcaagggggaattgaaaataagcttaaaaacttctttaaaaaaaaagattccataattttttggggcaaataaacacattcgtccataaaattgtaaggcgtcacacaaatttattcttaaaaaacgaaaaaatcaaatttagtctataaatgtgcaaaaaatacaataaattaatcctacagacaatttaataacaaattagtccttaaactttataatttaatgtcaaattgatcctcaaaaaatataatttgtaattaaattgatctttgaatattataacttaatgataaaataatttcacaaatttaacgaaggactaataatttgatgcactttttacatatttagggattaaatttgtatttttcatctttcatttcatagatcaatttattatttcattacactcttaagataaatttgactatttttaaattttttaattttataatggtgaaagtgaattttgaactacttgtagggtcacactagcttattaaatggacactttcaccccctaactttaggacgacaagtgctctcaagagtcaagatataaatttggtcttcggaagccatgcaatactttgtagctaactattcctatatgacggggtctagcatgcgaaaggcaaacatgtttcgtataatacaaaagtaaggagaaccgttggatttgcatcttcgcggtacccttggtttttttttatttaagttaggcacagtacagtatgctacaccttgttgaatgcaccctatggtccacagggatttagtctatttgcgtcagattccaatgttgaccgtattctttgtgtcttcgaatggagggagaaaacgaacaacaacttagcgaagtagcaaaaatattaaaaggttattaaaagactggggttagaaaaaaaagttgatggtttaagttttataataatggtgggaaaattatgataattgttgaaaaagatgaatagcaaagaaaaaaaatgaaaaaataagaaaaatatttaatttatttaaaaaataccatatattgatgttaagtaattaagacaattaatgatgctgtaattttgtaaggttgtgattttagaattttgtgtttttccataaaataataataatataaattatattaattgattaggtaaatgtatattaatgaaagttgtgttataagtttgagttgatgtaaattattatgaaaagtgaataataaaaatattaaaggattttttaattgattggtagttttgtaaggttggtaaaataaaaaattgtttttttagaaaataataataattgaaataggatgtttgtataaatggaatttttgttataagtttgagttcggcattgaagtaaaataatatgaaaacaaaacaatgaaaaaatatagatgaggccataggtggggccatatttttaattgggaagtataaaatgcgattattaataaactaaaatttatgcttattaatgaataggccagccgaagcaatgccttaaacaggtgaggccataggtgccttaaataggtgaggtcataggtccttgacaaattgtatgacatatttccacctgtaatgagagtatcccattagaagaaagtaggaaatagttattattaattgtaaatatgaatttaaaaaatgtgcagcccttaagaccgtaatgttgtcatatttaaacgacccaaaaaccaactgttgaagaggtttacacattttattagaatcattttaatgtttaaaagagtttaattcctataaatatagatagcgaacaaaaatttgagtttttagttttggagcttaaatgacttaagtagactgtttttatttttcatattttatgcaaaataaaacaaatatgaaattgatatatcaatttaatgatataatatatgtataatagcttaagtatatattaatttaatgatatatatatataagtatataactttgttgatttatgaattaatcaagtagagatataaatagcataagtttagataattttttaaagagtctaactttgactcaagttcgatagcttaattgtaaaatgaagtcttgaattatattcgagttgattcaataaattgtgaatcctatgatgactattttttttaatctaagcataagttggatttcattttcatgtaaatgaatctgatgagacaagttttatatattgaattggtctaaaaaggtttaaaaatgctgtcacaaaatcgtaaacaatcattattttaaaaatagtcttttcattaaaatgaaaatataaagcactaaaatatatatttttaaagataaacttctaaactaaattaaaagtatgttttaaccctgtaaatatacttgacaagccctataaaactcctatataatgttgagttcacaaaataccttcttatatatttttttaatattaggttgaattgtaattttgatctccttaattatttaatttgtaattttgatgtccttgtttataattgtaacatttgacctcttagttttataaaattgtaattttggagcgtgatagattattaactaataattgtgattattaaagatattaaattaaaaaactatcaatcattaaaaagttaataaaagacaaaaacaaaactatacgacttttaaacgttagagaacaaaataaaaaatatataaattaataattaaaattatatttattaaattatttaacaatcttttattaactttttaatgattaatagcattaataagcataaattttagtttattaataatcgcattttatacttcccagttaaaatatggtctcacctatggcctcatctatattttttcgttcttttgatttcatattattttacttcaatgcccaactcaaacttataacaaaaattccatttatacaaacatcctatttcgattattattattttctaaaaaaacacaattttttattttaccaaccttacaaaactaccaatcaattaaaaaatcctttaatatttttatcattcacttttcataataatttacatcaactcaaactcaaatgaacttataacacaactttcattaatatgcatttacctaatcaattaatataatttatattattattattattttatggaaaaacacaaaattctaaaatcacaaccttacaaaattacaacatcattaattgtattaattacttaacatcaatatatgatatttttcaaataaattaaatatttttcttttcattttttttctttgctattcctctttttcaacaattatcataattttccaataaaacttaaaccatcaacttttttttctaaccccagtcttttaataacctcttaatatttttgcgctgttgttcgtttgctccctccatttgaagacacaaagaatatggtcaatattggaatctgacgcaaatagactaaattcatgtgcaccatagggtgcattcaacgaggtgtagcagactgtgttatgtctaacttaaataaaaaataaaaaaaaatgagggtaccaattctagggcaatatgaaaagcgaagatgcaaatctaatggtcctccttactttcgtattatacgaaacatgattacctttaacatgctagacccgtcttcctatatacagaatcatcgatgctttgatattaaattgaagaatttaatgagtttgtctaagtcatacttagtaacgtgctttgttttgagtactccattattatgcatttatagcaaaaagtccacactccactctcttcaattcatggatgtttatccaacattgcaagttgtcgttgacgtttgcctagggctagaggttagcttttttggatggctcttggcattcaaaccaaatctgcaacccgtgatccttagtaattatcaataatcgctcctacaattttagcaactagtaccagtagtatttgtttttaaagccaaacctcttactattataagaaagaaaaaagtaactaactaactcaaaatgaaattattttttagaactaatttatagtataagaatttgttttgacaggcactcttttttaaacatttggataattattaatatcttataaaaaaatggatctaatatgtacatatagatgttcgtttcctggaaattctcaagcgcatattagttttgaggtaaaatttgctgtgcaaaaaattatttaaaagttagtatttttcttctaatctaacttttttcatatatattttttttctccttttttagtttccatttccccttcgttttgctagatctaaaggtatgtaattatagggattgttgacttatttaattaatggtcgcaaaaattttcaagtttaaatgtttataataaaataaaataaaataaattttagttaaaagaagattgtacaccatacaattagttaagagtaaattataaagtactagctagtaatataattttatatgaatagggatcgttgacttatttagttaatgatcggtaccaaaacttttcaaatttaaaaataaattaaattataatttatttaagataagtttgtaccaaacaaagtttaattaagagtataagaaaaaatgattatatactaaattttatacaattatccaatcataatctaatgtgtctattaagtttgttgaattttaaaataattcaaataattacttatggttacatgatcatgatattataaaaatatttgacattattactgtattaacattaaactccaagatgaaatataaagtataaactaatataattttataaatattgtaactcctcacaggatcctaacacttggcattggaaaatggttttgggagcttccacatcagtcgacgttattgtgttcactgttcaaggcaattctgcgtcaatcaagccaccaatgaacatcctcatctccaacggctagtattttgaaagaaagaccaaatcagacttcataacgtccagcaaaatccaagctaaagagtatatatatttggtatgagaaaataaataatataaatgaaaataaaaagtggcaataagtgagaaataaaatgataataatttgagttgtttagttaaagaaaaatagaaaaaaaaattagtataaataaataaaaaataattcaaatgaatcgcaccattttaaaacttattttcgcactttccttcaaagttcccttcaaagtgcagtaagccaaatccaaactctgattgtatatctctagcaaaaataacggaactctgtttgtatatataatttgtccattctccataaaaaatagttacttaaaaatagtaaaatacgtaccaactctgtttttttagtgatttactctgcatttttatttttaaagttcttattttaaattttaataaaagttgggtcaaatataggcacacgtttttataatgtgacatatcatttatattttaatttctttttaatttaaatttatttttcttaaattaaatataaatactctttataattttagttttcttatttgtattttttaaattttatatacaatataaaacacacacacacgtattataatttatatgtttaaaaactatttttcttttcttgatgccgtgaattccattttttttttaattaaagtaaaccttttaattttctacccagttaatttatactggaaatatatatatatatatatatataattataaattttacatgcattaacgatagccgtaaaatatagaaaacccttgccaatttgacttctaagtttattttgtcatcaattatttgtattaatttttttaccagaaatgttaaagcaaacagtttgttgtgaaagttatcttaatcattttggaagaaacattcacaaggagaatcgatcagccaacaacatatatactattattcactataattaaataagcaatcttccaaaactttacgacaaattacacctgtacttgtgaacccatgaacatttagcatatatgaatatgtaagagaaagagagaaaacttaagactcttatgccttaaaaggagtaacacattcgaagaacattgaatatggtttaatagccactaccctctggaccatgttcattgttcagagatcatatctgagctaagcgttggatatcaacagggtaagcatctgatgcagattgaacactgtaagctctctgagccacaacaacattgccagcttcagtaggatgaaaagcatcccaaaacaagtactctctcctgttttggcatggtgtttgcattggaagacatgtaatttgaccattgttccttcctaccccacagcacccagcatttgtaacactgaaacctgaagattgattcatgtcaacagaactttgtgagttaatattatttgatgctaaaaaaaagtgacaaaaatcatgactacaaaataaaatgcattggtttgaaaataattaccataggctgaagggttgcttataatatcttgaaagatgccataagagttaatgtagatgactcttgcatcaggcagctggttgttgaattggtcagtgagacctttcagtttgttgttgaatatttgatttgcagaattgatcttttccacacatgttttaccatctgggctgttttgggccaattcatttgggctgcaacctatttggcctattccaaacaacaccattttccttgctccataattgtacaaagactgaatgacaaacacaaacagtcaatatttcaatttgtggagctagctagcttttcaattttcaatttcattcctgactttattgtaattgaaaattaaatggctattttgaacactgcatgttactactatattataatagaaaaattgatgatggtgaatatcaaatggtaaaagacagagagctaaagactaacttttagttgttcagtatatgcttgaataagaacatcagcatactcatctggtgagtactgcctgctgctggaatagaattgaggcatgaaatagttgttgaggtaatcattgctacccaacccaattgagtatatgcacttgctcaagtaatttgcagctgagtcctcacttcccagtaaatttaccacttgagacaccgtgttttggtaattttgcacctgcccactaaaactaatacgccctccctacaaaacatatgaacaactttagaacataaataccttaacaaatgaagattaaaaacagtgatgttgcatgaagcaaaaggaaactataaatgggtaccagttgctgcccagtttcctctctaattccagcagcagcagatgcataattgactcctttgagtatagcatcgccactagcatcagcatatggaggtatgtaatcatcgaatcccaaaagttcagctgttaaatttcaacaagttaaaacactagtgaaacctttctatgggcatatacttacaagaatcaatttatgttccagatctgcttttctcttgtacttgtttgtttttaccaaatcagttcttctggtaagtaaccatctggcagtaaatttttcctgtttctttctttatctgtaattctacaattgtacctctttgtcaatgaaataaactacacaacactctagtcttaaattgcatattgaatgcggcaaacagatccatgtgaatggaatttaaggatcagtcacaagcctttatgaggggtatctaactcagagtagtgccaactctagtgtcaaaagtcttgctttttttcaatgacatctgcatgtgactccttttttaatttttttatttcaccggtaaaaatattaatgcatctttccttctaggtggtgaacatttattgtctgattatagcataatacagcttgtcatccaatagaaaattatgcatgcatatattaagatgcttttagttgcagttaattgataggttcaaagatagggaagaagaaaaacagatcttagaaccattttgatgccattgactcactataactatgatttttacaatgatgaattgatgattattataagtgcatgcatgtgaatctagttttaagaccatgcaaagatgcaaacgagtatatatttcaactaaaatgccgacatgcaaagtttataagccaattaagcaagtgcaagctcaccaattgcatcaacagtggttttcccattggaaaaccttccagaaggtccatcagggaagtcaatcccataaggcaagtaatcagccctagccaaagattggagctggttgttgttcccattatcaaccaaagaatcaccaaaaatgaagtagcatggcacttgtggtgcaccttgaacaccactccacaaaccaagagaaacaacaacaatgagtgccaacatgcttattgtgagattcaaagctgccattggagcaagaaacggtgttgcttgtgaggaattgaagtgaataatctaggtagctaaggaagataggggcatgtgtgagtgattgaatgtggaaggtttgacacgagtataagtatatatagtagtagagagataaggctctatactagtagtagtctatagtgtaccttttacggttgggagtgttagttaggtgcattaaatggacgcggatataatgtgagattgaatgaaatggctccattactaattaccaccccaccacctcggatctatcttggagaggggtgggccaatgcatcatctcatttcaataaaatcattaatatttattcaaagatattatattttacacctcctaattttataatttgtattccctaattttatatatttgaacttttttacctgttcacatgtaagaataagtaaatatatcatcttattttgataaaaagtgcacacatatttatcttaaaattttatattttatatcttttattttcgtgtttgaacgtaactatttcatatgataataataattattaattttttattttttaaataaattgtcccactgtcccatattcctatatccaccaccgatcccatctcattgatgaaatcttatcactgatgttatccaactttaatgtagacttgcatcttgtagggatggaaatttggacattacaacgactggttaaaacacttaggtatgatacgacaatttttatacttttgttttgagtttttcctgaatgttaaagtttagcttagtatgggaatttcaaaaattattttctggaatttaataagtctggaaattggttttcaactatgtttcttactggtttcaaaaattaagtttcttactgaaatttttctatgagaaagggtggaaattcaagatttatgcaaaacagaaaaagttttttttccataattatgtctttcatttctgaaaatattttagacatattaaatatatacatataaattataacagtcttttagaattttcttactaaatattataattttcaagaaacatgattttttttagtttattacgtagtacataatattttagaaatactacgtacatatataatattttggacatctatatacttgattttgccgtgttcaacagaacgagctccaccgcacgacgacctctatagatctagatgccacatcgtctccctatatgtatccatagcaaactcgccacaactgtccaaccatttgaagttcatgcccaagaaagaagagaaagataatagtattaacaagttaatatatatatatatataatcactactataaaactgtattttacgagtcaaatcatctcaaaaacctcttaaaataaaatgcagcgaaaattttgtaaataggagcgcacaaaacaatgacggttttacgaaaaccgtcgtagtatgcgcgctgaatttactccttcgtcctcaacttaacacgcattcactcactcaccctcatcgtggttgccctcactcagctcgtgctcgtgctcgtgctcatgccttccctcattgttgccgccgtcgaaggtgtcaccattgtccctaaatcgcttcctctatcttgtcccttccttctctctctccctctccccaaatacctcctctctctatctccacgtgccgccgcaccttcgccatctgcgccgtatcccaaaacggcgccgaaaccgtccccgtacactacgacttcgacctcttcaccatcggcgccgacagtgacgacgtcctagccgctagctttgctgccaactacgttgcttccgtcgccatctacgagcttcctttctccattatctcctctaaaataaccgaaggcgtcggcgaaacgtgagtttctgattttcaatgtttttcagtttcgctttttattgaactagggtttataattgtgtaggctagtgaagcagagtttcatgtttctgaagattggttaggtagggtacaggctaaccaagctttttcaacaagctaatttgtagaagctcatttgtttgatatattctaactgatggtataataaccttggtgaaaaaaaaaataaattactgtagcagttactgtagcccacgcctggggcgtgggaatccatgcctggagcgtgggaagtgctccagaaagccatttttggctggaaacccacgcctggagcgtgggaagccacgctggaagcgtgggaggcacgggagaggcctataaaaggccattctatgcgatttttgggggaaaaccccctttctccttcttcctctggcccaggcagccattgaagggcatgggaagctccataacttcatcacacctcatctaaacacctccaaatcactaataaacatgagagaaccttgtgagagctaagttccagccaagatttgagagaaaccccaattcctgaggttctttagagagaaagctgagcttgagaagagaagaaggcgcttcttggatgttggagctgggagaagggattctccggccttcttcaacagttttgaggtaagaaactcaactttcaccgtttaatttgtgatttggataatggggtgaatagtaaccaaattgtgatagggctggaattaggcttaggttctttagggagatgtagtcaggaggttgttctgagccacatggcatgttgaatctgagattgtgatgaagcttgagtttggctctgggacgagagaagtgggtgtgaatgagctatgttatggcctgaattaacttaaatacctttacaaaagtcattcataaggccaaataaacggtgaatatgtattaatatgtttgatttggccatgtttggtatttgaggaattatgaatgaatagaccattaaattgactgatgcagagtcttaccaagactctaagaccatggtcaggctgagaataatcctgttgaggatctgtaagggggcctatacagtgattaggctgataaccttaagatagacgattgagggattgtagggaaagaatcaggcttcctttcatttcaacggtcgagtaccgttgttagatacctggtatagtgttctgatgtgactgtgctgcatgatttgaataggacaaggcacgacaatgtcagcagcatggactagccagatgaagatagaggataaagcatggtcataccaggtaagttcagtgtttcttggggtgattcctctgcttgggggtcactatttactgaattatgtgtcgtacggtgaatatgaacactaggttagtgttctgatttcttattagatatcattatatgactgttgatgaggatcctagcactgtgatggtgttaggcatgatattgttggtcttataggcgtataagacatgtatgtgtgatagctagtgtagttaaacactaggatagaggattaagctgtattgggtataagagatataccctgatgttctagtgatgaaatgaacactgtgttggtgttcggtgcctgatgataagctaacactgcgagagtgttatgcttatattgttgatagttctgtatgacatgccagacaccttgatgatgtatgattatgattatgttagtaaaacactgtgatggtgttatgatgtgtggttaaggaatgccattatggcatattggtattgatgtagattgacactgtgagagtgtcatgctttgtattgattatattagcataatgtatgctgtgttggattttgattgatgataatgatactgtgtgttatgattgcatgagcattctctggccagagaatagtggactatggaccccattgggaatgtgcccttaagtggatgatctcccttgggataatccataggcgtccatgtaaaccctgagtagatgtgcctttaagtagatgatcctattcaggtattgggcggcaagtcctgagtagatgtgcctttcagtagatgatcctactcgggcctgagtcctgaatagatgtgcccttaagtggatgatcctattcaggtcctcagtgtgaaagtcctgagttgagagatttctcaggcattgtgtgtgaaagtcctgagttgagagattcctcaggcattgtgtgtggaagccctgagttgagagattcctcaggcattgttagagttcagtgaggttctgggggaattgtgtttatcagatgatggccccaggcgtgggactaagttccagagaacttattccctggatatgtgtgacacctatgatgaatacatatagacatgagatgagataagggcacaggccttgttaggcacccataatatttagtatgggagaaatgcttgatagtgaaccagggggaggtaagacctccaagaaccccgggcttactgagattttatctcaccccgtgtggggtttatgttgcaggtgcgtagaatagaggatagatccctggggagaaaccagtggagtcaagcagggtaactgtttggattagcatctgtgagcttggagctccctgtggcgtatacatagtgaggtagtttctgtctcctgtcatatctatattgatatggttgttatctgcccggttcttagttagttttgtttatctggatcaataagggctagttatagttatattgtgatactttattatgtctctgttacatgctatacataatgtatcaagaaatacgattcttacatgcttccgcagcttattttatgagattctgatattataatgatgttaacacactgggtgcacacggggtgttacagatggcattctatcattggttctgcttattcttaatagtttttaatttaatagttccccacttcccctacatctcttttgctatgctactagtcaattgttcaggaacctcattgaattgtaaatttatatatccatattaaagtaaagagctattatggtgaaagcacgttgttcccaacttctattttatttattttaacatgtcctgcatatcagaattggtttctgatataacataataacattatttgatccatttagtttatctactgggaagggcttttggggtggtagtttgtatattatgtatatccctctaatcccatatatattttccaacttttctgcacttgataactcttgaaacaatgcttcgggtgtatgaaacacatgcccgactggcactggaatttggggacctgtttgagtataatcaggtttgttctgtatattttttgaagaaaagagacttttatgttttaattcattttagtctttgattacttttttgtacttgtttttgcttgttatgattctgtttcttcttttttttcctgagatcaaggattaatatacttcattaaaggcagtcaatgctatgaagtagtgaattataattttaatcaacgagtaaactttggtcccatctttgcttgttttggaaataggaatcatagaagttgaggatgttattaaccttgtaattggactttagatattgaagctatttgtgtgaatgtagtgtcaatctcagttgcaaactctttatgccgaaggcattgaggggtccgatatggattttgctgcttaaaacttgctttgtgtcataatgcattcaaataataataaagatcttgtagcaaggttagccttacatgcttgcttgattcttttttcaaaaaaactattagagctgaattatgtcatgtgattcatctatctgaatttcgtgatattattgttaaaatcttcattattgaaagttaccagattgagtcattttggagttatattcccagaaacatgctttgataattgtattatgtttcaccatcagaatattgtgctaatattattataatctgcactgttggaattttctagtttgggtcctttgggagttcagttccctgaaaaatacgttgataatttggaacatgttattaagaatttagaaaatggtttgtgagggaaaggctcatatcaggtcctgataagcaaacacaaaacgggatcaatatatatcaagtctttcaatggctatacgtaaatatatttccttgaattattgtgataatagtttaatgatatagtctcaaatattttgtcatgttatcatagaatgtcacgaatttgaatgtttagtgtttgtcaataccaggttatctcacgaagcaaagaaggatgaagctgtaaaacatgcccttgccattcgtgctgctgtaacttcagcaaattatattgcattctttagactgtacaaaacagctcctaacttaaacacctgccttatgggtgagtatttttaattaactggtttttgtagcttgttggtaacacgtaacatatatgttaagggggataaaatgaaatgaattttttaatatccacagatctctatgttgaaaagatgcgttataaggctgtgaactgcatgtgccggtcatatcgcccaactctacatgtttcatacatttctcaggttcttgggttttcaactggcctggccacaaatggagcaagtgatgagagagacacagatgcattggaagagtgttcagaatggttaaaagcacatgggaccaacataattactgataacaatggagatatgttgctagatacaaaagtatgtttgatctctatcttttgtattcattgtcctgtaggtgctaatttgctctgtgaattagttaaccgttagttaacccatacaaatctagaattccctagttactagtcaactttaacaagtgttttcttaacctggttaatggttgtggattggtgatttaatgagaaatgtttaattttgcaggtttcatcatctactctgtttgtgccagagccagaggatgttgttggtgttgctacctgtcagaatatatcacttataaaacatgtatgcaaccatggatgatacagatattgaattgttacagcttaataaaccttcttcacattcgaattgtgaactatgtctgcagattagagattttgtttcagaacaaatgtctgtaagaggtattgaattccataccgaggagtctccccaagctatcacaaagtcagctgatggcaaattctctttaaagaaaccagcgggtgcctcaaggtaaggatggagttttgtttcttaaaagagttaggcacatactgcatttaattttttaatggtgaataagggcttcgtttgagaagaaatgctgttttcatctctagttcgccacttgttattatgatctcatagtcgttgttaatggcagtgcattgtgtatagtaaacttggaaaccacttttgttttgagaactccatggtattcaaatcttcccacattaattgtcttctatatatttatatctataacatgtatattggagtccaagtaatgtaaaagatataaagaaaagtgaaagtgcgtgatatatactcgtaaaatatacgaagtatatcattatactaattcttcagtatcttaaatatttttagactctttggtaaaaataaaaaataaaaaattaggtattaagattgtctgcataatatagaagattataaatttatactaacaatataatatattatattgatagtataattaatgataacatatattaatatatgtttatctgatatatatgttattattattattatttgtaatatttacactaggactatatataatttctgttacataaaaaatatagcaataaaaaacttaatgcgaaatcgttaatatatgatttcacaacaacaaaaaaatcattaaatatatgatacttttataaaattgtgatattaatttttcaatacaaaataatgtaatatacattttacataaatgcactactactaccaaaaaaaagaagctctttcatctaaaattttagaaagttaacataaaatatattaaatattaaaaaaatattaattcattttagctgatacaattaattaaatggactcataactattagtttactttaacaagtttcaattattatttactttgattttttaataattttatatgcatgttattaatttgtattttttatattttatagtggtttggtgatagaacaccattaggcatgaagaacataaaaaaaaaaaaaaaaaactgaaagaaattggcaacctactttttagaagttaaaaacaaattatttagaggatataagaggaatttatatattggataaatgtttattgtaaatattataatcacttaataatttattgacaattatttgagcataaatatatttatttattacaatttgtttagatctagttttttgaatttgcaagttaaatttgttgtaaaataaaataaacattaaaaaaaataaataacattgatttctagaaaatcatcttaaaatatctattttgtaataagattttttgaaaaatcatctttaaatcttcatgttttttaaaattttaaaaaaactaacacagacaatttctaaaaaacattaatgtaaaaatcgagattttaaggcgatttaaaatttttatgaaaattgttaattttttatgcagatccaatattaaataactgtctttgaaagacttttttttataataatgaataagggtgaaccagtattttaagtaataatatttttctttatttttattttttaaaaccttatcattttattatccctctatttctgtcatatttttcttcaatcaaataatctctttaatttctcttctcatctttttctttttttcgttctctccttttaatttcatcctcacaactaaatgaccccttaatgaacacttaggagatcagcaactgaattatacgctggagcaaacaatgaattaatgaagtgagatgttggtatttgattttgacagaatagatgtattttattttagtgactgaaaatatatgtacgtgttaataatgtctacttggatgccttgcatatcatcgtagtcatctcgtattaattaaataattggtcatgcgaatggcaagtgagttacaaatgaaaattactgtcaagttaacgagagagtaattaaaacgtagaaaaatgctagaaatacttgtttttctgacagcaatatttgatctgagtttatgcaaagatatggatatgaatgcgttgtaaaatgattagatcatctcaaaaccacagatataaactttttaacttataaattataatcgaaaattcataaaaaaaaataaaaattatatcccatatatcaatcattagatggaagtgcatcctacatgcagttattttatggaatcctgaggatacgtttccggcattacgttggagatatctacatgaaagtaaatgtcaattaattattgtgaataaaagaaagatcgactgcctattattacctcaaacatgcactagaggatattgaaggacgtatttcaccccagatttaactagcaataactaaaattaaataaataaataaattttaggccaaaatataagaattgctcttaagaaataatttttataacataatttatttctatattataactttgattttttaatttcaaagaaaagtgttactgttttgtacagcttagcacatagatcaataaatatataactatttcaatttatccaattattttaacttttttttaatacataacttaaatatttataaaatcagagttatctaaagaattataagattgatcaagtggttgaggaaaaagaggagaaagaaattatggacttgaatttttcactaacaaaaattaatagaattaatatttatgtattaataatatataaaattattttatattgtcattgatattgctgtatagcctttttttttttctcaaattaacagactaacaaacatccacagataaaaagaatcagaatcacccaccagattaattgacatgaactatggcatgcatgcatgcatgcagcagctagggtaggaacagcatctacaaattaacgactatcaatccggtctttccaatcaatgaactggttactagtgattatggcccagcggcacatgctcagaataagcatgtctttttctcgatcctgacctaccccttttgggtttcatgcatgagatggtaatttggaaagctggaatgatcaaattataaatatgcccccttttatttgtctccttcattgtccctctacacataactttatgacacggaacgaaaaagacaacgatttgatatataagcatgtcttaataaattataaaatcacttaattttttttatttaagactctcaatattaaaaaaattctatatattatgactcaactaatttaaacagtcattaaggttaatcatatttttaaatagaataaaaccgttttttggtggattaaatataataaaacatatgacgacgactgatcaaattaattgtgactaccttttcagtgctaatgtgatcgtctaataaaaagacaagcaaaatattagcgacaacttgttattaattagcattcgataacacttatttaaagttttttttttattctaacagtttgatccattctatgaaatcatatcacccatgaaggttgttaattaagattcttctatctagcaacaccttaattaatatggcataaccttaaaagtttgttaaggattagattcaaaggggaaaatgatttatgatgaataccttgacaatcaaagacaggaaacagaataataactgacatttttttattagccaaaagagatttatttataaggtaccggcaaacgcccaaaaaatgatgatgatttacaaagacctaccccctgcacatacattcactagcttagcaattcaactcgaccaattgtttgtattcccaagctcataaatatccaacccgagacatcaacatatcgcataacgcatgttgatattcatccaacaccagtttagacccgattgaagccatctgatctcattttcctccccattacaataattcccatccatcataaatattgtagacaagacaaaggatttgaataccactcagaataagagaaatgaaaagctttaagtttagcctccaaccatgaccaagactttatattttattaactccatgacagaaatccaagtcaagtaattgacagcggaagatgatgttgtttctatggcaccataataacggacataatgcaagggggaattgaaaataagctttaaaaattctttaaaaatccagaattttttgagatgaataatcgaattcgatcatgaaattgtaagacgtggacaaatttgtttctaaaagataaaaatttaaatttagtctctaaatgtgtaaaaagtgtaataaattagtccaataaataatttaataataaattaattcctaaactttataatctaatgtcaaattgatcctaaaaaatataatttattattaaattggtctttaaatattataacttaatgataaaataattttacaaatttaacatcatgattaataacttgacgcactttttacatatttaggaattaaatttatattttttatttttcatttttcatagattaatttattatctcattacatttttaaagataaatttgactttttttttataatggtaaaagtgaattttaaactactagtacactagcttattaaatggatactttcaccccctaactttaggacgacaagtgctctcaagagtcaagatataaatttggtctgcggaagccatgcaataccgtgtagctaattaactattcctatatacagcatcataaatgctagtgggtcgaagaatttaatgagtttgtctaagtcatacttagtaacgtgctttgttttgagtacttcattattatgcatttatagcaaaaagtccacactccactctcttcaattcatggatgtttatccaacattgcaagttgtcgttgacgtttgcctagggctagaggttagctttttggatggcttttggcattcaaacccaatctgcaaccgtcatccttagtaatgatcaataatcgctcctacagttttaacaactggtactagtactagtagtaatattttttttaagccaaacctcttactattataagaaagaaaaaaagtaactaactaactaactcaaaatgaaattatttttaagaactaatttatagtataaggatttgtttcgacatgaactctttttaaacatttgaataattattaatatcttataaaaaaaatggatcttatatatacatatatatgttcgtttcctggaaattctcaagcgcatcttagttttgaggtaaaatttgctatgataaaaaattatttaaaagttagtaattttcttctaatataactttttcatattttttcttctccttttttagtttccatttccccttcgttttgctagatctaaaggtatgtaattatagggattgttgacttatttaattaatggtcggtaccaaaattttcaaatttaaatgtttaaaataaaataaaatgatttttatttaaaagaagttgtacatcatacaattagttaagagtaaattataaagtactagctagtaatataattttatatgaatatggatcgttgacttatttagttaacaatcggtaccaaaacttttcaaatttaaaaaaaaaatagaatttatttaagataagtttgtagcaaacaaagtttaagttaagagtaagagaaaaatgattatacagtcatctcatctaatcacaattcaacaatattaattttattgacttttaaaataattattttaaaataattgaagcgattagatgatagtgtaaaaattttatagtatattgacattaaattctaagagtaaatcataaagtataaactaatataattttatttgaatagtttatctaattaatacttttaaaagatgtgaaactgctttggctagcgaactaacaatatatagtactatttcttacctaatgtctaatattcagcacggggatagaagaattagtgtttgatattttcctgtatttattgactgtatcatccccccaaaaaatactacaatagtactataatattgcaagaaaacgtatggtgcagtaagatgcttggaggttgtcactgaattgaaagcatcctgcatgttgaattacgtttgttatttcatgaatatgcacggaaaaacccacatggcagtgacaattaagcagaaattttctttatatagtacgggatacttttatcagaattaaaaattcccccctctttgagaattgttctacattaatttgatcacattcgcttaaaagttttttaatattttttctgaaagaagtgtcccagctgtgaatcttgatgttgatcgaatcatgagccatgacaacgaatagcactcattagcatgtgattacaggctgactcggttgtttcataaataatccatctgcctttatgtgtgtttcccttttttgcaaatctctaagactattcgaataagacatgcatggtctccccattttttgagatgtaaaccagacatgttcaaatatggaacactcaagtaaaaaaatgatagtttcttttttaacaagtaaaaatggaagacattgtcataagatttgtaaacatcatgatcaatcaattgaattatattctcaactaaaaaaaataatcttttatttataagaatcaatgacaatgtcataaaaaatttataataattcacacatctttattcaatcagttagatcttcttcggacaaaaaaaatttaatgactaaggagacatgtattatctattttataagtttacattcaaaatttgagttaatatttacgttatacattactttactgatatttaaacacataacacactttgacttataaaccccataggattagtattagagtggagtaagacaaaatcttcttgtatatgaatatgataattaagaagtttcttgctaatagctatgtagtatatgaatgttcttttgcatgtatttcatgggtatgaaccaccacatgggcgtaataatgagccattgcccaggggaaatgtgctgtaacgttttcttcagcaatgctaggctgttatacgcgcgtggtccaacacaaactgttaaagcctaaattaaatcctaatcgtctctagtctttaatgttcggtataatgtctcttgacttttgtttcccttggaagatttgaactacgcgttccatcatagaatgtcgcatcctggtggcaatagacttattttattcatatagccttttactattctttatgaatagtaatggcaaaagttacaataatactatcataactttaacctagaattcttctataaaaaaacactgacctagaattccgccataatattgggccaatgaggttctttgtttttacagagccgatgagtttcaagatcaataaattaggttattagttgactttagaaaaagtaaaaaattgatttcacaattattaagaaaattaattaatttcattaaattatattatttttaattaaaaaataatttttttaaactactcccattggaacttgatatatctcattaaacgaaggaaaagtagtaaaagagaacaaaaaaaattgtgtttttgtttataaaagagaatggaagagacatataagaacattaatgatttttagcttgatatctgatttttactaaatcttctaataaaggagttgaagaaatctctaatatggataatgagttattataaaaaatctcttaaaatctgcatattattccaaaaagaataaattttatttcttttttaatcttcctaaaatctcaaaataaaaataccattaaagaaaaaaatggaagaaatcttgaaatttttttaatcatatatgacattatgggatctaccaaaaaatagtcaaagatcctaattggatatctactactaaaaatactctaatacttgttataaataaaatttcacctaaattttacaaatgtatattaaatttcagtttaaatcaaatttatatctctttaggttaaaaaacgggtacatgactccctctaactactatcagtactttgcggtgtctgaccacaattctttttgttgggactctgatccctctttttgctcccattaattactatgaccgcaatttcaatgggcttcttaaatacagattttgctgaccttccatgagtttcggcctgttccttctatgttctgttattgttctttctcttttttctataaatttgggttgggttttgatagagtatctttagactaaagggtatcaacatagtgaaatctgcttcctacaccattttcgtaatggtggaatatccaaaatatttttcgagttatgcttcatacatattcgcataataagtttttttttttatggtctcgaacctgcgaccttcacgttattaatacgatgctccaattaactgagttaatagactaattatgttgatacatataacactaaattttttaatatatatatttaatatacatataattttatataataaatttgtaacaattaattttaatctaataattaatttatagtttaacttatctataaattttgttttgtaacatatattgttacgaaataatttatagtttaatcgcatgtttgataaattaattattagataaattaaactataaattaattattagatcaaaattaattgttacaaagtctattatgtaaaattatatgtgtattaaatatacattaaaaaatttagtgttatatgtatcaacattaattattttttaatataattgacctattagctcatttggttgtatgaattatgcggatccgtatgaagcataacacgaaaaatatcttaaataacagcacaagtaatccaacaaaaaataaaagagagaacgtgtgtgtttgttttaagactcttgaaatcttcccctttttattttcaaaacttgttttcaacatatttttatattaaaaaaatatgtatagattttaaaaacaaaacaaaagaaaattttatttgttaatttctttttcagaaaacagattttaaaaagaattgtataagataacaatatatgtcaattacataatcattattacatatctgacatttaacaacatttttttgtctaatatttattaaaaatgttactaattttttttggcaacattcaaaaaatattgtcaaattatcaatgtatgttactaatatgtttttgcaacattttatcaaatgttgtatagctcatattgctaaaacctaaaaatttcacaaaaagactttagcaatatggactatatgcaacatctaataaaatgtcacaaaaacatattaataatatttttttcataatttgacaacattttttgaatgttgtcaaaggttttaaacaaaatttttattaagtgttagacaaaaaaaggttgttaaagatcatatatgtagtagtgattatacaagatcaaaagggttctttatttattacaataaagcatcaaacttaaaactaaaactacaaaattaaattataaatctaattggcatgcatgcaattgatctttttctaagagttcaagttcttttaaggccttatgttcaaagtagagaatgaactctttgtttaagtgagtaatgacttcagtgtgtcttaatgctcaaacaatggcataaaattcattgtcatgcataaaatacttaaatttgtcatcattatataattaagtttctcataaaaaagaaaaatataagattggtctagtagttaaaaaagagatgaaagaagaaagaagaaagcaaagatcacgagtttgaatctctcaactaatatttctaaaactataaactaacatttgtcgataaaaaaaaaaagtttctcatgaaaaatatgccatgacataaaactcattgccatactaaaaaagaaaaacacttatagcttcatttccctcttatcttggtcaactttaccaagtagcaagggtgcttacttgattttcaactcatcttttataaagaagcaattgtttgcataattgttatacaatgctcgatagtcttattgctcaagtctcccaagaagatgacatgcatcaaaggaaataacatcacatcctatatgattctatgatatttccaagcagatgaaaaatatacaatataacatttagaaacttttaccttactttctttgttatgtcattgaaacttgtatggaagtggatgtttttgtgttgataacttattcaccatgtagttttatactacattttcacaccctttgtttattgtaatactagtatggtaccaaattcaatctatagtagaatatttacaaaaagataaaatttgaatttcaaattgcacccacaaatgatataaatactaccgttgcaatagctttacttacatcaattgcatatttctacatgaatctttcaaaaaaaggactagcttattttaataaatacatccaaccaacccaatccttttaccgactaacatctcagaaaatttcacaaactcttatctcttagtttttgacattttggaaatatattagctgatgaattagtaaatgttgttcttgtttctttagtacctttagtagttcctatacatctcatgctccttggattattcacaagcggtattcaagctctcatttttactactttagttgcagcttatatagataaatccatggaagtagaagaagctctggtgggatcctcacgtatagaaaaagattgtagttagtttgataaggatcgagtgacattgcttctttgatccgaaccaaggaatctcttaaatattattcaagataaatcttattctatcattgatcaaaggtttctctatgaaaaatacgaatcggagtttgaagggggggagtcctcaacccacaacaaatagaggaggatttttcaatcacatagtttggtctcctagaatatggtgcccttaagacttcctatttgaggggttaacttctcacacccagccaatttcccatacacccagccatgaataagggaatttcgaaaatgcccatcttaaaataatgcataaagtgggtgtttcaaattttttcttatacacccagcagaccaaacgctttctttgatcttctcagctccgttctcctccgctccgctgcgcccttcgtcttctccgttcttctcagctccattgactcccatcttgtcgtcattgtcgaatccgtgagttctgcgttttatttttttcatttctgctatggttgatttggatatggaattgttttgatggatacggattcccaattcggtagaagaaatggaccaatccgtaagaagacgtcgtatccgtaaccctatacggattggcaatccgtgaggtaaacaaaaggcttatcttttaaattaatgcatttgttagagccccaatgatttgagatttctctattgggccaagtcatttagggagaagtggatcatttatgataaagaggatgagttttaagagaatgatttagagttcttgcatggcagaaccatgcaataccagacacgagataaatctttcagagattagagcttttttcaaataagccaattcatttgggactcatagattcactctttttcctattaaaagataagccttttgtttatgtgtaaagttagtgaatataataatagtgtgtagtcttttggtaccaaagatgagtagtagcaggtctactgtataaagttgatgtgaagcaaaaacacttcaaaaccaaacatatcttgttgatcaagctagtacttgtctgtacggtaaagaaattgcaagataaattgttttgtatataataatataatgttatatgataaattaatctaataaaaatatgtgaattgatcaaaatatttttcttttaaaatttaaaaaataaaaactaaaagatatattttaatcttatctaaatatataattatttaaaacaaaaaaatgtataagttattattgtgaataagcatgacaaacgcgtgggagatcaggtatatttcaagttagtttgctaagaagttagttagaaatgtttatcaaatcaatgatcattcaatcaatttatacaatgttcttatatgatactcctctactatatttcaaactttatgggtatgatgacattatgtttgtgctagttgtattttttttcaaaccatttcatctcaaatttctaatactaatcaatattggttaacgcttcaaaaccaccactacactccggaggagtattttgtaagctacatcaccagtaatataccaaaaaaatgtgttcgtacccggaaaaaaaactaaaagtattaacggttcattgtttacaacaattcaattttttttaatatcattttttagatattttagtttacaaaagaagtagggatatgtcacttccccaaaaatatattcaagaaacccgaacccgtaggtgcagatcgtctttttatccattttctgaagtagaggtgttgatatatcacaaaaaaaggtgttgataaaatttaatttagatgatcaaatgcattaatttaattttggagatgaacatcacaagggggaaagaagtcagttaaggacgtacgtcttaaaaacttaaaaagaaaaagaaaaattccatattccatataagataatattggggtacccaaaaaaaaaagagatgatattattaaaaaaattcttattataattataattttaatttactagaagttataagagaatataaaccaaattaattaaaatattcaatgaattcctaattatagtaaatgcatagtaatttttttatttatgagaaaaaaaattctagtcaataatcaaccatttatttatgacaaataatatcgtattaaatatttttatgttgacaattgttatcttccgtgatagaaaattttaaattgaaattataattcttaattcaaaatagggtttgggttaagaattgattgcaaaaatctgtgtcataaatacaatattgatttaaatggtcaaataatcattaattatattttcaatcaaatcattatgttcaaatttaagatagtagtatcggttttacgaaataatcattgctttagaaattgtcatgtgtggagttttcttcttcttttttcaaacattttactttttatagaacattttactttttttaatgcaataaaacattttactttgtatatagtaacattttctttaacagtgtatataataacatagaattcaaaaaaaaaaaaaaagtaacatagatagatttgttatcttttacacgtatctttttttttagggattttacacgtatcttaaaacacacccccttcccaaaaaaaacctaaatcataatggacaataattataaaaataaaatataaatcataagggacaattttttaatatcctacgttgatgttcactaattaaatcattctccaatttcaattcattgtattcgcatgcatggctagtctttgattggacgagaatgaatagattaatctaacgcattatactctttaatgtatgctctttcaaatacatgatcttctttttccccttcaagccaattacctcgtctatgccttttatctcttcattgtatgggtaatcttccttgttctatcatggccaccacccttttgatcacttctacaaaaccacggtgtgaaaacaatgtggagttgtggtcagtaatgtgaagcgaaatcatctcacgaaatattctacattcttataattatcaggttacaccctacctgtaatgggcatattttggctttcaaaattttcaacaaaataatgtctcaagtaggtatattttgttgtctgcgttataacttgcttgtgttgcctggtgtcattttatccattattgtaaatgatttatttatttaacacatgaaattttgcaaaatctgctataggcatgttaagggtattgttaaagatatgattagatttgctgattatagggatttatttccctctttcccttattatttttatcccttcagaacacacaattccagcaataatactttttttttttgtgctgaccggcaatacttgtttaggtatttttgaaacagtattttgttttggtagtcattcaattgttatgaattttaagtacatttcaatattttgttcacgattcaatttcaggaattttctgatccttgtcttgttatttgtctaatgtgatgagaagcattgcgattatttttatgcctgatggttactttacgcatatatcatcagtatgatttttacttcattgtcaatagagaagttgttttagcctattgagacatacaacattgactaatgacaatacaatacgtggatcaaagcatgcatgtgttagttctctagagtgcattttcccatttggtaagtaatagaaatgtgggaaactggaaaaaatatgtaacaaatgattggagtgtgcaactattcccgtgtttatttgagaatgtgattgagcattatccattgttgaatatttgaaggtaggaaaaataattttaccttttgagtaagaatgctgtctttgtaggaatcaaataagtgaaaagacttaacatggaaaatttcaggccaagcgtatgccagggaacaattataactgcgtccctttaacaccaaggtctagattggaaaggcttctgagggaaagagagctaaggaaatccttcaagcttattcaaccaaccgaggaagcaagagatggcagcaacgagggagaacaattttatggtgattcatgcataagtgagaacgaaatttcgggtattcataaagaggaagagatcacggaaacgaattttacagatagaagccaaaggcaagatgagaggccaagcaaacaacgtttgttggtggtagctaacaggttgcctgtgtctgctgttagggagggtgtggagtcatatcgccttgagatcagtgtaggcgggctagtcagtgcacttctaggcaagaaaattttgtcaccttgcactaattgtttctttggtgtgttttgttaatttatttattgtgaagtttgtaattgcaactcaactttgctaattagttacctttcttgatgatctcatagaggtcacaacaatgatagttatcttcacaacattctaataataatctattacttataggaatagattgaatttttctatttttaaagtgaaggttgtatgaagcttgttgtttttgttgaaggtgttaaggaatttgataccagatggattgggtgggctggtgtgaatgtgccagatgatgttgggcagagagcattgacaaaagctttagctgaaatggtattgactcaaatttataattcacaagcatgtggccactgatcaatgtagtgaataatgataatctagcaactcttctctttgcaataccaaagacacacacaaaccatcagtaattatgcgttgttaactgcagcgatgcataccagtatttcttgatgaggagatagttaatcagtactataatggctactgcaacaacatcttatggcctctgtttcattaccttgggcttccacaagaagatcgacttgctacaactcgtactttccaatcccaatttgacgcatataagaaggcaaaccaaatgtttgctgatgtagtaaataagcattatgagaaaggagatgttgtttggtgccatgattaccacctaatgttccttccaaaatgtttaaaagaatacaatgaaaaaatgaaagttggttggtttctccatacaccctttccttcctcagaaatacataggactctaccgtctagatcagagctgttgagatctgtacttgcagctgacctggtggggtaagttattctcatgcatctccaacttgatgttgattatagtagcaactagtacattcacaagctaaatttctttggtatataggcatcaagggcatgcatttagaacaagctagtccatctttagtcaaaaaattatcttccaccttgaaatttactattcttgcttgttgatggcactatttagtcaataatatcaagtggtatgttgctgcttgctaggatatttgagaactctagacattttgtttaatgttgtgattttaatattttcattggtctgcatcccagattccatacctatgattatgcaaggcattttgttagtgcttgtactcgtattcttgggcttgagggcacacctgaaggagtagaagatcatgggaaactgactcgtgtggctgcggtatatctgcatatattattttccctttctaattctatacatctaattgtgaaactggaatttcatcttgtgttgtatgtttatcagcattgaatagctttacgaatcagtatgcagtatctgatttcattctcatgatgacaatgttttattttttgggagtgtgaaacttcagtttcctattgggattgactctgatagattcattcaagcccttgaactccctgaagtccaagaacacatgaaagaactgaaagaaagatttgcaggccggaaggtaggagccatatacgccaaattttaatgttcaacaatttgagaagttgagattattcctcagttctgttctacatctgcctttctctgaaaatgtgaatcattagaatcactttatgtttcttatcaaatggacaggtaatgttgggtgtcgatcgtcttgatatgataaaaggaattccccaaaaaatcttggcatttgaaaagttccttgaggagaattcacactggcgtgataaagttgtcttgctgcaaattgctgtacctactaggaaagatgttccagaatgtatgttatttctctagaaaagttaattatcacttgaagcattttcatccattgacttagactatgttttatttattttgtttctcgtcttatcatagttattggcgtttttcatgactgacaatattgacttaatgctttggcagatcaaaagcttacaagccaagtgcatgagattgtaggacgcatcaatgggagatttggaacacttacagctgttccaatacatcatctggttggtgttttaaacatctacagcatatatgtgttgtttggtatttgacgatgcaaggatcatgagtgtggatgctatctattatttgggatctcattgaaaatattaaatttctcatgtcactactatatatgagttgatccccgttactacgagatttgaactattcatcatctatatattgtctgtgttctatggattgtccatttgatcattatgttgccaccaaaaagctgtaaattcaatgtctgggttgatctacttaattcaaatttgttattctcaatttgtgttgttagctacattctctgctggctgttttacaaaacatatcattatcacaaacatattcacgatgtctcatttcttcatctctattatttgatcaagtgatataagacaaaagtgcaaaaggaataaaaaagggaataaccattctagcagatgaacaacaaacctactagacagattctcctgaaaattaccaggaaatgaggaaagtcctctgaatcataagtgataaataggagttgcattttatcacatcttattttttacatagcaaccttttgataacaagacttgattgacaagtaaagaaaacatacctatacaaagtactctgatgggattttaattctatcaaaatttccgtaaaattacctccaataacccgataaaattataaaaattctttgcaaaattacaataaatcttcaatagttgatcttcttttgtcctgcatcaccaaggaactttcaacctattctttctagattaccttgatattattcagaatgtggagcttttctattacacaatcacttatctgtgtaatgtggtcaaacgaaaaattatttcccttccatcaaaaattaaagttatatttattttttaaaaatattcaagtaactaccttgactgttctttgcacacactgaccatgcattttgtctcgttgattacacatccttctcttgaattgctaaaattttagggcaaagtaaatacattgctaatcttcccagaagagtgacaaatgaagcgaagtcatatgtttatttatcatacagaaaatatttgttattgttattctgttgaccttgtaatgatttctggaacatctctttctatgattacaggatcgatcacttgactttgatgaattatgtgcactctatgctgtaactggtaatcattttctgctataacatacaagatttagtccatgttgtccttatttattcaaagtaataatattttttatatagaagtagtatcatatttcaccattggattggtgaaatactcaagctgtaggacattctttcttgttattgaaaaagaaatttcattatctttgcagactctttcacttttctttaatatatgttccacgtgatttaagtcctctgcttgtaacatgtacctggctgtaagaataaattgaactgattgatatttatttaccaggagatgaggaaagtcctcaagaatcatatttcttgatttttaattcatcgagaaaagaataattgaagtacaatgacttacagttgtttctttatattcacatttgtaatatacttctgttttatgcttaagatttgacaactattcctgggaatcagaaaatggcaacaggctgcagcatatcttctttataatatattataaaatccatcttaagtagttttattgaactaagtattcagcacccatgatatgtatcataccagtctgactcacatcgtatttagatgtagcacttgttacatctttaagggatggaatgaatcttgtcagctatgaatttgttgcgtgtcaagcatccaagaaaggggttctcattttaagtgaggtaattcagttttttaatgttctcatcatttattttggctgcatctcttggatactctgaatgtatttgagcttcatatttgagaacgtgatttatgttttactaagatcaccaacatttcaaatgattctgccattaagcatagtaatgttgaggtatatgtatttagctattttcataaaacagcaaaacataaaacaaatttactgtcatttaatgaataagactttcctaaccttaactaggtcaagctagcaagtcctaagaattataaacaagtttgtttttcctttatcaccatatattaatctatagcaccgcacatagtctttttttattttatttattttgaagtgtttacgcatcaatggtgttaaagtttttctagtctcaagctcacagtttggcttgttggaaaaagaaaaaaaaaactagcctagttaagctgagacgttcagctttctttttttattttgtaacctgaattgtgtatagtttgttaggcttaactatagagaaaaatcatcagtatgttgtatctgtttcatcaatcatccgcgtcgttgttgagctctgtaatgacaaggtctacttttgatggtaacctggttatgctataatgtgttcataagtatactatggtttcttgaatattgagaaccagaatttgtttttgtcaaaggctaacatttgttgaaagacatatgtcaagagaataagctagggtaacatgaaatgattgcttttgatgcatggaattgtggttgctgatagactgaaatttaaataattataatcatcttcccctatcattatcattctataatccacgatgcaatattgatgtatatttatttttcttttaaattaactatgatgtccgtgttctttatcttatcaccatcattgtgaatgttaaatatacgaaatgatcaatctattcaaaccaatatattttctgttcttagttgttttctatgtacagcccatgagtgctttacaaaaactggaatatttgtgataaagtgacagatagaaaaggatagggttgatactaggcttctagttcaagacttcagtaggaatgtaagatcatactgtagattatattctttataaagttattgtttgtctggaaatatcatcttgtttaaataaaaacaaattcttatatgtccaattattttattatcacataattaactcctaaaatcactaggctttcagtataattcaaataatttagaattctttatttggtatcagtttgcaggtgcagcacagtctcttggtgctggtgctatcttggtaaacccatggaacatcacagaggttgctgcttctattggttatgcgttggaaatgtcagctgatgaaagagaaaaacgacatcagtttaatttcaaacatgttgagactcacacatcacaggaatgggcagcaacttttgtgaggttttaatcgtataacactgcttgcattttgtttttcttggatcaattttgttccatattttatttttcttgtaatatgtaacagtcagtcttacacaagcatattagatcgaccactaaagctagtttgaaatagtgtcaatgggaaaatggagaaaaatggaaattctgtctttgaaatagctatattggtcggtctattgctctagattttgtcctgaccttctatggtggtctgtgccacttatgcttttcatgattatttattctaaaaacaaggttttatttttacagtgaactgaatgataccattgttgaagctcagcttaggacaagacaagttcctccattacttcccaacaaagtggcagttgattgttactcaaaatccaataaccgactaattatactggtaagctgtttgttagatcatcaaacactgaataaagggctgtcgcaaattattcaccctattttgtgcaataagtattaggcttacatttataaatggaaaccaacatgaccttacttatacaagtgcaccgcacgtgtttaagagaaacgcacatgaggacttatttgtttccacttgttttttgtgaataagtgagaagggttgccttctcaccaacttatgtagctccttttcactaaaacaataccattttgcctcatctgcactgcagggtttcaatgccactttgaatgaaccagtggatgcccttggaagggctggtcaaattagagaattggaacttaaattacacccaaatatgaaggaacctttaaagaagttatccgatgatccaaagacaacaatagttgttctgagtgggagcgatcgagcagtcctggacaaagtactatcaagaaaacttcatgtgtttttggattttcagcaacatttgcttttggactaacaactactttatgcagaacttcagtgaatttaacatgtggttagcagcagaaaatgggatgtttttgcgacgtacttcaagtgagtggatgacaaccatgcctgaaaatttaaacatggattgggttgatagtgtgaaggtaaattagctgcatgaatacaagtgtttctcttattaagttcctttagtttcaagtgtgattttttgtgattttttttttcatattttttataaaatttcagcatgtttttgagtattttactgaaagaactccaaggtctcattttgagcttcgggagacgtcagtagtatggaattacaagtatgcaggcatgtgaaaattttctgttaccatcttcccttttaattttcaacctacttatttttttataggactaacatatgtttttatccttaataaatatttaaatttgtttattttttgataaattttttctttatattaagtctttaataaaacaacaatttattttttatcattgtcacttttttttagtctatgataaattagtaaattttggatttatttcttaataaattttttttattaatcttttttcaaaggaactaatatcaaatgagaaaaaattatcagaaaacaaatacaaaattcactaatttatcacgattaaaaaatgtcaatgatcaaaaatcaaatttttattttatcatggaacaaaaataaagaaaaactttattaaaaaaatataaaatttggatatttattgaaagatcacaaacatattttaacacatcatctctttactcccttcccagcaaagtgggagccttctatggttaattgctaacttattgtgactgcaattaacactagatgttgagtttggaaggattcaagcaagagatctgcttcaacatctgtggacagggccaatatcaaatgcatctcttgatgttgtccaaggtggtcgatctgttgaggttcgcacagttggcgtgtcaaaggtataagcaatttcagctggctagtagagtctctcacctatccttttctgttcagaagctttatttcctctacatgctagcacctgactttttttggtatagggagcagctattgatcgtatccttggagagatagttcataacaaaggcatgaagacgccaattgactatgtcttatgcattgggcactttctagccaaggttagtgcactttatttgattttctattcttagttcacttgagactttgttattgttagagtggcagagcactaagaatgactagattgttgccttttggcagtctggtagcaatgatagaacatcaattgataaggtaataaaatataatattgaaaactgaaatcacacacaatacagcagtacacttactttcccaaagacaagtctccggcagagagtacccaaactgcaaataactacacccttcttatttacacaacttactaccaaatatatactcttaatagataactgtcagtagttagttattttatatgcatgcagattctaatatggaactacctccaattcattaagggtcctttcctaaccaacttggatctcagttcccatcacctaaggactcaactgtaaatattagaatgaaatttctaaaggagcattgattttagattgatctacatcagaaaaagttacatttctaagccttctataatgattaaggcaaataatggttggaaatgaactgtttcaggatgaagatgtgtatacattttttgagccagagctcccttctgaatcacctccattaccaagagctatgctatccaaatctaattcttacaggccatcatctctgccaaaattaccagccaccaaaaccgggtcgaaggcagctcaatacaagaaacaacgttcattgtcaaacatagaaaagagagaaattgatcaatggagaccaatgtatagtgataaaatagcattgcatgagggttcctcagtgcttgatctaaaaggtgagaattacttctcttgtgttgttggacggaaaagatcaagtgcacgttatcttcttaaaacctcagatgatgttgtcaacctcttaagtgacttggcagaacattcttcatcaccaacttaacggattgtctttttgttagattgtttttttcttggtaaagtgtctattcatatcatttgattatgcaatgccctacatgtctcttgtgagttgaatgaatctcaaactggcaacgtacttccagcatgtttggaactctcaaaactgtgtttgaaattctaacttaattttgctatataaaaaaattagttgtttgggtgtttcttttagaattgcttttagttttactcatagcacgtttaacagaaagcaacaaaaaaaaatgtagcttttgccttagattgagattttacactaaagtccactgttaacttgcgtaaaatcaaaatatttttaagttggtaaatttttaccaaaacattacaggaattgaatgaaggagtcccactcaatcattttcaaagattggttttaattttaaaaccagatatgatccaaatttaaagtagtttaaattaaatcagtttttttgttttaccccttacgtatttgttttaatgtgagaaatgaaaaatttttaaatatatatattaaaataataaagaataagatggcaaaaacaaatactataattttataacataatacggcgatatgctaattccataccaataaacacttctattcttcaattgatattaataaatgagaatacaaaacatgggggcatacacttattcagtgacatacaaaatttagaaaatggccgcctaaccaaagctttcactgtttaacaatgctcttgaacttttgaactaagttttacactatatgtggtattaaatgaagaaaagatgactaatccctaaatgaatgggtggatacatcaagaatacaatttacagctaccaaagaaaaattaactcaatgcaggtcctggttggggcagaatggtgttcaaaatatgacacaaacctcaatcaagtttagttccccttaaacaactcgaattaattcccatgagctattcttctagtcttggtttgttttggcacatatgcatattggccgaagtccacagtttttattggcctgagttaagacaagcaggacacaaatcatggtgttgatacaaaagtataagggataatgaattccagtttggcagaaatgcattacctattatcagaagtgtttcgaacatctttcagaggagcacggagaccactgacacgagtgccagaagtgcatctaaaggatgatatcacggagacaaatctttccatagacttctcagctatttctgaatactggcccagatgggaaatgtttgtcccaaatttttcttcttcagcattattctctgtaaatggcccgtcaacattgtgatcacagcaacctataatcaagaaacatcagaattcagagaaacttcagcctcagcgagatatttcctttcatgattatttaaaaaacatgcatatattcagtaaagttcatggcagatatctctgctgagcctgaataaaacaaatggaatccgaaactgagaatttactcctttttatcctcgttgaagagtactatgttattcatatactcaaagcacgattttccataaactgagcttttgctaaacatgattttacttttacttttgctaaagtttatggatgtttgaacctctctttgtgatttcctacttttccataagggttaatagttaatacttaatactaataaattgtctatcttacctctccaactcagacaactccacaagtctgtactctttaccttataatactataccaaaagtagtcaatattaaattattaattatgtttaaagataagttacaatttagaaccaataggagcttttcattatccacaaaagtcaaattgcactgaccaaaaatacaaaagtcaaatcgccatgaaaatgaaaccgaaaatgaaatttctaaatgaagaagtagtcaatcagtatgcatagaagcttctgtgggagttgtaaagccacattcttaaaagatgataatgcaataacaacatcagtggtagccaccactttggacagcaagtagaagacaacaaaagcaaagaacataattagtggaatagtaagacaattttagctaacaagtaataattcataccattattatgaggaggtgaagaacagtgcatttgcctgggctgcaaattttcctggagaaagtcatttccatcagtgcatgagtaaaaggagaaagtgttaaagaaaacataaggtccgaagtttaaaaatcctacattttgaatattgtcattaggggagatcttccttttcaggtctttattcttcaaatggttgttacataaatcactgtcagatatggcctttcttctcttgtcaatgacaatgccagaggacaggtgatcttgtttctcatcacaaacattattttctacttgcttgtgctgaaataagcactccttacaattaactttcttgttgcctccctgctctttccttcaactgagtcaaggactatctggtctttattcttcacatcgttgttacataaatcactgtcagataaggcattttttctctcatcaatggcaatgccagatgacaggcaatcttgtttctcgtcacaaacattcttttccacttgcttgtgctgaaaataagcactccttacaattacctttcttgttgcctcctccatggtttttcctttaactgtgtcttggacatttgtgtgcccattcaaccccagacatggtttatgaattggctgcctgggctgtcgcagtactgtatgttcagggcttttcttctcttcacccaccatagacaattcatgcaaacaatgaaatgagtaactaacacatgtaaaggcagtaagggattttcccatccaaagcaaaccagcagatttatatcttaccatgacatggagactctgtaaattcagaaatgtttgtggcagaactatatcgaatctaaagaaagaaggaagaatatgtttaaaaaaatatgtaagtctcactaccaacaatgagtagagttttcactgttatagttcaatattcaggcaacttacatggctattaggaggaggggcactgccccaattctcagagtcaataaccgatgcagtagagttctttgtttcattagcagcagtaggtgacacccgaggagctctgaatttccttttcgcttcaagagaagtaaaacctttcatggctaaggaaaagctactctaaagaagaatagaaaaaaaagctgctagctacaagtggtatgttgtaaagaaacattgagcttaaatgccactgaaattcattgcctcaacttgattgttttaaatgttatatatcttgaatctaaatttttagaaaactggtaactaaagcatcaatagcatcaggcagtatcccagtgaagcatagaattctgccctgcattcatccccgttaaacatgctaaacatattaaaatcaattcaagaagaatgctttgtaggatacaaaagtacttagttaagagattcttctgcacaggcaaatcaatctttttctttgcactttcagaatgagttttgaattgactcgttcccacaattgcaaatctggctgtaagattctctccctgccatttaaaagaaatagatttttaaccaaaagtcccctttaaacaagggtttaattgaaggaccatacacccatgtatacttcttaaatgcttttaacatttattaaaaagaaaggggtgacaatctattcatatttgctcagaacatgtttgtgaaggtgatactaactcccaagaaaaccttgtaccagtactatagcataaggcaaacaaaatctactttatatgtagaatttacacaaactcatgcacatccacgcaaaccaaaggcaacggttatagaacactagcaacagtcttttcagttgttgtcaatcctattcctatcattttcaaaattcatttttttttcacaatcatgcaaattgtccttattccaaaaatgaacaaatgaaataagtcaatttattttgaccaacacatgcaagaaaaacagaggtatttcagtttactataaatttattctttcactttaacaaacacacactttggtatggatgaagataaagaagaaattgatgatgtacctcaaatggcattttggtaattggatcaagatccccttttgctattctttgtgctatatcttttggcatgggtgtatcccaggttaaggtataacttcaagtaagatcttagatgattgaacaaaatggagcagagtgatattaatttaaaatggcaagagaacattaaaatgaaggatatgggcctaaaaagtctaactcatcaccaatatcatcagatatactagacaaatgaacaatattttcattaattggatcataacccgttgatattggaaagtaagtatagctttcttgaatgactcttcataaaagggaggcacagaaactccactatatctcaagtgcttaagaacctgatacattgcaatttgcattagaaatacaaaaatttcatatagaaagatttacatacaagatttataagatatatattgttataaaaaaacacttttaagcatttatgttatgtgtatagatgtagacctggctgcttaagtgagtttaaacagggaaaatgaacattgattgctaaaataacatgcttgttagtttttatggttctgaacagtcatgcttgctaagtgtatcagctgcactcaccttgtcataacttctaaattttttaatgcttgcatgggcccttttgagacccatacctggcaaggactgcagataatcacagccactcaaaatacacatttcaagaacatttgtctgttgaacccttcaaactaagctccttattcttttgtagcatggaatactgaaactgaacaccttgaccaaacttgtccattttaaagataatctaaattttcaaggaagaagcaggccagtcaaaaccagtgagtacgtcaaagtaggaataaatatacactagtatagaaagataacaaaaaacatctatagcttaagccacgtggtaaacttactcttgggcaaccaaacggtataagatcagagtcttcagttataactgcatcaacttgtccacttattgccaagaatgtcatctgggcatctgcctcgtaaggagcaacaatatactgcaagttctcctgcttcaatacctttcaagaaaaacaaggttaaatatttagttggggatttaatgtaattattgtattgaatatattcaaacgaaatacatatgtgatacaccacacacacacacacacttcacaacaaccagaccaacgctgatatattgaactcctttatacctgaattagttcaagtgcaatttgaggtgaaatatcaactgctttctggtagcactcataagcagcagctgaatttccatctgactcatgttcaactgcacgtgcaagattatcctttctagccctgcacttgtagcatagacaatatttgattcatttgcaaaagagcaaatacaatcaatgagattttaaggttcttaaatctgcccagaatcaaagcactcctctttggtgatctgtaataaagctcataacctctttatcccttaatatcctttagtacttaatctttggtaaaaagagagaaaaactacgaaactcaggccccataacaagatgttgttttcatgggtgctggagaaggattggtttttcagtatcttagtttgaaagctattaaattattaatcattctatccctaatcattcagtattccatccatcctctatatttcacattaaaccaagttcattttaattttacctcaatttcagaaacagaaaagcaatcaaacaatgacaaacgcaaagaaacaagtatgacatttagaacagaagcagaaacattgagcaagtcaagatcataaacatggcattactgctattttcaacaaattgtgcttgtgaataagaacctcatgtaaacatgaagcatacatggagacagagctcaagaaagttttgttcaaaattgtcagcttatatcatttgggaattccctacatgcagacccactgtacactgaggaagtgaaatcccacaaagggagaaactaatgcaaatgcagacagctggtacaagcacagcatcaaatccttctttgaattttgaaattagataactcacagagaatcaaattaaaagaaaaatgaaaacggttatgacttgagcacattaagcttcttactctactcaatgtaagactcataacattgccacctcctttaagaactgatgtttacggaggcttcacactatcaacagaaaccctgcctgataatagccccttttcctcacctatcagtacttgg

SEQ ID NO: 4 - DNA, 646429 bp, Glycine tomentella
gagattcaattaatttttttcatgttatgattggtgattatagatatataacttagtgccttgtttttaactcataataataataatggcgaaggtgtttagttgttatgttctgtattgtttgtcaagatgcaatttgtgtagttttgattttttttccaaatgaagtatttgatcttttatctcatatttttagttaaatttaattatttatcttctaaaaagtttaatttaatattttttttgttcagtttagtctttaattcttaaaaaattattttggtcatttcttttaatttagttctttgttccatttaagattgttgtctttagtaatttaataataaactttatgtgctaaaaatgaagtggagggaaagaaagaaaattgaattaaaaagtttatttttaaatgattaacaacttcaatattaaataaactgaaaaataaagaatataaagaatcaaataagttttttaaaagataaaggataaaattgaaccaaaaaattaaataaatcatttacccttaactttcagcatactagtgaacagtgatctagatttgagaagtatattaagcataaggatcaatcataattattaaagcattataaaaccataattattaaaaatacaagtaagcttaaacatgttaataaagtgggccaaatggtatttatcaactgttaatttttatataaaaaaaagaacagatatttgtcaacagtaagaagtatggtctacatgtcaaaagaaaaaaaaattatatatagaagattaggtataacaacttttaagaataataaagaatgttactgatagaaatggtttttctataattattaaaaacattttttaatagttataaaaataagtggacttattattatttttaaagaggaccatttttggaccaatttaaggaggacttaaagatgttaataatgtgggcaaatgatatttgtcaactatttgaaatattgtctacatgtcaaaaataaaattacacgttaaagattagaagataacaacttttttttttacaagagaatataacaattttatgactaacaaaaaatgttacttatagaaatggtttcttcccttcctacatataagctaattatagagattataaaattgatttgataattaaaggaaaaaggaggagaaaagagactatgaatttaaatcttccactaatataaactaacaaataatatttctcaataaaaaattaatctttctgaaggtagataagaccacaatcttattgaatgtcttattctaaaaatgagaataatataagatacaaatatatagttattatgtgtggtgcaaataagtcttgtttgcaccactatctatttgtattttggtgtcattgaaaaaatttcaaaatattgaatttgacttgtgaaactaaaataaaaaagatacacattaaaaaacagaatgtttttgtaaaagttcaaaataagattatattttatcaaacaaaaattaattatataactcccctccccctgaagttatcttccaaagcttatcctcataggaaaagttcaaacccccaaaatacaattattgaaagagattattaattgcaatagtgtgttaatcattagttgtaatattgtattacatttaggtttttttattgtattttggtacttttttaattagatttaaaatctcaccttgataatttatataataaaaaaatgacattaatagtcaacataattttgtttgatacatgatattaatatattcattaattttaaataatgattaatttttattgagaaatctaattgataatctttgttaggatttttctcttctaattatattttttctaccccacaaatcaaaatcttgtttaaggatattaaattccaataataaattctactcaaatcaataagatattaatagtcaacatatatcaaagagaatctttaaacctaaatagaaataatacaaaacagttcacatctaaagtcttatccttaggtatgattaatattaatataaatatttcaaaataaaatagaatattccataaaatttttaaaaaggaattgtacttttattcaaaagtttattatatatattttttctaaagttatcgtcgcaagcatggggaattaagtttaaattaaaaaaatgacctaaatcaattattgatagctttgatatcaagtacatcgctttaatagttcaaataaaaaatcttttgacatatttggtttaaattatatgaagttctgaaaagattcttacgaatgcttaaataaatcttgcaaataaaaattgaaactagggacacataaggtatgacttattttaaattagagaagtgtgacaaaatattgtttgaatgtaaatgttaaaggtgcaattgtagataacaaataaaaggcgtaattaaatttgtttgtttttagattatttctatttcttgagagaacttaaaatatttatttctttaacttttgttttttacaaaatatgtacttatgattgatttttttaacttttttctcacatatatcatcttttaaaggtgatcatgtttaaaatatgatttggaaaaatatgattgggtattaaatatggatacatcttttagtaaaaatttgaatcttttatcggcgatgctgagagagtctaactcccattgtttgtttgtctctttttttagtttttattaaaaatattcatatataaattatgtacttaatatttttggtactaatattttcttgagcatgatatatatatatatatatatatatatatatatatatatatatatcacgatgagttgtcaatgtcattaaccatttagcatacataaacggtatattctataatttatatttaataacttattctattgtaagtcaataatggacgcattgctatttaagaacaataaaatcttccattccatccacaaacaactaaagatttgttttgtttgacaccaaaaaaaaaataaaaactaaaggtttttttttaggcgtaaaatttgttgctatatacgattttaaataaactggatgtcaggcattcaatttattttttcatgttatgatcaatgattatagatatataattcagtgcctttttttatgtctaggcatgatattatttttcagaaattacattcttaaaaatattataactaaaaagttatttctagatatattaaaatgagggaaaataagatagaagttaaaaaggtatgttaaaaattttcatatgatataggattctcacacattcacataaaaaatgtaataattttttataatttatatcaatcataaaatgttatatctttaaattcacatttattataaaaaaaagtgtatttatcgaaatttaaagttgattattgtcaggatcaatatagttaagataggtttcatgatctctcaagttggactacaagtatcctttattaagagaatatgagagagaacttgtaaaacaaagaactttgacattcaattaagtgtgtgagtgacttgagaatgaatcaagaaggagatataaaacttaatatttatagcgttggataaaaacttcatatatttaattataagagatatcacaatgatataaccatctttgtagataattcattgctaatagataagtaggtacctaataaagaaatagtagcattattattagaattcaaatatatatatattatcagtttattagactaatagttcatctattaagagatttacgtctatactcttttagtaggagaactgaataaaagggttaatatatatatatatatatatatatatatatatatatatatatatatatatatatttcaatatcacatcacttattatgttaatttgtgaatttctaacaatacatgaattaattttatatgacttaaaacaaatatatttatagtgaaaatataatatataaattttttaaaaattaatttttaaaaatcataagaaacaggagaaattgacattttcatatttattattgtgagaaatcaacttttaatccctcgaatacgcttataaaaaataacggtgaaggttttagttacgtatgttctttattgtttgtaaggatgcaatttgggagattttaaaccgtgtgcaacatgttagtgaatagtgatgtagatttgagaagtatatttaagcacaaggttcaatgactcctaaaaagaaggataatattcaataataactattaaaaaatacaagttagcttaaacatgttaataaagtgggccaaatggtatttgtcaactgtctgaagtataatctacacgtcaaaatagaattacatatagaaaattagttataacaacttttaagaataataaaagatgttacttatagaactggtttttctatgattattaaaacaacaattttttaataattataagaaaaaagtgggcttaaacatgttaataaagtgggcaatggtatttgtcaactgtttgaaacagagtctacatgtctaaataaattaaacatagaagttaggtaagataacaactttccacaacaataaaagatgttacttacataaatgttttcccccatccgacatagagctttcataaaagctaatcttactagagcttgagcaaggcagtctcatttgaatgttgtaaatctaaaatatatagggctaatatagaaggaaaaaaaatactaatgtaggaacactatctatttgtgttttatttatctatatttttatttatatctaatgttaacaatcttcaattacaattactacatgatattttatttatttatttaatttttaatttatcctgaaggttacatgctaaaaaagattatattaaaattaacagtggatcaattatttatgactttggtgtcaatgaaaaaaaattcaaaatattaaatttgacatgtgaaacgtaaataaataaatatacgtatttaaaataaaaaaaatttcataaaagttaaaattggattatattttatcgaaaaattgatcatgtaaggtttccccctctaacgttatcttccatagcatatcctcataggaaaactcttaaagttcaaacctcccaaaaaggacaattatcgaaagagtttattaattgcaatagtgtgtgaatgattaactatgacaatgcatttaagaataggacaatatttatatgtaatactttttaaaatgtatttttgtttttattatttattcagaattgaaatttcaccttaataattcacttccttctttcgttccttttttatttgttaaatttttaaagattttttttttcattttatatgtagtttgcagagttcaaaattatattaattatacgtacctttatgagtttatcaattatatccttaattgttttttatctttaattaatttacacatatatttattgtggagtaaaaagataaaagagtgaaatagaaaatttaacaactattttatcataatcaaaaaaattattttatttattggtttctacaaaaacaatcgtaaacgacggataaaaagaaatggacgtaatatataataaagatttatatgaagagtcaacataggttatcaaagattaatttcaaattaaaataaaaataatacaaaaaaccaaattgaagcaccacatctaagttttatctttaactgaataaaaaaaatctgttttatcctttcgaatatactataattaatattaagtattaacatgcatattttaaaataaaatataatatttcataaagaattaaaaaggtttatacttttattaaaaatctgattatatttttttttcctaaaattatcgttgcaagcatatcctgagggaaaatttaaagtttaaatccaaaaatgataagtattaaatgtataagaatttaaatcttaatttgctagactgactttttacgttacctaaatcaaatcccattattttatttgcatttttttttcgtttttaaaatgtagaattcacgtataaactatgcactttttcatttcgttgatgtacgtataacttatgcacttaaaacaatatatgatactaatatttttattgagcatgatatcacagtcacttgtcaactatgttattaactatttagcgaatctctaaaacaaatgtatctttagtaaacttattgtattgtttttttagaggagtaaacttattgtattataaatcaattattgttgcatttttatttgagaacaattaaatcccccttaaccaacaactaaagattttgggaaatcttttcatatttaatatatgataatattttaataggtaataattactaaaatatttaatttgtacatttaaattacatgacaattatttaatttctttttttaatgttttttcttacttaaaaaattaggaatttaacttctttatgaggtatggaagttattgaaaaaattagaacactgaatttaatgtgcattatatgctcaccatgccaatgcacgctaagcgcatatttaggatttagtgcatggtcacttaagacaattgtactttggatgtgtgctcagcgcacacatgcatacttagcgcaaagtcatttttgaaaaacatgattatgcaacgttttgaagattataaaaatgtgacaatgtgcttttaaagggagttagtcagcaagggcacaaaatagagcaaaagagtcacttgggagctcttcttccatttcctttgtttcatcttttgttttttagtctctcataatgattatgagatactaaattatccattgttggggtttgaataccaaatactctttgatgtagtgaattttactatctatttaatgttattttaatattattgctttctatttaagtttattgtcttatttatgatttgatcactcattcacatgtatattatacgattttaatcattgaaaaatatttttaccctaagaacttaaaggagcttctaggtaattcatgtctataaataaaatgatgttatttactcttatttatgcatatttattcttaaagcaaattacttagtttaattcttaagagattaggagtgaaattatatgatttagactttttcacgtgaagaatcatgattagagtaatttagttaatgaaaataatagttggaatactttaaatgatgaatatatatatatatatatattagatataaataaaaaattatatcatttctttttttactggaaaaaatatattaattttaaatatcagataatacagtaatagtaatgaaataggaataataaattgttgggttacattgtttctctgatttctttagaatggataggtcttctatatacatatgaaccttttttttcttttcgtatataacaaaataataatataaaagcctttatatatcaacaaattaggttttagaaaagggactaataattttctacaatgtggtaaaaggattgccttcgaaacacatggtaaaataaatacataagtcttacacatttattattcagggatgatgatttaaacacgctgtaaaataatgtctatgattttggacacttcacaattttacaccagtaaactccattggcacataagttttctcagtctccctcttcctattattaatcatatgtattatttgtcatatttatatttctttggtgtaaaatatatgtgatagatgtttaagaattatttttgtaaaaacaacttaaaaaaaaatctagatgtgtataacccacccaatgaacaaaggccacaccttggcctcccagacgtttacttaaggctaaaacgacagctaaccacaaagtacaaaccaatctcgtaaaacttattatttttttggtgaaatccaatcacgcaaaaataaataaaaaacgaaatgagaaccatataaaatcgataagtcataaagagtaataccaaaacacacgcaaagcaaatgaagtagtaagagcgagagtgtgatagagagaagagaagaagaaagggtgagagataatgcggtgttatggtttaatcgtaccgggaagcgaccagcgcttctgcgtccccaccgtatctccagtgttcttgaggcccaacaaacccattatcacgacccgaatcgcgtttccaaaggcgaccctgaataagaacgagggtttcgtggtggagctgagcttctacgagcttctgggcatacccgaatcgggttcggtaacggagatcaagaacgcctacaagcaactcgcccgaaagtaccacccggacgtgtcaccaccgggtcgggtcgaagagtacacgaagaggtttattcaggtgcaggaggcctacgaaaccttatctgatccttcccgaagagctatgtacgataaggacatggccaggggcatcaacttcgccttcaacgctcgtcgacgctataattaccacgatcaggttcgccagccaacttagggctttttaattattccattcattttatttgaatcacatgattcgccatttcaggagatataaggttggttgggtcatgggtggttaagaaaaaagggaagctgctaacaaactaaccattatcatttgtcgccatttgaattgtatgatttggcaagtgtaggatgaattgcaaattgctttgaattgttcgatgtatgatatgattcaataatttgttgtgttttctaattttttgggtggcttttcttttaacagtcctcgttaaagatattgaaaatttaaataagtttaaattgtgaaataaaaaggaatagggaattaggtatagtgctgcttagtgaatgttgtttggttgttcttttactttgattccatttgcacagtctctcgctctgtgcatgctatttggttgttctgttctgttttttttttttttctcttaattctgagatgacaaagggtttgcacacttacactaacccacccaatccatgtgcccttatttttgtttttgttttaacttacgacatattacatatggcttataatgtttcgtgaaacttatggataatatgtattttttttttcaattcctagtttaaaattatacattgagctctatacatcgtttatctgatatactagggctgtttttcactttgtgtctaaacttatgatttgatgtgagttaggattcacaattgaaaaattagcttggtgattcaaaatttgatttgaatttaatctaatctgaaatattgtcttactactgatttgttcacctatctcagtcagcaaacaaagcaattgactgtaactttgacctggaatgggaattgcttcatcatgcacgtttgagttctgatattttatatttctgggtgctttttataagttagtaataggaacttgattctttctctgttctatgttttttgttttccaaaaattacagttgtagcggtcaccttgcttctattggaattctttttcatgatggtatcacagaatcctcctgctgtttgtgaacttatattaatatttaatgtgtctattacagaatttgacttctgctctgcacctatacataattgatatttttataatttatgaggactattctggcttttgttctttttccatttttttccttttcgaatatgtcgacttgaatcccagcctctccgccacaaaatctgaacaagtgtgttgtagttgcctcttcagcacatgaaaatctgtttacaagttaaatttctttttcatgatggtataacagattcttcctgctgtgagcttgtgttattttatgcaatatctattaacttctgcactgtacctacacccaatcattctattttcataaattatgagggctttcggcagatacttccttatgacgtttcctggtaggaatacattgtttctggatttctattacggcttttgttctttttccaaaaaaaatttaaatctttttgaatatgtcaacttcaatcccagccaccaccataaaaaattaaaaactgaataagtgtgttgttgctgtaacatgtataaatggctcttcaacgtattaaaagtctgtgcaagctaacagtgtgaaaggatataaatattagtattattaacaataacaataataatgatgatgaaacgtgtctgcgaatgagattgagtgtgatcttaattatttctttattcatatactactgttcggaaatttctttttatcgtggtaatgagtaagtgggaattcataaatcatgcatcctaaagagatagggatttcttaatttactgtatttgcttgttcagttgtctaattcactttttttccccttctaattttaaattgaagaaaagcgggtaaaggtgtttggctagaacactaattggtttgctcactgattctaagctgttggttttgaatcaggtggttgaacaaaaaagtgaatggaaagctaggtggaaatctcaactgtcagagctgaagagaagaagtaacagcaaggatgttggagggaatatgtcatgggcagcacgaatgcgccagcagaaggatgaattgtcaaatgaatcatgaccaggattttccttagttctctatatttaatgtaactagttgtatatatagacaatagataatgtgtacatcttcgtactcgagatcaaatcagatataaagttgatgttgagaaaacgtgcccttggcccattgctctactcacagttttaagcgtgctaactaatagtcggctgaattaacgtctctaggccattttagtgtgttttggttagcatttgcaaaattggttttagataaaatggcttttgaagttaatggatttatatttagatcattagatgattttattctaaaagcaagttagtaataaaatttaggataaattttttatttaatgcaaaaattatttataattactttaactcaattgattagattaagaattaacttcttaatggaaaattaaatatgtgaatattaattgaaaattatgttcgttggtatttcaattgtaattttggatattctaaggggaattcaaatagtgtttatataataaagtgagatttgagtctagtccataaaatcatggtaactttataaataagttgaagctagtacttaactatttatagcttcactttagattttttaatcaattatgctaaaagtgattttaaactagacacactattagtgtaactagcagctagacctgtgtattgcaaaaaaaattctaagaaaaaaaactaaagaggaagggagaataaaaaagagtaaaataaaataaaaacttaaaaaattgttcttgaaaaactgttcaactgacatgtagcgatgtcttgacaatttttttaatactttatttatggattgttctgtgtggttgttattttggctgtgagaagattttggggtgcctactgatgtgtaaggtgggagggagaaaaatagtttggacctaggttgccagcaagtgggattaggaactttggttttcgtttatgcatttaaatggacgagtatcaagggtcaaatatgattgaattttctttttgatccggcaaaattgatcgaattaaactccacaaattacacaatttggaaggtggaaaaaatttctgttttggttaccaacaaatttgtttcggctgagaagatttttgggttgcctatttatgtgtaaggtggaaaaaatttctgttttggttaccaaccagtagctttaggaagtttggtttaatatcaagggtcaaatatgatcgaattaatctccacaaattatacaacttgaaagccccttatgaaacgtgtcatatggtagttatttgggcggtgagaagattttctgggtgcctatttatgtgtaaggtgggagagagaaatataatttcggactttgttttttttttttttttccggaatgttttggactttggtcattaggaactttcgtttgtcaagggtcaaatatgattgaattaaactccacaaattatacaatttgaaagcacctcatgaaacgtgttatattaagaaaaaatgtgtatgactttaggggtgatgttattcgccaattgattgttagttttaacatttctcgaaaaattaggatctattttatatttaaaatatacagtaatggtaattaaaaataaataaatttgtgtatccgattgtgagttgttgaaacaataattttttttaataatgtgaaaactctaaatatatctatattgaaattaatttctgctatcaattttttaataagagaaactctaaagaacaacatctttttctacttttcaagtctaaaaattaaacttgaatttctactttgatctagtacactctgatttcatgtaaatgtttcaatttataatattaaatatatatggaatttataatattaaatatatatggatttgagacttttaaaaagagagattttatttaaaataatttcgtatctctatttttatatttgaaaataaaaaacatctcatatcttttttatgctaagaagtttcctaatataagaaaaataattatcaaataatcatgattaattacgataacttgtcacatgatctaatcttgatatgtagcaataaaaatttattcttatttatagacaactaccacattttatataataatactcttcatttatattaattatattcttggtactaatgaagaatataataatattctactaaaatatttatttgattaaattaaattctttaatttaattatgaaataatttttttttgcaaaaattggaacactcgtttgtgtgtgatctagtaggttcaacactagaccgatagtaaattaatcacaattaatttactaatcaagataggcgtctaacaacacttcttaaggtccggataacatgaagtaacttttttttttaccttcaagaaccaataggagaataacgtaataattttttccatcatttacagctcaaagttaactctagagtatattattactatcaaattctaataagttaacatattatatttaatcaatggatgacttaagaaactcttttctcctttcatttaattgttctagtcaaggtcttaattctattatagaactcaaactcattacctagagttgatgattttcttcttaattaatcattaattctacaagtatttaatcatatccaatattcatttaactagtatcataaggcattaggtgtccaaaattaaaatataacaaataatttattaattactatgataatctcaaattaaagaaaattattatatttcttcttaagaacttcctattggcatgtcaaagtaatattaattattaggaattctcaattgagtcagttaaataatgatattcacatgtaaattatcttctatatatgtaatttaataaatgagattcattaatttttattcaataaataccatcacatatatattgatctatctgaattattaatgtcctatttagaataatcctactatcaagaacaatttagattaaaattataaatgaattttttctcattatcatattctgtatcatgataataaatctttaactttaatcaaagatttatcaaattaataatttaataaaaataattataataataaaataaaaaataattttttacaaaaattgataatataataaattggatgttggatatatacacacatttaccccaacagtgataaatgaaaaaaagtattggtttgattaattatgcagtggttggaagtaggaatcaaaaggaaactggccgaaattggccaaattgaatgagcaaaataacatacagaaaatgaagcattatgattcggaagctaatggatatgaatacgaataaggtaatatgcatctgagcatatttcaagatgttgtgaataaattgatgcataaaagttacatcaggtgatgagttgtgagcattgcggtggcaaaaatttaaaaataatattatttaattatttaattagcaaaagggggttgtttggggattatttagggatttggggctgccaaacacgccctgcctgggcgtgtttgaacacgcccaagctaggcgtgttcaaacacgcccaggcagggcatgtttggccccccaaatgcctatataatccccattgaaaaagacatttgccatttcgcgccttctctctagaattaggtctgacttctctctagattccgggtgctgcattgtctgaagcgaagccctgccgaaatcgtagcgctgccgacaagtaagtccatttaactgattgtgcttgatatttactttgttatatttgaaattagaaaatggttaggattatatgaactttgtagcgacatatatattaggttatttactagggttttaggtctttcaggttagttgtagggtttacaatgggataatggtttagggtgaggtgtagtgattagggttacgtaatttaggttagtattagggttaacatcgttagttactagggttttaggtatttcatgttagttttagggtttacaatgggataagggtttagggtgtggggtagtgattagggttacgtaatttaggttagtattagggttaacatcgttagttactagggttttaggtatttcaggttagttttagggtttacaatgggataagggtttagggtgtggggtagtgattagggttacgtaatttaggttagtattagggttaacatcgttagtagggtttacggcctggggacatatctaggtttagggtttagggcatatgtcgtgattatagggtttagggttgcatgtacatacgtatggttgatgtcttgcagtttaggttaggggtttacactgtcatcagggtttattgttttagggttttgggtgtacatggggattagggtttatgactaggggtacaaagggagggtttgtgggtgttagtttagggtgtaggtcgttggctctgattagggttaagatcttctgttgtagacgtcaggctaatggatttagggtttggttaaggtttaacattgtgattgtggtttatggccttgagaacagacctagggtttagggttaagttctgatgttgtgattacgatttaggtcttcggttacagacgtcgggtgtatgacacacctgttttggacttggggttagtgtgatgagggtttaggagttgggttacatacttggggtttatagtttccggtttagtgcgagggctgatgtcgagattagggtttagggctcatatttttttacttagggtttatggatatcggttaagctttcgggcttttccaattcaagttttgtattgccttgggattatgtcgtgattagggttatgatttagtccgacggctgatgtcgagattagggtgtagggctcatgttaagctttcgggcctatgttgtggcacttaataacataatgatattattatggctgaggtcgtcggttacatagttagggtttatggattctggtctaggttaatgttttgattagtgtataggtcgtggggtacagacctagggttgatggatgcggctttagggttaggtctgatgttggcattagggtttacattgtgataagggtttatggcttgcgaaacacacttagggtttagttatgttgttgttgttattacgatgtatgtgttgggttacagacctagggtgtatggatcccgatttaggtttaggaaattacatacacttgactaataatattgagtaattagttttccaattaaagtctttgacgttagtattttgtttgatgtggttttaaatttttgtacatgaatatattgaatagatggctgattcatcgtctacatcgtcgcgatctgcatccgatcctgaggctgagcccatggatcccacgcgatatgttgttccaaccccatacaagtggggcgttctgcgaaggcgtattcagcgcacacacgtttcacaagttgtgtggaacgggggcagcacacctcgagtactgaagactcgacgtggtaccgtgaaaggtggaccagatgcggaccagatacccgatgttgtatctgacatgttgcgcgcagctgggtttcttaatgtcgcacgcatgcgaaatctccaggtacacaaccacgcaattatgaaatgagttaagcctgcttaatttgataattgtttaatattttttatgtatttcagatggattctgcgcttatcagtgctctggttgaacaatggagaccagagactcacaccttccacacgccgcagggtgagatgaccatcacgttggaagacgtggctggtattctaggattgcccatcgaaggtgatgcggttactggagtgacggttgacgagtgggagaccgtcattgaggaggtgtttggtcacgaacctgaggataccgagcttagaggtggatatttgcgtctgtcttactttgatagacattttgcgcactggggtgaggtggtccccgagcctgttcacatgacgcggttcacaaaggcccacattgcacgacttatcggatcatggctgctgtgcgacagatcgggaggtagcatggtcgcagcacgatatatgtcgttgcttgcaggggattttgtggacatcggccgatatagctggggctcagctgtcctttcacatttgttcagacaaatgtgtgagtgtacagacccagacaggagtgacatcggtgggtgtcatatgcttctccaggtgtgggcgtggctcagattccccccaattgctccagctattccgctgcctacacagccggactggcattttggtcatcggtatgtgtgattatatgttgttgttgtttacaattgtaacaatgaagtgttatattatactaacattgattattttgaaatcaggtttaacgctgtaggtcgacttaaaccgcatgaactggtcgtgtataggatggcattggactcccttacccgaaacgaggtatttacaattatagtatttttcaattactgtacgtttgcatttgtggaacatgctgttaactagtaaagtgttattttgttatgtgcaggtcgtatggcaaccatatggggactacgacttccttggtgcttctgagcgtgagcggctgctgtggatggcaactacgcctatcatatgcttccatacggtcgaatattgtcagccggatcgatgcatgcggcaattcggcagggatcagccaatcccacgcgctcccaggaagctgaagggcgtgcatgacctttcgcttcggggtaaacgggaagccaactgggttcgcaaactcagaccgtttatttcgcggtggaatgctaggggcgaccacattgagcttccccccttgattcaggggttgttatcaccacaccatgagtacatggtgtggtacagagaacacggcaagcggttcatcacaaagaagggcgcgaagatggctcgtggtgtaagtttctgttccatcatcatttgtgtatttgatttaattatcgcacatcacacacctgacatttatgtgtatatgtttaaaattgtagcttgatgggctggaggcgttgtacttcgcggcgactagccccaacagggaggaggccttcgacttcgattgggcgggtgaggaggttggtcgattaatgtctgtgttcgccgagagttgtcgcgtggaggaagcaggcccacatgctcctgaatcccagcttgagcccgaaccacagatctcagttccagttggccgacgaacaaaagagggtcgtgggctagagcgtcggcggagaccggtgcagcaggttcctgagcccattgttcgaccgaggccacgcaccgaggggatgtttaggcccccacatattgcatcgacatacgggacacagcccgtatattaccaggctactgcgcagggggggcatgggggcatggactacgccgacttcagtacccaagcccagatgcctaccccagacccatcgcatagccatgccgcatatgttacgactgcaatgacatgtgcagatgtacatggcgggttcgtcggttgtggagtgaacatgcagcccgagtggtctgaggcacaggtcgacgaaatgctcgaccaaatggactatagtgcagaagcctgtgccgcttggcagccacactcaccatatggcaccgaagcttctgagtttcctatgccggtgtatgcagatcagggcacgccccacccggacccgtatcaggcaggcccgttccagtccgacgcctatcaggcaggcccgtcccagtcggacccctatcaggcaggcccgtctcaggcacaaccttcgcagccagtccccgccgagccaggtagttctcgacgacgacgcagacgagtacaaccttatcgacaggcacgtgatttgccgtggccaccgccctcactctgatttatatttttattgtattgtagtggactgtatgttgtaaacaacagtaactgttttatgagatattttgttgtattgtagtcaacatttttgttaacaccgcaaacgctttaattcataacatacacgattacaataaaaaacatgcttgcgaaaatgcattcttaattaaaaggagattttcaaaaaaaacatcttcggtgtacatgtcttattctagttggatttgaggtttgctgaaaatgcctaaaatttcaattggacaaaaacgtttccagtagttggattccgctagcatcctcaagacgtcttcatcgctcaccaactcttttatgtcatactgaatagtagtgtctgagtattgtgcatgtcctggatgacgaaaaaacatttttctaaccacctgtgacatgtgaatcccattagggggaaccccaacaggcgcaacttgcttgatgagggccttcagtgtttcaaggttgcatgcagaaggaattgcaaatcgaattgggtttgttccagtaaacgcataacccacagaaccgggtcttcgtggtatgttccaacttccattgtaatataggattgcatcatgtgtggggacgatggtggactgaagtaggttcattatcccatcggttgttctggttatggtgcataatatttctataggaccagcaccggacatttggtggtgacaccttaacattctgcaaacatcatcatcatttgttagtgcgatagaatggaagaaatagaactgacctgcgtctatggatggttgtcggtagtagatgtcatccacgaagtagtcatcggttagcagaagggtgtggtgaatcctactcttaagcgtctgaaacgaacactcattaggaactcgcatcgctatcggagtggcaccctgaaaacaaacacccgtgtcgttgtgattcgtacatccatttggataaatgaatgctaatttcgagttagcaatgttttggctgcttgtttctcctaagaatgccattgtatgcaaaataaaatttacgggacgagtcatgttgtgtgccacggtgtagcttatatagctgtagtcgcgcctaagttgggcgtgtctagtcacgcccttgttaggtgtgttcaaagacgtggtcggtgggcgtgtctagtcacgccgttgttaggcgtgttgaaagaggtggtcggtgggcgtgttcaatcacgcccttgttaggcgtgtttaaatacgtgttcggtgggcgtcttcattcaaaccataatcacaacgtgcttcaaccaaggcaaaacttgaattggaaaactaattactcaatattggtgtttgtatcacagcgcctaaaccctaatcgcatcataagccgtgcaccctaaaccataatctatcatccctgttaggcgtgttcagttaggtgtattcaattaatggtgaacgggtaacatatagtatcataaataaatagttaatgacaaaatgcaaattcatgtcgatcacaggcaaaacattatcatcgtacatgttacacaacatgtgttataaatcaaatacatttaacaaagcattcataaaacacacataacaacaaaatcatgaaacaccaccaccccgagtaggacaggtcgtacgagtatgtccaacttgcttgcacagaccgcatctacgaggtgtctgacccgtttcgacttcgtccatctcgttacggattctggtcgaccttggacgacccttcgcacgcaacatttccctgtcagggatgataactggatcttcactagggggaacgacaagttcatcgccaataggctgccaaggtaaagaataagcctcgaccaagttggatacgaggaacacatcatccacatattgcaaaggattccgacggatgtataaagcagcagctgcggcatggctacaagggtatttgaaggtcttaaacttcccacactgacaaaaacgttcagttaggttaactgaatatgacctgtcccagccatctgccacctcaaacgacgtatcctcaacgttataggtgcgtacatggtggcctgtagcaacgttctgattatgcctcatagcatcaatcagatttttacaatgtagttgtgattgctgcatctgtgcagtggccgtcttgccccttctgacaaagtattcaaccaatcgactgtatgtgtgcttcaccaaagcagtaataggcatgttccttgctcccttgaacaccctgttcactgattcagacaaatttgttgtcatatggccgtatcttctcccctcggcgtcatatgcacgagtccacttttccttaggaatgctgtcaatccattctgcaacctcaggactggtattgcggaatcgttcatacgctatgtcaaattcggccttacagggagtataacctgcacaattataaaggcatgaacgttagctgggtaagacatttttaaacctgactaaattacaaataattttgaacatacccaaggtcatgaggctcttcttcaatcttgcactcctgaatcgttgattgaaattactggcaatatgacgaaggcagaaaacgtgatgcgcaaagggtggttgccaaccggcatgattctgcactgcagatataatgctccggtgccgatctgaaatgaggcatatattttgcatttgggttacgtggaagcgaatgttagcaaggaaatattcccaagcttccaacgtctccccctcgacaatggcaaatgccagtggcacgcattcgttattcccgtcctgactcgtggcgatcaacaattttcctttgtacttgccatataagtgagttccatcaatttggatgacgggtttgcaaaatttaaaagcctcgcagcactgtctgaaagtccaaaacatgcgctgaaacacacgcttccctcgcaccagtcgatttgccacaaaataatcattggtttgaatatcaaaaaagccccaggtgaaaaacgaagcatgtagttgcaccacctcggcaaatatgcgtaagattcttcccaatctccataaatcattgccatggctctctgcttcgcataccatgccttacaatacgaaactttaaatccaaagctggtggtgatcctctcctgaaccaacgcaatgcacacgcccggttcctccttaatcattcctgaaaatgacatagtgagatacagattaacaacaaaccttaacacaaattaacttctttctaataaagcaaaaattctcaggtcataccgactacaagtgaagcaatgacatcaacatcaagttgtctatgatcctgtgatagacgatcgttgaggcaattgtgctttccaccccatctggaaaccacccacttctcacggtacactggttttatcaccctaaccctccaagggcaaccatccttgtgagcaacacacttcattgcaaacttgtcaggcttgctctcaaccacaaatgcttcttgatgctccctcattaggttccgcttaacagcaacttgtgcctcctttttcgatggaaattcctgttcaacatacaaatcgtcccctatttgccaaggaccctgcactgaacccgatcctgaagctgagccgccaaaagaagattcttcgcttgggtgatcccaatcgatatatgtgtaatgtggaatcccgtcccaaaaaggaacaaccgcaccgcctttaaatacaatacacaataataagcattggtttgcaaaatatatacatgaacaacagttatacgaaatcacttagggtttaagtcatgtaacttaccttcaactggttgttctgattgtgtcggtcgaacacccgcacggttccgcatttcagacggccccgcatcagtgtgttgctggaatgcatttgcatccaccccaacatcttcatcattatcggacgcactggcattctcctgaagaagacgatcttccatcgctatattttcatcatcatcatcttcttcatcgtcatccataacccaagttgggtcatgtgaatcttcctgagacatgtttgcaccaacagcatcatatgatgatgctgcaccatcatatgatggtgcactcctgggcaaaacaactgacctcctgggcaaaacagcttcctcaactacactgtaatccacatacaattctaaaaatttcttccgttcctgattaaaatattcttcaatggccatttccaattcttcatcatcctgtattggaaactccgtgtattcatcttgctgccatattcttgccgtcagcaatgtgatacaagtgtttccgtccacacccaattttggatgtatcttctgatgcagatcactcaatgttgcatttcggttgattcgtgtcatcctttgctccccttcgaagacaacacctcttcccccttgaattttccttccgttgaaaaaaagtttaacacgaagaacgtccgcatgacttgaactcatttcctgcaatcaacataaataaacgtcaaaaacacacaaacacccgaaaccgtcaattatgaaacacccgaaaccataccgctttaacacaaagtagacaacctaacacttctacagatgtacttactcccagtaaatcaccaaatggtgaaagaaagtcaatattgtcaaagacacaaagtcatcaagaagtggtcttgtttacacaacaacctagaccctaggtctagtcacgccaacccatacaccctaaccaccgcatacgccttaaaccctaccacagatcccctaaaccctagttgtgttccccctatcctaacccctcatcaccatataaaccataaacacttaagctgaatccctaaaccctagctgtgacaccgaaccctacaccctaatcaacacacgcaccataaaccataaagcggtaacacttaaaccctagctgtgtaccccgataactacaccctcagccagaacacttaaaccctacccaccccataaaccctaatcacaatatcaacactaaacgtaaaccttaagcaccacctaaatccattagcctgccgtgtacaacagaacatcttaaccctaatcagagccaacgacctacaacctaaactaacacccacaaaccctccctttgtacccctagtcataaaccctaatccccatgtacacccaaaaccctaacacaataaaccctgttgacagtgtaaacccctaacctaaactgcaagacatcaaccacacgtatgtacatgcaagcctaaaccctactcacgacatatgcccaaaaccctaaacctagatatgacccccaggccgtaaaccctactaacgatgttaaccctaatactaacctaaattccgtaacccttcaccctaatcaacacacgcaccataaatcataaagcagtaacacttaaaccctaggtgtgtaccccggttcctacaccctcaggcagaacacttaaaccctactcaccccttaaatcctaaaacgtcaacacagcaaaccatgaatctaaaccctaagctaaactacaatacctaaaacattagtcactaacctaatatatatgtcgctaacaaactaaatacaaagcacagtcagttaaatcgacttacttgtcagcaacgcttcgacttcgacagggcttcgcttcaaaggatatcaagacccacgctttagagagaaggcagaccgatttttagagagaaggcggaatggatcaaatgccatctgcaggggattatataggcatttggggggccaaacatgccctgcctgggcgtgtttgaacacgcctagcttgggcgtgttcaaacacgcccaggcagggcgtgtttggcagccccaaatccctaattaatctccaaacagcccccttttgctaattaaataattaaataatattatttttaaatttttgccgcattgcggttgcttggtttagtgtctgacacgtgtaagttttggtagtaaatcgtgacgttgattaaatattggttaacattatacatgttttactattttgactgataactaatttatgtcagaaaattttattaattatctttagtgtggtattttttttaattatatatatattttttgtttataaaatttaaatttgaaatcttacatataaaaaaaattgaatctaattttacttggaccaataattgttcttgacattgattaatttaactttaaattaaaactaaattgacattgtcaatggtacataccaagttgtcttgtaaaaggagggtatggaatttgattttccattaacttgacattgtcaatggtacataccatgttgtcttgtaaaaagagggtatgagattgatttcccatgaggcaccgttgtccttcccgttcccatatccatacctacgccacatgtcattctcccgaccaaagagagagaaataaagaggaggattaatttgcatttatcaataaaagttgtaatgccaaagtgttgcaaatttgtaacttgtgataactttctataagataaccgtgaagtaaagggtgagtggggattcttcccatttaagagtcataagttaggacaactaataatttcagttgggggacagggaatgggaaaagaagaatttgattctaatttctgatcacatgtaatagtttcaaagtatgttttcaacaacaaaaggtcaatctagtgagatggccccccttacaatcctctttgttatttccaacaatgaaactaataattattaaaaaaaatacattacttacttgcaaccctatatatgaagaaaactcttggtcaaaaatattgtctaccatcttaggagcaacagcacttggaatatgcaggtgaggctatgaagcatgtccctttcccaaagcctatgaacttgcagtgggcatcacagcttggagtgtcttcgcatgatccaatacagatctgttggctgctcacagcatctgaaaatataacaataatcatggttgctactgcaagaataactttcaccaaaatcattgaaacaagtgaacgaggcactcttgtgtacgatcgacagcttattgtggcactttgtatcctgtttgttgtgtcttcttttttctgagtaatgatgttgagtgttgcagagaacgaaaatagtcctttaagatttacatcaaaataaattagtataatatatatttctctatcaaagagaatcaagtgtaattttcaaaagaaacaggagtattgtgtatatatattgatcactcgagagaataatacagtgtatattttaagagctaagcgagtaatgtgtaatttcttcaaagtgagaagaatattgataaaatgttgttttcattttttaaagtcacaaacatatttttcaatccgttcttgttgggcaaaattataatgttctgttagagagtaattgttatgtgaatataataataccaatagacagaataaatatcaaaagcccagaatgtactaaaacataccaatataaaatataaattcgtgtcatacaaagtattatttatatagtgttaggattttttgtatgttctaaaaataataaaatattacatcgagttgagacaatatgaaatgtaatcacagttttttaaatcaaaccggctggttcaaataaatatcgtcctattattcggtccgtcacactcttaaaactattggataaagaaccgttcaaaaaccggtaagactagtcaaaaaccgtacaaaccggtaaaaactcacggtgaagtaggttgaaccggtccaacgcaaaatctttaaactaacatcagaggaacatgcataaactaactggtcatcaaatataagacatactcaacaagttttttttttattattataagatttcatttcatgtataaattatttttaactaaattactttaaattatctttttcttcacctatgaaaattggaaaaaatgaataaattttcaataaaattaagatttttatattaaaaaaatataataaatatagacaaatttaatgttaataactaaattgattaaattttttattaatcatgaatttatcaattatatcttataatttaaaacagatgaagtaagaataactcaaattaatttttaaaatatatggagtttaatttttaaaagggactcaagcccaacaaactaagtaagactaagcaacccaaaaacttgctacatcagcatgcagcaaataaactcaaagagctagtgcaggacaaagccttcttaaccaaaagcatctgccaccaaattggtcattaacaatccttctgacaaaaaacagatgaacaacacgtaaaatatttttattgcaaacaatcttgtttgggtttgaaatatggaaaatctataaatccccgtcattttgtgttacaactctttatttagactataaaaatgtcaagatcatactatatcaaacataaactctttttaaatgtttagagtttagactgataattgatggatgcattctcccacggtcggttcattttgatttccaatgttgtctacactaagcggtacaatgtacaaaattgattgtcttgtacaattgttgcataaatggcactaaatcgtttccgctcaaaattatgaatctatccctaagttgagtttgttccaaaatatgataaaccatacagcacttatttatctatctatagagcatgcagaacttaccattccattcatgcatatacagcatttcattcatacttataccctataataaatatgtgtattaaagtcaaaagcatcaacactataagcgttggtgtttctataaaataggaaaagcctgaactcaaccatggttaaaataggttttctcatcaacatcaaatcggaatcagataagtatttacgagttcaaatttaattgttatgtatagaattacgtatccagggtatccttaaaaaatagtcccaagtgagagaaggtcccaagggtgttggtccctaccatcgctccacgtttatttaccttttttatgacaagaactttcttaaaaatagccccaagttaccaattcaacactatggatttaaaagaaattaaaagacaacacaaatattaacaaatcaacaaattaaagataaaaatgattgtcacaattaatttaatgggcttgatcttcgcaattttctttagtggagtcaccactaattttattgaaatatggaaaaaatgaaaaatcttaaaatttaagagtcgcatgtgcattggaaaggtagaaattaaatccaacgtcttctctaaatcacccatcccaatttttttgatgaaaaaatcacccatgccaattgattgtacaaatatttgttttcttattttaacataaataagagaaaaataattttaattttaaagaactaaaaactcacatagtttgattaaaaataattgtgaataggttattttttttataaaaaatattatatatttttaaatcaaataaataaacttcaaaaaatgacaaaagaaaatatacatcgaaaacggtaactcttgacgtctcaacatctcttgaagtaccacaattttccaccaaaagacttttttgatgcatctaccttttccaccattttttttaccatgttccattttgatctccattaatcttgtcaacggtaagcatgtggtacaaaattgtttgtgttgtaagtggttttccaagcgttgcttcaaattgcaaaagaaacatttttatttatttattttaaacacctttctaatatctaatatttttttgatcatatcataagttgtataatatttatattatttttttcagtcactaggtgtctaatgatatgatggatgtccgttcatttttttttttttgtgtgtcggtccatccaaaattatgaatctgcccctacgttgagtttgttccagtacgtgataaaccactcgtttatttataagcccgaagaacttaccattccagtcatgcatatacaacattttatttcttaacatggagtgagcttcttattccctcttcctattcacctttgcttgcattgttcaacactctgaatcgttcaaattccaaaaacttgccacttggacaatggaaactaactcttctaggtaagattcaccaatttctggggccacttccccaccaaactttggcaaacttggctaaccaacatggacccttgatgcacctacaacttggtgaaaagccacacataatagtctcttcagcagatattgacaaagagattatgaaaactcatgatgccatctttgcaaataggccccatcttcttgcttccaaattcattgtctatgatagcagcgacatagccctctcttcttacggaagagcttggaggcaactaaaaaaaagttgcatttcagagttgttgaatgcaaagcatgttcaatcactaaggcacataagagaagaaacgattataaacttgttagaaatgtctgtgcaaatgaagggtcaattatcaatcttattactgagtcagtgacaattgctataattgcaagggcagctaatggtacaaaatgcaaagaccaagaagctttcgtgtcaacgatggagcaaatgctactgctgttgggaggtttctcaattgctgatatctgcccttcaatcaaagtgcttccttggctcacaggaatgaaaactaaacttgaaagagcacagagagaatgacaagatcctagaaaatatggtcaaggatcacaaggaaaataggaacaagcatggagtgacgcacgaggattttattgatattcttctcaaaactcaaaagagagatgacttggaaattcccttgacccacaacaacagcaaagcactcatgtgggtcggtatgcattattctttaggattacttttgaagatttccatatatacaactatatacatagatatgaaatttactaacataataaattacacttataatatatatatatatatatatatatatataattgaagtagcaagttattaaaatattctttctatgcaaaataagtgattgtactatacttgttttcttgagaagatatacttcgtttattagatgataagttctgataaaataataaaattgtattttgattatttgttggtgataaggttgaatctgaaaataatctctcttttatatatactttatgatcaagaaaattaaaattttaccagttaaaatactttatctataaaataagtggataacaactctctcttttcctttctttctttattaaatagattatatttcattttcttttattcttcttttttctgttccatatggattggaataggatttttattttatcctattatgaaataattaaataatatttttcatttcatttatttggttctattttaatgaaaaacagaacaaactataccaatcccttgggtcatccttaaatatctaaatgagcttaccaattaatagcaggaaaaacagaacaaactatacggctataccttaatcccttgggtccacctcatcactccccctgttgctaattggctacatttttattccttggccaatttcgaaaggggtccctaaattattgccttcttggagaagtcttcaactgcctgggtgcccataccccatgcccattttgctttgcttctttcccaaagacgtgagtgaggtctacgttgtttttattttttgggaattgcgatgcgatgtcgtataagccactactacatatgtttttagcaacatttaactacttaatgttatgaataagaccattttgtaacatttataaaaccaaatgttactaaattatgatattattttttaaaatatttatacaaagttaaaatattgtcaaaatatttttcgttacattctacgtctctcaccgcacgtttgttcatgacaatgttcccacatctctcacgccaacttttgtcctctgtattcttatttttctcacacggcagcttcttgctcatcctataaaaatttaaaaattaataaattaaaatattatttgacccttttttatttgaaatgttaatactagttgtaattaattttttcggaaagatgtaccagctttggattgtgctacaccacatatttagctttattatcaagagtaaattatactattcctggtgaaatctctcctattttttttctttatttcatcaataactctttcgattgtttgaaaaatattaccttgataatttttatatattacactaactccttaattgtgatcatgttttccataagaaaaattgttgtaaacattagaaaggagtttgacaagtatacaaaatgtcatagatattaatctaatttactctattaataatgttctaaattagattgatggttaattaatttcaggacatgtttgttggcgggacagctgcaccaacagcagttacagtatgggcaatgtcagaactcatgaaaaatcctaaggttatggaaaaggcagagactgaggtaagaaaggtcttcaatgtgaaaggttatatggatgaaacaggccttagacattgtcaatacttaaattcagtcataaaagaaacaatgaggctacaccccctgtgaggcattattagtctcaagagaaaacagtgagacatgtgtgatcaatggatatgaaatccctgcaaagagcaaagtcattatcaatgctcgggccattgggagagaatcaaagtattggaatgaagcagagaggtttgtagataactcttattatgatttcagtggcacaaactttgaatacatcccctttggggctggaaggagaatttgtcctggagctgcattttccatgccttacatgttgctgtcactggctaatttgctttaccattttgtttgggagctgccaaatggagcaatacaccaagaattagacatgaccaagtcttttggcctaactgtcaaaagagcaaatgatctttgcttaatccccagtccttatcacccaacatcctaacttggccatcaataaaaactatatgataacctggctaggtgtgcttatttatctttatcaagtgtattagaacgacgtgtggtgataaagtgacttgtggcgtgtttgtttcacggattaaaatgaatttatgagaatataatattcttatgtatgttatgaatttggaaaaaaaatattattccttaaaggaaaatagttataatgatttaattaacttttattttcatgaagagtgacaaagatatatttccatgaaattgtaggaaattatgttctaatccaattataacttacattttaattcttgtttttttattttaattattttaattttgaaaatattaaaatttagtcaaacacacttttaaatatctcaagaatatacttaaatgattacgggctatttgtttcacagccagaaatgtgaatttttcatgtttgttaagaattttgaaaaatattcttgagtattgtttatccacattaaaataatagttataccatcatttaattcatttctattcatgtgataagaggtgaaatagttatatttctatggggttgtaggaagctatacatgttcttgcccaattataacttccatttcaactcttattttttattttaatttaaaattttagtaatatttttagtaatattagacaaacacattaatatgaaaatgtgataaaacatcatttcctgaaataaacacattcttagagcatctttaatgttatatcttgagcaaagatcttgaattcaagatttgatcttcactagatctcccaataaaagaaatgaagagatctccaacatggagaataagttcttatacaaaaattttcaaaatctgcgtattgtttaaaaaagaataaattttctctctctttttctctccctaagatctcaaattgagatctaccattaaaggaaaaaattagaaagattttaagagatatttaatcctatgtggtactatagagtccaccaaaaaatggtataagatctcaatttaaaatctaccactaaagatgctcttaggtgtgtttaatcagacatattattaatttatctttattttttctttaatttattttaaaaattaatcacttattaatagttaattatttctactatttttttgaaaaataacgattaaaaagtaacacttccaaatatgtacaaagagagcaatgatgtgaagtactcctttattaatgaaggtgatagatttaaacttcttaccaataatgtagctaaggataaagatggacgggtgtcctcttgaattacatggctgtattctatcactatgttaatgataaatacgtataggcgacatttcattatgtaaataattttaatttggattaaatgtaatttttcatcatctattttatttaatatgtaattttgatttttctattttaaaattgagatatttatttcttttattttaaaaaattcataattttgttctccaatttcaaaaatacaaacatttgatcttcatattttaaaaaatatgtaattttatttctgtattttatattttagaaatttataattttagttaaatctttaattttgtcaatgtttcattttttttatttctgtaattaattaaattatttattaatgataccttaaatgaatattttagatttatgattcaattaaatcaaaataaaagaaataaaattagacaaaagtgagaatttgaccacagttacaaattttttaaaatagaaaaattaaattgtgatttttttttaaaatagaaggactaaatgtttctattttaaaatgagaaaattaaaattacaaattttttaaataagaagatcaaatgtctcaattttaaaatagagaaatcaaagttactgaatgaacaaaaataggtggaacaaaattacatttaattcttttaatttaacaaagtttcaatattatatttattttaattaatcaaatagttaacattttaagaactcaccgtcttaactcatcattaggtgacacaagtatgattgtgtggctgaagtaattgaggttgtctttgtttatcattgtctcgatcataaggataaattcatagcagctagccaccataatatttaagtcaattagtattaaaatgaaatccaaataaagaaattaaactctagctgatttataccttcaaattacatccttccaagtcaatttaagatttgaaatttgacttaaactcaatcttcaatgcctataaataaacatataatatatggaaaatgaaaggaaacttcaaagatagccttaggctgaaaacatttaattgcaccattgacccttgatttgtgctttataattttttatatgcagatttgtgctttttaattgcaatctagaacttggcatattattttatctcgaactcctaacaaccattttaatgaattgtcttttcattatattaattttatgtttttttcttgaagaattgactattgagggtgaacaaatacatgttctttttttttttttgttataattgtttaaaatttacttttttgacagaaatttaaggccaaaaggaagtatattatataaaggggtgaataaacaagaggtgcagacatccaaatcacaagctgtgaaattgaatctgcatcaaccaaaaaaacaaccgtaggaagttacatggaaaaccgaataccccaacaaatccctacgaggcattcctagcataataagtaagaaccccaaagaccttatcccgtgtaccgatttccatcgacggtggtgtccctatgaggagagacctcacccgcgatacaaatcaaatagcatcaccaaaattaaaacagtcctttcaagcaaattaaatgacatgcttgacattcaaaaaaagagaaccaaactgtattattaataagctctatttagtttaaagttagaatttattttaatagagatatttttaaaactatgacgtgtctcttaattttgctgtaaaataaaatatgtctgaattttagtttagttttttatattaaaatgtgtgtttgtgaaatattaattctttgtgtaaagcaaagcaattaagttcttttttttaaaaggaaataatttatttaataaaaagcaggaagaagaaacacaccacatcatatctatgtttaacgtgagacaaatatgactttaaagtttaacgtgagatacacatgactttaaagtaataaattatgtactacaatctaaaagttttccatgctcacaaacataacaaataaaaaaaattaatttgttgaaaaatacttaatctcattaaaacttaattatcctcaagcagaagatcgattatcttgagctcaaatttaagcttcaccatttcatcctccggcataatcatggtcacaaacttcccatcaactccattcttgatagaaccttttggccacggatacaccaaaacaaccccttcatctccaaccccttgaagggtgtagtaaacaaactttggtgtttgttccttcaattgtaggtcatacacattggtttcttccaagtctagaaatgtcaaattgacaccatacacaaagaaatcactcacaccttggtctctctcaactgcttcctcaatttgcttcctctcatccacaccttgatctgcaagcatgctagctaagattgtcaaatcagtgtcaacaattgagcattcacttccagcctcaaccttgcatatcacttggttgttacctatgatatcatttgccctcttatacgggtcggttctacacacggtcacggttttaagttcagatcctgatcgaacccgagccacgcaatgccaaatcatggcacatagggattcaaaaggaggagtttggtcaagacttggaccccaaattcgtgcttgcaagtagttcaaccgggagctagttaggtggaaggagaatgtgtccatttttttgttgttggctgggatccaatgatcccccaccgggtcaaaccgttttgctgaaactggatccttttccggctcgggttgtctgagtgttgggacggatcttgggatgttaaaaagctttgttaggccatttttcattattaggccccatgagttaatgaatcctgaagccgaaagcgggtcccccaatacatgggcccaactaagacccaatgaaattccaccgcacttaaatttagttacctgcatattgatcaaacgaaaattgagttacctgcaaaagccaagttgtatgatttacagtgatagaaggaataaccatctagaaataaattttcagatttttttttttatatttcgtctttaccaagtaaaaagaaacattaaacgtatttatactcttttatctaaatgagattttcaaatttttgcttctaattttcttatgtaaaattttgcttcttttactattattgtagtaaggatggaacattttaaaaatggagataagacatcaatgatattaatgtaattgtcttttaaataattttcgattatatttaatgattaaaaattactcctctcacctaagacgacatctctcttaattaattttttaaaaaacatttttttattatgcaaattaggaaaacatctttctgaacttttcattcccttgttcgtgtattaagcattaaaaaataaaaacaataataattttaccgtattattatttttgatgacttgtgtttaattcgacaatttgttgtatataatatgtaaaattatattaaatgtccccaggaaaacagtctttatcgaatttaaacgtgttaatgattccttaaaaaaaacgtgttaatgataaacttcattgtataccaaaaatatgagcctgataaactcgattctgatcaatatcggcgtatctatatagaaagagtctgatagtaaattaaaacttcattgtataccaaaaatatgtgtatgataagatttaaagataggtttaaatactcctacaatatccactttgttactctatgtagtaggtagtattaaatattaaatgcttttatttataagacattaattgtatttattttttcatataatatttatttattaaatgttaaaaaatttataagaagattaaacattactaaaaatcaaaatattacctcggaattatttatatataaaaaacaagtaataatgtattttaaccgtatacaagattctgtattaatgataccacctttttcttttttttttttgttgaatagttaggatctaccttatccctcttatgaaaggaattgtccaccataccatactatactgcgttctgaattaatgtaagggcaacttatgaagataggatggtattaacatctctaccagaaaaacattgcgactaattaacaggtcactatttcaaccaaaccaggacacgataaagagggggttttcaccaagagaaaataacttcattatgaatcaaatgaaagtattctttaattaattcttaaataaaaagtaagtaataagaatttttacgatttttgagtataaagtcttaaaaaaattatgattttgatttttttttaataatgaaatcataaaaaattcaacgactttattttttaaaaatatttatataataaatttttcaccactttaaaattgtgattaattttaaacgattttaaagtcggtttaattataattttatatttttgtttctactattttatttttctatcatgtagttggacactataagtctacaacttcatttttctcctatttcttttccttttaacatacttatttttaatatatttttcaatcaatataaaaaatgtatttgtacaaataatgaatgttttttcctttttttataattttatatttcatattattgtatttctattactctacttttgtgtcatactatcgtgcaagacaagttatggtataactgattttatttaatatttttatattttgttttgtaatttattattatttgttaaatttagaaacgaaaaggtccaaaaaatataaattaataatataaaattaattccttatttattttatctaattattattggttaagaaaatattaatcaaaaaataattaatggttaagaaaaaaataaaagtcattggattataaaagaattaattattttaattttaattattctttcaacgactttaaagtgataaattataaaaaatattaattataattattttaaattttaaaagaactaaaaaattaattataaaatataaaattatgattaaaataacttacaaaaaaaacattaatcacgattttgaaatagtgaaaaattatgactttatataaataattaaaaattaaaatcatttaattttttacgatttcactattaaaaaatcaaaatcatgaattttatatcactttatatccaaaaattataaaaattcgtacgacttattctcatttaaaaattaattcgaaaattactctcatttaattaattgtaaatggagggttaaaccttttagtagttctatgttccagttattccctgttttaattcttttcttcctcttttctcttctcctctcaccattcttttatatttaactctgtttctctcttttgctttattttcgatttatcattgggttcatctaccaccgaccccaattaatttgggttaaaggtactgttgatgttgatgttgatgttgacgttggaattatctctttttgtcaaaattcctatagagtggtagggtccttacgcatgttttattgtactatattgcgcagagggggcacattaaatgaggaatattttaatcgtccattaaaaaatttatatttgagaataaatttttacaattgtatgatttgttttgtgtatattatcatatgtctagctgttatttttttaataaacaattataactaactaactgttttttaggaaatggaaaataaacagaaaaatatgattttcaaattttcttattctttaaaaaaatcttatttaaatttcaaatattttatctttctccatcttcttactgaatgaaacattggataaaagagtcgatgagaaatacgtgttgtacagctgtagtcactagcgtagcaggactaaaccccagttagtagctagtagctactctttttattgaggcattgattattgtatttggtaatccttcgcggctcacaaactagtatacaaagtatatcatcttttgaaatattaaatcaacaaagaaagaaaaacactagtagtcctcaataactagggatgtggaccatttcatgaaaaaatatgggttggattaagattttgtgttcatatttattaaaagagtttagttgaacgagccggaccatcctgacctgtaataatgtaggtcaaatgtgggccaaagtcagtccagtccattaggttagtagctcaccaataaaaaataaaaatatttaatacgtaattaaataaatggtttagaaggagagtgattaagaagaagtgtacgattttgaataatccctaaccctaatatatttccatttagaatctaataatgagttatactatatgtacaaatatgttttgattgtctgcatcattgtaaaacacatttcttataatatgttaaaacttaaaaactaattgaaaatcattgttaaacatgtattccctggttgcttttacttctattaaacatgtatttatattaaaaattattgttataagattaagttaatacatattattaatttttagtataaataattatatttaatttttaaaataattttttacctttttaaaaaaaatatttatttatttattttttatgggatggcccgctagtccactaacccactttaaaatgggacgagctagtatttttagtccactttgcaacaatgggtcagcctcgtccggtccacttttttgataggttggaccagtccagtccgtttttgggtggactgatctactttaccatccctatcaataacatcaacgaacatgtcgatacaaccttaagtaatttacatctaaaataaattttaataagataaatattttattttaaatgaaaatatatataatatattagaccttttttgttaacgtataatattatttttaataaatgtgtttttttatattttatacaaactaaaaatatttttttatgagtctaaagctttaactttgtttgttttatccttaaacaggactaccaagtagctagggaaacaacgttgtacaactaaatttgtatctagagaaagttttaattaacttttttctttttaggaagaaaacttataaaaagtgtttggttttctgtttataacctttggactatatttggatggtggaaaataagctttaatttactttatatatatgtttgataaaatcactttcaaggtatttataactgaatttcaatataaaaaattctctttgtcaagtaggcgaaagctattactacttcacactcaacaaaaaccttatcgatgcaaaataaatatatactccgaaaatatttttatactgtattttaattgttcattcaaacgaatgacaggaaggaaacagctaccaaaaactacgagatgaagaccccatataactaatgaatacgggacatcgtttctcattgatttttgattttcaaaaatatattttccattattacttggtaaactagagacaaactagacgttcatctcatagtgttaattagtactacaaatctatgaaaatattaaacaaaaaagtaaatatatacaccaaatttaaaacataaagctctctctcccaaaataaatatcctcttacattattttacaaaaataataaataaatgaaggaaaataatagtctttcaaaaaattaaagtgatatttattagagttattggtggaaagtcattctctttctaacactctctttgtgattaattattttttaaaattatcaattttgataaattttatatctaaattataaaagagagtcattaaatgataagtgagatccatcaaaacttaaacaagtttcaaccaataactaaaaagtgttgaaaaagagagtattaaaaataacgtcactaacatttctcttgatgaaaaagagaattaatgttacattaaaaagtcaaatacaatacttattttgaaataatttttttgttaattgcaacacatcggatgtggaataaccaatactcaacattcaaaagaaatataaagattaataagaaaatcttcctctaatttcattgtggcctttcggtgtctattttcctttaactttattcatcagttaaatattaacaattaaaaaaccttttatctccattagtttgaattggttgtattttgatttcgagtgtgaaaattatagaaatgaaatattccatttcatgattaaaaaaacactaaaaaattcctatgaaagtagtactaggttttgtcatacataaaaaatgaataataactaataagtgtgtgtcacgagtgatgcataatatataaattagtatagtatctatagggaaattattaagcacctgcaacaaaacaggaggagaaaaagataattctgggccaatgacttggtgagagacgagcaacttgtacaagggccaatccttcatggctagccactcatctagggttttgttgcacttggcctcaatgaatcttgctccacaatcattgcacttgattaagggcctacctgaatccgatcgccgaaaccggccacatgtgatgaagtaatggttgaacaaagtgaacatgccatctttaattttcatgatggttaggtcttgtgcagcttcattatcaaagaagtacaccactctaaggtagtgaagcttcatagccaaatccaacccactagggttatggaacacatctgacccggtggcccggcctggcccaactgaggatagcctaacatcatgcactacacactcttctaagaccattttggcttgatcctagaaattgaaagcaaactctttggttggtgggatttttttttgcttaacaaaagagagagagagagagatcacaagggaaaactggaaaagaggctttgattgttgtactaaagtgagtttttgcctacgagcatatatagagtgatggagtggtgtcataagtgaaggaccatggagtggctggttggagatttaatggaaacttactatgcgtttcattcccattgggtcgtacgaaataagcggttggaaatgccaaatataaatattattttttgaaacattattgatcatttacaaaactatttttttttaaattttcttcatattaattatttttattaaaatactgttaactattttagtccataaataataaatgctataaatcatctttttttctttttcttgcgaggattgaagagttgaagaaattaggtttaaaaactgaaactcactgttattattctctccatatattaattatttagataaaaagtaattaactgaaaaaagtaacataattagtccaaatatttttaagagtaattttagataaaattacatttacaaacaaatttaatgttagcacttaaattaactaactttttaaatatatatttaaattagttataagtgtcttatattataaagacgaatgaagtaaaatattattactttctccatcccattattattgttgtgtaagaaaaaaattcaaaataatgtcatattaattttttatgtaatattaattaccttttttacttatattttttgtaatattaatgaataacaaaatttataaataaattatattgataatataaatttaattttataaaattattattctcttatttatttattattttttcttaatctatgtaaaataagctagaatgattattattttaggacagagagagtagtaaatatcttaaagatacttgctaaagaaattaataaataagatatatattaaatttgtactagaaatcctgaaagaatatattcttccacaatatttattttgatttttttctcttacagaacatttattatgattcagaagtagtaatattccatttctgattaaaaactttccacttttcgttatcattttccgtatacttcctctatttttttaaggatattcttctatttctttttaattgttgagttcttttacaaaaattggttactatctaactgttattttttttaaaaaagataatgttaattattattttatcaattatactcttatttttcacttaatttttaattattttacacttatgcatttatttatagaatggaaatgaagaggatataatagaaaagtccacacgaatgtcatttgaataaaaaaaattattacattttgtgtttatatagaaaccttaaaagatagataaaaaaaatgaataaattatttttagacaaacattaagaacactgattaaaaaaaataaaagaaggaagctttttaataaaatacgtaaaatcatgttttctttgattgttaaatacattctcatataatttcttttacgattcttgctttcccttttatacccggactcatttactaataatgcgatcaattttacattgttccccacattcacatggcaattaatattatagtctggtgagtggtgacatctcaccgatttatagaggaaaatagatcgatgtcatccacattggtttgttacgctttgcagctgcgtatttatagtctgtcgtaaaggatatttataatcctaaataagaaaataacttcaataatttctatgaattaggtgtttcaactttcaataacgtttgaaccggctaaaacttatatatatatatatatatatatatatatatatatatataccatattattaatataaaatatttatcgatttttctgataatcaatatataactcatatcaacaacttcttgactcagactatgtacggtttggatgttagtaggaagtatttacaaaaattcagaaggaataagtatataaacactcaaactgtgattttttaaaaatcaatattataaattttaaattattttatttactacccaaattatattattagcttggttattttatccagttagttggttactcctaatgattttttttttaaattatcacactaccaatgtttcaaatgtacattgtgattatgagtttccatgtaagaatgaaaaataaatcatctaattcatataatcatatttgaatggataaaatttaaaatctcattattactcaaaagagttatgtaactttttaaaaattgtgcataatttatgttatttaagcttaatcatttatataagacatcagacttgatcgaaaactaaagcaaatacagttcgtatattttaaacctgatatataacttttatttaaaataatgttttttttttaaaactgttttaggcccatatatcatattgaattgtcctgtaagataggtgtgtactcgcactttaaattcgagtaatgtatatatagactactaaatcatatttatattatcaaggtttaaagaaaatgtacgtgactttgttacttgggaatcggacaactacttataatcttgaccattcatatgatatggtccatatttattgttcttatttcttaaactaaacaagtgttgtcgcatgaatagttttcattctcatcagattcaagaaatctaatgatagcctatcttacattttttttaaaaaaaaatatatataaaaaatactaattacattttaactcaaataatatatataatcaataaataataactatttttttaaaaaaaattaacaattaaattacattttaaataaatatataaatttacctttttattaaattattattgttattttattattaactattaaataattattatattttaaatatatggagggaagagtagagggttgtatccactttaagaaattgaagaaaaaaactcaactccaacctcaatcttgattaaagtgagttttcatgtttgagtgtcaaaattagtatggctgaataacggggaacatgctttcagaatgggggagcatgctttcggaatgcacaataccatgcatgcccaacccaaagcatggcgaggccaactacaattaattaatgtccattattttgctcacaagatgtacttcgatgtggagggccaacgaattccattaatacatataaattttttttaatcatttactaatttttgacattcgatcttacgtttcatctaaaaaatcacaatgcaagttatttattatctcaatccactccactcatttataggtactattaattacgcgtattctttattttgattcattatattttataattattttattttaatatattaaattttaaaagttttattttgatcttttatatttttaaacgtatcgttttgattcttttttcaatgttaatagaaatgttagtgttctattaatttttaaaattttaaaataatcaaattaaatgttatatttttgaaaataattgataaatgaaattattatcgttattaaatgattaaattaaatgaataaaataataataataatataaaagtgatagttgttgtccgtagtttcatatctatatttttctaatttatttaatgattttaattttttaaataaaaaaataataatgatttttagtcgttattatattaatttaactattctaaaatttaaaatactcatagacattaagtttctaataaaaaattgaaaaaagaataaaaaatgatacattttaaaaatataaaatattataataaaatttttaaaacataatatacaaaagagaaacaaatgtgaaatataataaataaaaaataacattaaattattttaaaatttaaaagttaagataactctaatatttctaaagaaaaattgacaaaaagtatcaaaatcatacattttgaaaatataaaaaatcaaaataaaacttttaaaatttaatgtataaaaaatgaaacaattgtaaaatagtttttttgtttttaaagaaagtatatctaagttgtttttttaggggaatgatctaggttgttggaacaacaatattacatatgtataaattatactaatattgcactattttttactgcagcactataaatattctaacaccatttttgtatgtttttttttttgcaaaacaaaaaaacggtaaaaaaattataagatttaattatattttttatcctcagtttttttttattattggcgaatttaatgattgggaataaattttgaacttttttataaattgatgataaaatgtgtcgaattaaaaaaattaaaaactaaaaaattagtaataaaaattataattaagctaaactataaactttatgttattaatgaaacatgcaagctagtaatctatgttggaccaacactgacctttcctgcgccttccctcactttttacaaatcatttcaatttaatttgagtttaaatttatgtaattaatactcgataagtataatttaattgcaagcacacgcttaatttgtgaaaataaagtgatatatccaacctttgtagtttgtaccatatatcaccggaacgaatccagaaagacattaaaagaaggttcaacttttatacttttatttaagtatctaatttctcattgataattatttaataaatatatttaaaaaatatttattatcagttttatgtgtaaaattaaaaccaaaatcgatctactactaaaagaaattaagcattgtaccaaaaaaaaaagcatacatttactcaaccttctatttattaatttattttcttttgtcaatattttttaattttactctttttcttttcatgtatataaaggagcatgagggcccttgcgcccctcctaaatctgtccttgtatatcactatcatattttttttattccattatttatttatcttgactatcattatatagggcgcgcaacaacttttacagtaactatatatcaaaattattttttaattcctatttaaaaaaatagtatttatgtaggaattatatacgcactataatgaacatatgataattaattggaataaataaagtacacgtgaaaatttacatataggaaagtaaaagatgcaactaattaataaacacgatataatgcatataatgaaaaatgaaagtaccacttcttatagatattgtatctattgagttataagattgatttagtaattgaataaagaataaagaatggaggtaatggatttgagtttattaatgaataaaaattagcaaactatcaactaatatatgattgatctaataaaaagtgagaccaaaaataaaaattgagaacgatcttttttcctttaaaaaatgatatctggaacttttttttgtttatatataggaatggaagaagttttgagagatttataacaattcaaatattttttttcaattttgaaaccttttaaccaacatattagatattttttacttttaaaatgttaataataattacaaaatttctgtctggaagcctaaaactcgagatttaattagttgttttatttttgaacaagccatgttagtatttgtcaacaaaatatatatatatatatatatatttgcatttacaagctgtcaatactccattttatcaaaatttcgggatctaaccttgctaattcaagaatttcaactcccccattcttgcaaataaatatcttcggatcaaaataaaatatcaaggctctaaatcagccgaaaaggtatttccattgtccccattccccaacctttttgccgttcgtgttactgatgcaacatgcaagtatccaactcatctcacatgcatcgatcactttcatgttcatcaaccttcatcgaatttaaacaggtgtcaactgcctattgatagaaatgaatatataatgtcagagaaagtagttgaagtgaagataatagtcctacatacatttcatgttgatgttgataactaaatccgggttgctaagttaatatgccatcaaagtcttaaattcgatgtagttttattggtttatagctgacacctagacacttcattttgtccattgagctcaaggtaaaactaataactttgtgcaggacatgcttattagtttttgtccatagatcgaagtctctgtcaagttaaaagttttgaatgctcagttacaatgactttgattttaatttggcttatccaaaaaaaagttaaaaggtttggtcatcttacgtgtaataaataggtttaaagatgctttttcaagttttgtaattagttttatctaaacttttgttatttaattatattgtgcttgtggtgtttttttttaattcttattttttagtttttattagtatgttttatcattatagttagattttcaatatatttattaggttgtttaggtaagataagcatgattcaatgcacacaataatgaattttgtacactcatagggtgcttggctgagcattctttttgcttcattccccagcactttttaatcaaacaaattagcttacaaaaataatgccagaatatagcagtgaaattaagcatgggcgtggattaattactctcggtgacatgacattcagaatttctcttcaatataagtagtgggcatactttatcccatgagttaattctcttagctttatcctcttagcttcaacatttagtaggaataagtaagcatcgcctctcaatccaatttgtcagtatacaaaataaaccttccaccatagaatagagaagtctcttggtcccctcaatcatctttcccctgaacctagttaaactcccaattgagagcttctgaccggttcaattcaagggtgggtctacccattatggaaaggtcattaccctccctatccttttcttgattccccattctacgaattcgttgttactaattcatcaaaggagcaaaagcttttggttttaagaaaagacatatagatcatccccacttctttgtaatcagatcttcaattcgccaattaatattatgatgaaagctcctgaactcaagtttttcatgttaaaaatgttttaaccttgattaaagttttttctataaacatgcatttccctgatttgagcatcaattgctttatacttatgaatgtttatcaccatttattaaatgttttgactcatttatgttaagaataatgagatatataactacgcgcttcttgcatagttgcatttgctgccacgaatgaagttatgtatagaaataaataactttgttatttagcctttgcttaaatttcatagaacttcataatcaatctcattttgttaatttgacttaaagaaataagcttgttaattaataaagttcaggtaaattttccccaaataaattttggttgtaactaattttgggaatttcaccatcaataagaaattgggatatgaaaaacaaggataagggcaaggaaaaagttgtttaatttatgaatccgaattcaaaatcaagtgaaattagatcctaatattttaattttagtttttatttcccttttagtgtttatttaaattcttaaaaggaaaatatagaacagatttaatttcttcaattactttttttattagtaatattttagaaccgtcttcttcttatgaaaatgatattcaatttcagctagtgtcccagtaaagttatcggattattccctaagtcagtttccaggcctataattaagttaatatattctttaatattaatattatatgaaaccaagatcatgagataaaaaaaaagttttccgtgtcaaatgttgcaaggtgaaaatgcgctttttttgttaaatataaaacctaaaaaagattaaaaaattcagtaagattttaaaataatgacatattttcaaagattaaaaattcatttaagtcattttctataatacaaatattcttctacaactaacagggagaatgacatgaacctaactcagcaaaccaggttttgctaaccttgttatagaatccccacaaacgttttccaagccgctagaggagggtcagattttttatttttttatttatcagcaaacaaagaatattatacaggaagagtaccggcagggttagatatgtgtcttagctagttattatatataaatgtctaagtcataattaattatgatagcttagctaactcttctattaactaatggctacacgtttgcagcttcatcattcatacaccaaaccacatgattaggaaataaccaaatagccttccaaaaccaacttctgggatataaacgaagaagaaaatacgtctatttagaattttggatatattcatttacttctctaaaaacactttaaaaaaataaaagtaatatattttacataaactaaaattaacttatgcacgaactaatttgtaaaaaaaaacatgagtttttctaaaacgtgatttttaatttatgaaaacttattttattttatttttcttctaaaagtattttttggaaaaagttatccgaacataccttatactaaataaataagggattcttaactttgtactattgaaagtaattaaggagaatttctataataaaaaaagagtaaggagagtttcttactctttagcataaaaatgtagttaagacttaagagtgatacataaatgacccactagaaggctataaataaatgatccacgtgttggggtaaataaactataaatagcagcaaaggagacattataaataggggagtagtggaacagctcaacagcaggcaaaatacacacagtggtgtaatatgggtggggtacccctgatactctcttctatttatattttataatatagtgcatgttcaataagacagaagctttctagctaggagtttctctgtaatctataattaactagaatggtgatatatatcacttttttggtgtaatctaaacaagccgtgtattctactgtcagaagaaatttatctgaaatcacacacttatcccaattctgttgtcatatatggagatcgaccctcaaatctgaatggtcccaactcaccatgttggttcatttgctttctccaatgaaaaattgatatttattattaaattaaatacttataatatactgcaactattcttatataatagattaaaaaaattatttatcaaagtaaaataattttccatagtctttttcacccccttactttcttcaataaaaattatatgtctttaatttttacctatttgatttttctttaaattgtaaaactcacacaaatcattttctactttttttttccttctccttttcatgcatgcatggtgcgtcattcatagtgagagacacatggcttcaatcttttttagtttcaatatttcggcttttgtttaatttgagagagtttctacggttcccaaaaaattatgagagttttgacactgtttgtttttttaaccgataaaattattatgttatttgtcgtcttattaattaaataattttttatttttttcaaattagttcttgattatttaaaatataaaattacaattattttaattaaaaatttgattaaatataaattagagtaactattacctcaagaaaaataaaattgtgattctgtattaatattggtgaaagagattaggattcatattttaaacttatgtttaatcaaatttttaaaatttaaaatagttttaattttgattttaaaaactaatttgaaaaaaacaaaaaatctttaattaatgagaagatgtatgacatgataatttcgttggttaaaaaaataacaataccaaaaccctcacaattcttgaggcaccataaaaattctcttgatttgatccttcaataattatgatgtcaattcatttatactttttttttcttctccttcttatcaattcgagtcattcatagagagagagacattagtttatttattttttcttaaaatttcagtattttgtattttgtttgatttgagtcgtttgaccctgtccaataatcataatgttcattattttttcattaataagttacaggacaaaaatcactcaaacaatttaacgtgtgattgcataggtaaccactaaccactacaaatattaaaagagtctcattaaataaaacataagaattgaaatttgtttatatttaatataaaaaataagagatttttattatttatatattcattgataaaaaaaagttacacaagaagcgtattagagcaactttagtgcaagatcttgagtaaggatcttgagctcaagatctggtctttactagatctcccaataaaggaggtagagaaatctccaacatggagaatgagttcttgtagaagaacccttaagatctgcacattgttaaaaaaaaaataaatttttttcctctttctctctccctaagaactcaaaataagatctaccattaaaaaataaaataggagggatcttgagagatcttcaatcctacatgacactatgggatctaccaaaaagtgatctaagattccaatttgagatctaccactaaagatgctcttagactattaggtctgagggtataattaatagggcgagacgggaaggttgttttaactttgaacatgtgctttggtggtgcatgcatgcagctgcgctgtcacttgtctaactatatatattcaagattactagcagaatttatagcattggttctacttcacatgacaactacattagtactatttatattcaagattctactgtgtaaactatcctttagattgtgttttactgattttattcttggtcttttttttaaacaaaaaaacagacaaaaggtttcatccctcataattttttatgatttttttccgttgaaattaaaatcaaattctaaaaagtttataataatttacgcactttattaaattaactaaactaaattccgttaataaaagatatgaataaataatatgcaaggcaagatccaatatactctctattaaatacattatcaattatgtatctattattttatatcttagtgaccaacttaatttgctgaaagtttgagtccgtaattaaaactatatacattcaaaaaaaaaaaaattacatatgatatggatgagcatttttaaattctaatgtataagaaagaaaattttattgctttaagaataaaaataatttttattaagatttgttaacaaattttataattttcaataaattttaaaaaattaaaataatgtgtttaaaaactgtgttaaaaaatactaccaaacactaactagtcaaaaaatttatatgcactgtgaaagattaatacatattagcatacatataaataaaacaaatattttataccattatttaacaatgaaatcttatgtattgtaagatagttaactttgtaatagtcattttaaaaattaatttgaaagtaatttttaattaactagtaaatataaatagtgtataaaaactaaatttaaataaacttttcttttatcggattttatatataccatcatttcagactgaataatgaacactgaagacttcatcaccacttttgtgttctgcatcagactttctagccaagtggcatgttgtatctgacaacataaccatgatagatatataagaccatctccaatgcagtattttaagagagtttcaccaaaactcaataagaaatccatataagcttctagcattggaggtgcccatgtactatcttctaaccatggaatgggacgtcattcattgttacttgtaagggaccaaaccatgtccttaattatttttttaaaatattactatgtataattgttttaaattttatccatgaaataactttctttttagcctcctaattaaattttctccttctatcatagttttggccataagcgtaaactattcacttgatcactgaactgttatcattttaagtttgttctcataaaaaaaaattgtgattttttagttcctacaaatgcataaaattttagttttgcttctatgtttcctgtcgttaacattggagaatactttaattttaaagtgatataaaattgttataaaaactttctgacggtgacaaattactaaaaaaatatttacgaaaaaaacattttcatataaatactaaaactttttttgggtaagatataatgactagataatttatcataaagttcatgtcggctgagaaaaaaaattaatgttcatgtctttttcgtcataaagattctcggttgacaaaagaatgattttttttttattcagttcattagctttgtaatctttcctcgggtttttagttctaggcttggccctccttaatcaacgaaaacaacgacggaagctgaacatagctatactgggccaaagcccaaaactaatatgataaacatgggatgttggttcatttcagattgagctttacaaaatgcaatgggacacagctggaaacaataatgagtataggaagttttagtcataaacatgttgttcaatgttttatctctagaaagcatcaggtcaagaaatgaggattcccatgatgatgaagaaagaaagaaaaaactcagatagccattggaaaagtaaagtaattgttaaatgtatccatcttattgttgctaaatgtatccctcctcctttttttttttaataactttgcttatatacatttttttctacttttctccctcttttcaaatatatctcaccttctttcttcctttggcttctccttacaaatactacctcttcattcctagtccattttctggctattactttattttctttctctatgccttcgatcgcttgagtcatcctcttccaacaatgctatttattcggttagcacaaactaccccttagctgtaaaagaacacattgaaagctcatattcttaatatgaaaggttatattatatagaaagatatttcatgttctgtttgaatcatgttcgtttctactaagtttagaaattaaattattaaagtggctgccagagattatcctttggtgtttgtggtaaggccatatttttttttgttcgatactgttgtttcaactatgaatttgtccttattattttgggattagacacatatacaaaacattataaaaggaatacatttgtaattttttattgcaaaagtcgtcagagaagaggaaagaaaaacaaaggcattgtcaaagaatatgaaaggtaaagaactgaaagaaagaagcagaagtgtagaatatttgaatgggttaaaagagtaagaaaagggggaaatgatatttatgtaaaattactaacagaaaatgggaaagaggtatgtttaacaattgttgggagaaaaaaaaatatataattggaggctgataccatagttttgaagaccgatctgttgttggaagaaaaaaaaaacacatttagaggctgataccatagttttgaaaaccggtcctttattggaaggattaaaaaacacaattggtggttgatactgatacaaaaattaatgtttaacaattggagggaactgcgaaatttgtgcagagataatgtcagaatataaaaaagaaataaacggaagataagaaacatctacaactaaaaatacggaaacagatcttaaacaacaatttcactatcctagataacagggctcttttctaaaagaaagataaatcttaaacaaaaaatcctaaatctttttttttttgagatgaagaaaatcctaaatcataacagattacaaaaaattaaacaagttgactaaaaaagtaaagttttcattagttaggctgaattttgaatccaattttgaaaaacaattaaaaccaaatcaaaccgtacttatacatagtttgatatatcaataaactttaccttgtttgtggaagacttgaaggtgtaacaccagtacaccacctttctctcttacctaaacatggacttactaatgataagttactataataccatagagttttttttaaaagcaatgttaaaccacacaatcaaccaaatgattggacttaaatgattaatgtactgaaattaagattgaattatttgggtaatatgtaagtttaatcattgacaaaaataaattttgattagattttagttatcttcctaccaaattttaaattaattaaagttcatttttataatgaatcaaaaggttaagacaaaaaaattcccacaaccaaacataaagagtttcatttataaaactaactaggaccttagttgtataaataaaattttataaaattccattatcaatttatttattttctttataatttcattatctccattatcgttttattttttgctgacttgaatgtcttattacggtatcaatgttataatgattacaatgtacttgtaaacttattaaatattaactgaatgttttagaaataaaaatataaaaaccaaatcatttattcaaattaaaccgtaattcacttttataatttaattagataaaaaaacattatcagcaactttttgcataaaaattgattcaaatcaaattggggtttactatgttatctacacttatataatatttaggttcaaaattctgagtgtgtacgtacgtagcaggtccctctgtataattgttgtaggctccactattttaattttgttgaaagcttagatttttaaaaataaataaataaataatgtagcataattaacttaggatatggaaccataccctctctaccaggtttgtgtctcacaaagcaaggcgatattgctttcagctaaagtgttacatacaaaaaataaatataaataaaatgaaacatccgttaagtatattttaggattagtcaattgttctcaacgttttgcatagatattttgggctcaggtggtggtgttattttgatttctctggtgtgatagaaacttagctgaacattgaaaagactcggtagtcaataacttataacttctttttgatgctgaatcctagcatcaaaattggcatgcaatcacaaggttagattcctccttaactatgacatgttcgataatttaatgcatagatggactttgtaactgacccacagttatgaacctccacccccacggccccaccgtaaaaaaaatgttggaaatctaatgcaacaacccagaaagaccataaacggtaccacttagttgcaatatcccttggacgacactgggatagcattgacttgtcttctccttaatgaaatatggttaataagaaaagctgttaaagtcatttgagacgatattttgcaagtggtttaaaaagaaaatattcaaagcaaatttacaaaacgaaagtcacctttcacatctttgatttacacgagtgaaccccaccatctattaaaaagattcaaaccatccatacccctcctactcaatttaaaaccatcttgttatattatcccctacgatataattccattcaataatcattaacactaaagcaaaatgattcaatgaccaataaaatttacaggaaactgaataaatgaatccgattacttctttttccccttctctatcatacatattctcgtaaaatcagagttctatgttacaaatcaaaattgtggtggagttgcaaagaccacattcacttgcaaattctcattctcaattaaaagagcagctcagctctcagcaaaaaagaaaaacaagttgcaaaatcttgtacctctcccctccccctctccacaacctgtacaaattctctgttgtctaaatgaattactatgatgcacaaggtgagagctgcacccccaatctggcagtaccaagcatgcaacttgtgacagatgttccctttccaatcagtaaaaaatcaagacaatcagttgcagcacgagtcaccatccaaacagtttaagatcaaggcaaccaatgagtcactcattatttgctgccagtgtgcaagcaacaaaagaatgcatcaagaaatttggaaacattttccggtccatgcttcagttcctcccacacggagtgtcaaaggagggttccttgtgcacacatcataattgtttgaagagcatcgtgtgacaattaaataatcaatcagtacggaatgacatatggaagagcaaaaacatctgctggctctatgtgcagagcttctgcccatacctgaggtgtctccccaacctctgaagatttcaccacagattttctttcttgcgaaacattgctgccaaatagccacgcttgatcgtcaaaatcagaccactgctccaccttaggtactgaatatacctggcctaggtacttggtatctggatgtggtggctttgcagttgcttcagttaccaaatcagctggcacattggcagtgtgagtcttgtttgaagaagctgcaaatggctgactttcaatgatgccattcatcttgctttctttctttactaccttaacactggtggcttctcgtggcctatctgaagcatttggaatggaaacttggcaaggttccaatacccttccgttttcagtgagtggatgagaggaagacgatttcggaaactttttgggcaaactgtcattgactgtaacaaaattaaaaaaaaaaattataacctgtctattcaacagcaaaaaaatgcgtacaaacttgagaaaacttgtcaatatgactgaaaaataccaataattgaaatatcaatataagcatgtgacatcagggaaaacccaccgttatctcacaggacgtagtatctggtattagcttattaggtcagcaatatactagtccaaatccagtaagagaaacatcttattcttttttaaatacaacttaacaggatcattgagtagaaatgagaacaagactcatcataagtaacactcaccatgtggaactccatttgactcaatgtccttccgcttcttgagattttctccactgacagcgttcccatggctgttcctaaaaggctgtgtgaaagaatttgaatttataagtccaactttgttgctttcttttaatttattttgctctgttgttttaagttcactatgctccttagctttctcctcctttttcttctctttgtccctgtctttgtccttcccatgccctttcttctccttctctctatctttccttttatctcttcgtttatcatcttttttttctttaacctttttctttccttcatctttcttttccttaaccttcctttcttctgtcttttccttggccttttctttttcatctttcttttccttaaccttttctttaccttcaacagttgcttccatattcctttcaaaatactttcccaaaagtttgggtattccaccaactccaggatgaaaatttccaacatgattctgaactggtggtgcatttccaattggccggacctcatcctgtattcctcgcccatcaatcttcttaacatgaagacccatatccttgagtttttcattaccatcagaccttgtgccacctggacctttagccaccaacctaacagtcccctcatcttttctatggtttgtattggtaaatttatgaacccattgattgtcagctcctccatcatcatccctaatcctccggtccaactccaggaggaactttgaatccttgctctcttcagccagatgatttttctctcttgccttctccccattgttaccagcatactggttggtgagactgttctcaaacaagatacccttcttatcatcttgcttaatttccttttgatggggtttacctccgttgagaccctcagcttgtcttgggaaccctttgtcatcagcagaactgcttttacttttatctctatctttgctcttgtccttgtctttatccttatctttctttttctctctgtgtttttcctttttgtccttcttttccttatgctttccatctcttccttctttctctctcttttccttgctctccctcttctctttgtccttcttatctttcttatgttttttttctttctgcttttcctgcaagtcatatggtgagaagagattttaagaataataatcaaataaggaataaaccaaaatggcttcaaaatctcttcacccaggagcaaccaaagagaaaaaaagaatatcaatagtaaaacatgcaaaaaagaaaaaaaaggctcctgtctccttggcaatcatatatatccaaggaagaagccgcaacaataacaacaggatcaaagtccatcaatacacattgtctaccgacaaagtattctagattctaggagagcacatttcagccaactataaccatactaagagggaaaagacaaatccataaaagtcaaaaataaaagtatagcaattcaatttgatgccttattaaacattcccaatgattagattctttaaacccaacagaaacaatttcattcttatactgccggccattcagatccctattttctttcttttatggcttttggcacatattacaaataagatatgctacgacacttttaacggaagttctgtattctacgcctcacattgaaataaaaagatcaaaaaagtgcaactgacatgttttattaaggactagaaacaagaaactccacaaaataaaatatgcatgtccagttataacccatagatgaacaaccaggaaacttcaatgataccaaggaaaatacccttctatgttcctgtagttgaatcaaaatgaatgcaaaatagaacaaaccttgatcattttattcctgaaaaaaaatgaaggcaaagaacaaacaacaaagccactgcttttgatcttctaattaacaagaagtaatccaatacatcatagtcaatacaatagtataccaaacaggaccaaagtcataactatactgagctccattaggatactccttgtagaggagcatccaaagcaaaacagatgagactctaggatcttcctcttgtgtgaaattatccccatttagtttttgaacacccattacaatgcagtgtcatgaaatgtttgaataaacagacgggattgatcacttgaactgatctgaccatgaaccaactatgtctgtaattcaaacactttcaaaaccttattaataagattttatacttaattaaagtttattttcttagaaattataattcatctaagatttttattatctttggttataagtgccctttagttgacttaacgttattttgaccttatgcatcattgtaatatagacacttcctgtcactagaacatatgaaattctagtaaggacttagaagtactctgatgactcctctaaagagagaaagcaagagtctgtccacccttgatttgaaatggataattcaaatcaagagtggatacacattaactttctcattttacacctcactttaaaggagttaaaccccggctcatcactctacacagagtactctaggcttattaatctacaccaggtctcagtagctcaacctccaatttgattttaaaaacattgacatgattcaagaatatgctctagaggccaacccctacatggtggatttgatgaacttaatattagcaacaaactgctaatcaacatcaacatcaaaagcacctttaatccaaattaattgggatcgatggtagatgaacccaataataaatacgagaaggttgaaaaaacaaagacggtaaaagtaaagaaggggaaaagaaggaaaggggagatgaagaacaaaggactaaaaagggataatctagaacatagagataacaacggatctaaccctccaccaagcttataacttttctccatttttcctaagacacaccgttcgccaatctatatcacatttcattaaatcttgtttaactacctttttctagataagttacaatctacctctacctctctttgcgtcgagctcttggtaacaaacttctgttcttacaggagcatccaagggcgtctcattatgtgtctcaatctatgttcattcatcttttcactcaccaatactactgttacctttcgtcgaatatcttcatttcttatcttatccatcttcgtataaccacacattcaccttaatatcctcatttctgctatccttattttatgttcatgttgcctatatgctggccaacattcagttctatataacattgtcagtcatatagttgttctatagaattttccttttagcataaaggaaattttacacaataactcagatgcactccgccatttcatctaccatgctctaattttatgatttacatcctcatcaatctctccacctttgtgcaaaattgatctcaagtatctaaaaacatctttcttggatacctcttgaccaagtagatgcagggatcttgatcatcatctcttaccagtgaaaactcacatttcatatactcagtcttggtccagcttaacgtgagtcctttagactctaaagtgtttctccacaattcaagttttctattaacaccatcttagatctcatcagtaagcacaatatcatctgcaaaaagcatacaccacgacactttctcttgaatatattttgttagttcattcatcactaagaaaaagagataaggactaaaagtcgaaccttggtgtacacctaccgtgataagaaaataactttaaatttcagtacaagctttcacacacatgatagccccatcatatatatccttaattgcatttacatattttaacagtacttttttcttctcaagagcccacataaaacttttattgagactctaccatatgctttctcaagatctataaacactatatgtaagtctttcttcttttctcgatatctttccattaattgttgcatcaagaaaataacttttatggtacatcttcctgacataaatcaaaattaatttacaaaaaccttggtctctctcctcaagtgatgttcaataactctctcccacaacttcatatatgactcataaacttaatgtctttataattagaacaattatgaataatcttccttatttttataaatagacacaagcataattttcctccaagcatcagatagaatcttatttgtttgaagaacttattaaatagattggttagccattttattgccacatcccccaggcctctccacacttcaggacgtcatcagatctcaaagctttattatttttcattctctttaaagtcttgttaacttcatatgtattaattttatgcacaaatcttctattcagatcatcataagcgtcatccaaatccacctcacttttattgtcatccacattaaaaagtttgttaaaatagttcatccatattccatttacatcttcatctgttaccaaaaaattttgattttcatccttaatgcatctaatttgtgtgaggtctttactcttcttatccctcatttttgcaagtttgtatataactttttcaccattcttgctcccaagatttttatacaaatcggcaaaaaccttgcctctaacttcccacactgctttctttgcatttttcctcgctaatctaaacctttgcaagttctcatcattggaacttttatgcaaagatctaaagcattcctttttctgtttaattgtctcctgcacctctccattccaccaccatgtttcctttgtaagaaatttgtttcctttgcttctcccgtcaccttccttcccacattttggatacatttaaccatcttatttcatatttcatttgctccccccataggctcctacagtccttcacacaacatgtttttcttgaactctatttgtttttcctcctttagcttccaccatcttatctttggggtttgaaccatcttcctcatattaagtactttattgaaccgaacctctagaactatcagcttatgttgcctagcggcacagtctacagtgtagaccttgtagtcgatacaagaatttctatcttatcgtctaaccataaagaaatcaatttggctacaattttggttactatgataggtgataaaatgagactcctttttttggaaaaaggtgtcgcaagcatcaaattgtaggctagtgcaacgttcaagatatcttcttcagtctcacttcttgtcccatagtcaaaacctccacttcttttaccaacatgaccatttaggtcttctcctaggaaaattttctcctctcatggtatccctctcaaaacctccttcaagtcttcccaaaattagttcttatcatttgattgcagtccaatttgggttgcatacacactgaggatatttaaaattaaatcacccactacaagcttaatcagaataatcttgttgcctttccttttgacgtcaacgactttatctctgaaacttctatcgatcataatttcaataccatttcgactcttgtttatacctgtgtaccacaacttgaaactggtgtcatccactttcttggccttttctccaacccacttaatttcttgcaagcaaacaatattcactttccttctggcaaaaacatcagctaactctttcagtttacccattaaggttcctatatttcagcttcccaattgcatccataacccttgggcggtattcacctaccaccctcgcccatctgcatgttgggaccctgaccaacttatcaccaaatccgggttgaagacttgacgccttgccttgagacaaggaccctagctcacttatcactgcatcccgggaccgatgcagcgccttgccttgcggcaagggctctagcacattttcgctacacccgggatccgatgtaacgcgtcactatgaagggtacactccaacaaaatatcattatgggtcatctcataaaaatagatatttttttatggtcgattcgcaacacctgataccaactctcttcctttatcctggcttgggacaagccatgcattcaaaaataattataatgcttagtaaaaggagagactttagaaaaagtaataggaaagactaaataaaactattgaaatgtaatcatttaaataaggaatgggttgcaactaaatgcagtcatgatctcccacatgcaaaatgtttaaaacttcattaaatccactttttgtatccattaaacaatcaattttatcaccaaaaatttttatataagcattaaatcgatattgaaacaggatctgaacaaaatgggaacaaagcatagcaggtttggtctttgtaaatgaggagaaacttgcaattctccaaatattagaacgataaggaaaatatttgtaaaaagtgaaacactttaacctccataatccattctatttcaaaatgcatacaaatgtccctgcaatgtacacataccaacttgaaaactgcccacattatcttccctggattttcctcacttttttttcacaaacttcctatttacaatggtggttggttgaggtttcaataacaaaatgaagaaattacaaaaattagaaaaatagaggaccaattatcaaaccaaaatgctaaagtaattattatcatgcaataccttagtcatgcagtaattattatcatgcaattcatattatgtagttcaagttagttcctatcacgcaacaccttaaaggcttaatcatacttaaaactcccatcaactaaaaatataagctaacagcctgctccacaaaagtaaatctactgcataatgtactccctttaatgaatcatccaatgcaataaatctagctgatctacataacttcaacctctatactcaaacatccttatccaacataacagatgttgctttattattttctctttctcctcaaaattttcaaattccaaattccatcttataggaaagctcagctatctataagagatgctactggtaacggaatccaattaaaagttgaaacaaagaaatggtctaatagaaagaaacaaataaaaaattatcagaaaaagagatatggccactagccagtctctctagatagtcaaatatcaatgggttggtggaagtccagtccagcaaggaaaagagaggcattatgggggaacaggagaaaaagcatggaccaaagagacagtcactacccatgaagaggcccagaggtcgctgctgaacacagagaagcatcacagacaaaaaaataaaaaaggggacaaggggagaagggagaaggggggatcacatcaatacacaatcagaaattttagggtacccattgtctttttatatagtaccacttcataaaacttgcaatacaatagtagagaagaagtatcttgagagcactgtagctagctcactataaaaaactatgatcctgaattgacaagacaggataatcaataatgttatgacatggtaaaaacatacaccatatcaaccaaaaagaaaagctacactaacaattttgaatgtcacctaacaagaagaatgatacaagggaaagagttgactagcatcattgctagtcaaattgagaatttaatgcatatacttgacaaaacattaattagttcatttctttctaatataaaatcaacctgaagtagttgattgccatccataacttattatatgattatttcattagcaaatcatagttggccctgaaaatatataacttattaatctaatcaaggtaaacataacacgaactcaaggggcacataaattgatgtaaccagaagaatttatacaagaacattatacaaaatctcccaccttgatcaccacattgtagcaacctctagtttcaccacaaaataaacttgaacacttttacatgtttggggaaaataaactagcacaatttcactgaacttatagcggaaaatctgctaccattcaataaatggttcatgattgagtaaaatccattaaaatcacaggagaaaaaaggcaaaaaaaaaaaaaaaaaactaatgttgagtaatagaatattttttccctttttctctttcttctttgaacagaaagaatgagaagtctactgaattgtgcagatagacagcttaaaacaaaagatttgaataaaaacagtataaaggagctcaaaaaaaggggaacaaaactcatgtttgattcaagaagtcatggtagccaataaaccagagattaaacagttaatatattttagatatatcaaaccctcaaaatttcctataagatcatctaagaagaatacaaccacaaaagccttttcccaatagttggaatctgctacaagaatcaaaccatgccattgtactacgtcaaaaacccagcttttgccaaggctatttttagatcatggtattttgtaatggttttacttaaattttccttggtaatcacaacaaagtatgttcaggtagaaaagccaaaacaagaaactaaaatagtcagaattatttatacaaaaccatacacccaactatttacaatcaaatcaatgtgaattcttggtcttcatcttctcagtcgagtcagtcccacttgtgtaaaatcaattggttgggttgggccaagaatatctagaaccaattttcaccagtgtaattaacttaagagtatgcatctgattcccattgagtatacaagcataatatatttaaccctggactgtccttattcttcacagctattatttcaacaaagacatagaactagcaatttcccacaacttgcttaagtcaatttgaaccccaaaaatgattataattcctataaccttactctaaatccattttagatgaggtgaaatgctttgttctatgactgacaagatcaaggatattcaaagatgttgcttccaaaaaaaaaaatcagtaagtattacaacgaatattagaagaatctccaaaacccaaatataaatggacaatctctactaatactaactttttgcttcaatacctaaggtgccaaggcataccatcaagcacaaagttcatcattttacaacaaaaggactcgtaaaaaaataatattgccaacaacaggcatagaacaagcagagcatatacacttttaatcatcataatatcccttcctcatcaccagcagtgttgttaaatagcggccatggagaaatggcgtggcagatttttgccaactgccatattcaatttgtgaagggacgcccgccatggcagaccataaggcacaatggcgtgtttatatggcggaattatggcctcccaccatctgccattgataacactgatcacaccagtaatgacattatttctccactcaatcctcttgaaacttatatattcaggagtacatatcataacagtccaaaaatcaaaattttggacacaccacaggaaacctaacatcttatagacatataagacagataaactccagcaaatcaagtgaaccaacttccatcaacaaagtgcagaacccctactaataactgtaggccaaaacagatactgtaatgtaaatatgtaagcctccaatcatcttcaattgcacccatacagaataatatctgatactttcatgacttgtgatagttcaaaagatgccgattaaaatgtttcaagcaagaattttacaatgaacttcaaacaaattgaatttatattattaagaagaaacagatgaaaaattaaggagtacaaaattaattcaaacatgaatgaattcagcactttatatgttccattcagaaaatgacgtctatcaatatacatttaacgttatgcaattcacaaaaaactccattttgcatcacagttaaatctatgtcaaattatatgtacaatgtgagtgtaggaaaagtgtattaaccttttttaataagtccacttcatctgttatagccttctttctatatcctggtggtggaaatggaaaacagcgcgacattgcacaaaatccaaatacgcctagtgtaaaattcttctaaatttgagagtgcttgaattagtttccagtagccctgttccagaaagggaacgaaccagcaactatgctcctgtccatgcaccatgtcactgcattcatttccagctttaatattcctccataagcctcttactacaaacacaaattgtggaaaccaccaaggtttactacccttcaccaaaatattcaaacagctcaaactatactactaaaaactgatgcaaaatcaacgcacagcacagcaaccacttgttctaactacttaaagtcggcaaatggttcaacacaattccaatcagtatatgtttcctacactagtgttaagctcagactaattatatcaattcaaagggctgcttcagaaactaaaaaggaccactgaaatcagatactctagtttccttgtgagccaactaagaatcaacagctttttctttgtgtcaaatccctaaaccaaaatgatccccaacaaagacaaaaagacagagaagaaaaacaccaaaaatgaagacccagaaggcccagctttttgtagtgtgtccagaaacggttatccaaatcctgatcactgattcactgttattaatatagacaatcttcttccatgttcaaagaagcaatgttaaacaccatcttaagcaatctccaagtgcaaatgctcaaccaccgtaactctaaatccaaaatatgaacccctgaaaagaccagagaccatgcccatttcacgcaaccccacgcagagaatgaacaagcacagtcttcctttcaatcacaccctccgatcaaaaccctaatcactcaggaaatttgcaatttggacaagtgcccccggttacgatccaatgaaaccctaaaaaaaacacaaacaagctgagtacacatacccggaaaatacccacaaagaatgaaaaccctaatcccaattccgaaaatttgttgattaaacacccaaaaaagagagagcataaagcagcaaaattgaagaggataaagagaatcaaacactttttgaaacctaagcaataatgggtatcgatcaaaagggggaaaagaagctctgattcgaagcgttgacgggaaaaaaaagtgaaacatcgattgatgaaggagagcccaagtgaaatttgttgcataagatcacctaatctgctacaaagcgaccatagtaggaggacaagatctctctctctctctctcatgaataaacagaagaaagagagaacaacaatctcatctcaatatacacaaaaatatgaatatgtatatctatatgtacatataataatataatatatggttttgggggaagtactttttctttgtgtgttctgtgtgttgttgttgttgttgctatggtatgctattcacaaagctagagccgttattgctctctagattctgggttttgtttctctttgtttaccactctgcttcttttcttttcttctatttctttctctctctggttatgcgtatttgtttgcctttctgtgcttaagttgtgtgttgtccctaatatatatctcatcattattggtcatgtgtttctttttcattattttttatttttattttctcactttctctgttctttctctatattcctaagtaagggggctcatgtgctgtttttccgttcggaagtcacacgcgaggctgaaaaataattgaaaacccaaatgccgaaaccagaacaaaaaggaagggcaacaatggaatgccaagcaaagccacgtgtttattgtccatcacacttgatgtatagttgtgaaatctgatttgattattgacttgaaataatgaatcagtaatttaatcggtggattaataattgatccaatttgatcaggaacatattaaacattcaaaattatatatattatataaatatataactaacattatttgagtaagaaaaattcatttatatttcaaaattcgatttttttaaaaaaatcaaaattttatataaaaaattgtaaaattagtcaggtcgaaccgattcaaccaagatcaataaactaactgatcgagtttgaccagatcaactacataatcaatccaataatgaaatcggtccggttagaccaccggatcttggtccaacatgtccaaccgacctgatcggatcgaatttcacaacactgaatgtatgtactagtgtatttaacatgtcaagtggataaggattccaatctcaagtccatttgtatgaatattatttgtttgagatataatttcttaaatgaatattttttaatatagtaattagaactttttatttctcaattggatctgatatatttttacaagttttgattttttgagtcaattataggactaatcctagatgaaggatttagtcacacttaaaattcattatttccaagatgtatataatgtgaaaattgaatataaatcctcctcttgttgttaattgagttatattgattggatttatatgaaacttttaagagcacatttgctataagaattttttaaaaatttctaagaatttgaacttggagatgtttaatttttgtgtttggtttactatttaaaaaataacattttcaataaacattgttttccaatgatgtttctacacaggttttccataaaattattttcatgggaaagttagaaaattaagggtatgtttggtttgagaaaatattttctttttttattttctttttattttatgaaaattattttcattttcaaattttcatcatttagaaaaatatgtttgttggttttctttttcattttcattttcattttctgattttcttcaataattgttttccactcattacttagaaaatttatccaatggcattcactagatgggagagattgcaagttttgagtgcacggtcatgttattgttgactgttactaggttccaagagaaagaaagtatgatgcaaatgaaaagaagatctaaaaaatttcatgagtgtcatgcatgattagtgaaaatgcagaaaatgaatttttttcgttttcggaattttctaaaatactgaatttgttttctaaaattgaaaatgaaaacatctaaccaaacatattttttcaattattttttattttcattgaaaatgaaaacaaaaaataataaaaacaaacagaccctaagtttcctatgctgaaaaaataattattgtgataaaaatatcatattatttttattatatcgtgataaataattaaagtttataaatttctattaaaaattaacgtgaaaatcttttgctcttaagaaatatatataaatattatataaaaaagaatctcaatcaaacatatttttcttatttttaagaattatgattctcataaattatatcaaacacaccctaagagattaagtgctaactctaatatgcgataccttgcattaaaaaaatgtcaagtaatagataatttttcatttatttgcctagtttataaattcgttagacaaaaatttacggttatatttggataaaagttgaaaacatgattttgatgattctaatgcacatttttacagttcaggtcacaaaataagaaaagaagaaaatgtcttttcggaaataaaagtatttttgagttctccaactaatatccagacatgtactataactataatttattctcttgttttttatttatattttattgagagtggattttgtttcgaggatttgtaagtttgatttgtatttcgatttcaaatctctatttatttccttcaaattcaaatgatagtacgtgaactaatagtcaaatcctcttcatagctctcgtaagctagcaacatttaattagctttagtgaacaatttgtgtacagtacggtgatgaactctgtgtatactcaacagcatagcttaaacaagagcttggtatataattagactagctagtattctccatgcagacacatgtcccatgttcgtgcacgtctaggcacaatctccacaatgaaaaacaggatcattcagcaaaggatggttaatgggaagaagtaacttctctctccctcaatacatatccaagaaacaaaaaggaaattacgtattcccttatccaaaacatataaatatcttcaacttaactgatttgattgttgaagtccttttaataggtattttattgcacaccaaagaaaaagataagagattatatcaataatattagacaaccgagaagatcagatttgttaacaagtgaacttgataagaataatatgtattatatataagtcaaaatattatattttttattcgattaagaccataattttttttcataagaattgaatataaataatgaaagtttatcacaaatcttgtaccttactcaactagctaataaacaagaatgaataaccaaatttgatttgattattagacaattaattttataaaattaataaaaataactttgaaggatcttgaataagtataaacttaccagccaaacatttattcaatttatcctgaaatcaaatttgagatcaacttagtcaatttgacaaatgtatacatttaaaaattgactttttactatgactttaaaagtttttaacggtgatatgttactattatctttaaagtcgccgttataaaagttaatatttttggactaggggtgttcacgggtacgggtcacccgtgaatccgaactgatccgaaccgatttgaacagtttgggttgggtcatttatatatttgggtcaaaaccgaatcgaaccgatcaaaaccgttcatgtacgggttgggtcaagggtttagatttacagatccgttgatccgatgacccgatctgtgaacccgtaataataatataaattttattatttatatgtatatattaaaaatttaaaataatttgataataaaaaaaggtatgatattgtaaatgtttaagattacattcaaaaataagataagatattttttaatattgcattaaaaagtaggataaaatatttttaagattgcattgcataatataatagaatatctttaagattgcattggataatatgataggatatatttaggattgcattcaaaaattggttaaaatcatatctttaaattagtataaatagaaacatattttggtgttcatgtatgcattccattccaaataatattagagtattagagagtttatgtctgcatcattaagagaattgttgtgagatcatatagaagcgtttgacaagtttgattcttcaactctcaatcaggatttaaaggtacctatttgcttaaggaatataagcgtagatgtactattttattgtattctttttcttgactttggaaaaaaggtcgcagttgggaactaggataccaattttgtctgtattcttgatgaattgagacatgcaacttatggctgggaaactaggataccaatttggttgggaaacaaggatatcagtgtatctctattcttggtaaattgagactagagctttttgatgggaaacaaggataccaaatgggataattgttgtgtaagggtagattaggaaactaggatactaagaactcttgtacacaaaattatcatagtggagttatccattggattgattatccaatttggaagtcgtgattttttacccaattgggtttttcacgttaaaattgattgtgtcttctttatctcttatttcaatattattgcttctgctgttcaaatgaacaaggtccatgttacttcatttatatttttgtttatttgtttgattcagcaaatatggttgcaacaaaattggttataacaaagcttggtttgtaagaaataattatgattcagactattatagtaaatattgttcacaaatcttttgttttaatttatattataagtctattttataatattatgttgatggtattaaatgaatcaattttactacttttatacatttgataatattgtattaattgtatgagatatttgaaacaatcgtgatataaaataatagttataaaattaaattaaatgggtaacctggtgatccgaaccgaaccgaactattcatgaacgggttgggttgagttgggtttcaaacttttttttctgaaaattgaaccgaatcgaaccgatcaaatttgattgggttgggtcctaaatttggccaaaaccgatccgaaccgacccgcgaacacccatattttggacgacgatttttaaactattagaagggtataatttttaagacagttttatcatgaaatcatcttagaaagtgttcttaaaaaaaggtatttataagacggttgttacaaaaaatcatctttaaaagtctacattttaagacgattttttatgagaattatcttataaattgttatctaaaaaaggatggatgcttctaagactatttatgggagaaatcgtcttagaagatccaatttctaaaacgattttctcgaaaaattgtctcagaacattttcatatttatgaaaatgaaaaatacattttagtcattttttatcaaaattatcaatgcacatgcttgtcaatgtcaaaaaatatttaaacaacatttagaaaatttgtataaatttaaaaaataaaagagaggcatgtgcaatttccttaatattatgtttggatgagggattttcaaattctaaagaatttgaaataccatatatttgaattgctcttatttaaaattatttaattttgtatatgatttgtttggataaatcaattcaaatttttaattatgatgaaataattcaataccttcatatgtaacaatttatttttaaatttataatttttcaagaatatgaagataaatacaaatttattttcttaaatagtgacaaaatggagatttactttttactatattcatcgatcaaaatgaaaatcatatattttttaaaataagttttcataatagtttttcaaaaataaaaaaaataataaaaaattttgataacctttctttcttggttcctccttccttataacctacaccaactcaccaatcaaaatcgtcatcactgactaccttcacgctgccacctccaatcagcattgccactgtcgcgtcccgccaccgacatcaccgtcattctttctctcctccgcgcgacatcactatttccctctcctctgtgtgcaacatacccatcgatctctctctccttcgcgtgtgacagtattgttgctgttctctattgttctcttttgtgtgtgataccactgtaactttcgttctctctctccaccgtgtgtgacatcactatcagcatcgttctctctctctctcccaaatgtggagtcactagacagagggtgagagttgagttagagtatctctggaaaaaatttcaaactctattttttgggagtattttaatgttgactgatttaatataattaaattgttagataaaaatacgcatttgaatttgcttttaaatgttttatacaaacaagtcaattccctcaaaagaatttaaattccctttacaaaatgaattatccgatttaaatatatcatccaaacacatattaaatttcatgaaaaatatgtataagttttgtaaaaagaaaaaatatgtattatattctcttatgagagagatgtataatttattttaattaaaataaattataaacatgaattaattttaaattcttgtccaacataaaattaaatatataaaaaatcatctaaatataattttagactcgaaataaattattatcagattaaactaatcacactcccagagccagtaaagttagtctaacgtgaaaacacgcgccaagtgaacaagtgtattacagagttaagaagaaaaatgggcaaaaatttaaaaataatacaatttaattatttaattagcaaaagggggcagtttaaaaattatttagcaaaatggggttgtcaaacacgcccagctggggcgtgtttaaacacgcccagatggggcgtgtttcaccagatggcgccacgtggcaggctgaaacagtgtcctagggttttcgcggtgttttcgtaaattacggaaggtcgtaacttttgactgggacgtccgattggcgcgaaaccggtggccacgcgctcgaaattgagaggagaaggcctgggcaagttctcgaagggtttatgttttagggtttcagattttggattttgggtatcgaatttagggtttgggatctagggtttagggtttagggtttcagatttaggttgatgggtttcagattaggttaggggtttacgttgtgattagggtttcagattttggattttgggtatcgaatttagggtttgggatctagggtttagggtttagggtatcagatttaggttgatgggtttcagattaggtcaggggtttacgttgtgattagggtttcagattttggattttgggtatcgaatttagggtttgggatctagggtttagggtttagggtatcagatttaggttgatgggtttcagattaggttaggggtttacgttgtgattagggtttcagattttggattttgggtatcgaatttagggtttaggatctagggtttagggtttcagatttaggttgatggatttcagattagttagggtttacgttgtgattagggtttcatattttggattttggtatcgaatttagggtttaggatctagggtttagggtttagggtttcagatttaggttgatggatttcagtttaggttaggggtttacgttgtgattagggtttcatattttggattttgggtatcgaatttagggtttaggatctagggtttatggtttagggtttcagatttagggtttaggatctagggtttagggtttagggttgactatttagggtgtatggtgtagggtttagggtttagggtttagggtgtagggtgtagggtgtagggcttattgtttaggatttagagtttattcaatcctaaatcctaaaccctaaatcctaaacaataaaccctacaccctaaatcgtaaacccaaaaccccaccctcaaggaaagagctgagaaaacagaagcaaagtgaagagataaaatcaaagaaaattgcagttaaggaagtgcttgccaaggcaaaacttgaattggaaaactaattactcaatattagtgaagtgtatgtaacactcattaggttattcactggcataaaccctaaatcgagatccataacccctaagtgtgtaaccgaagaactaaaccccaatcacaacatcaaacctaaccctaaaccagaatctataaaccttaggtctgtaacccaagctctatacactaatcaaaacattagacctaaaccctagaccggaatccatacaccctaagtcccctaagtctgtaaccgatgacctaaaccctaatcacaacatcggacctaaaccctaaaccctaggtctgaaaccctaaaccctaaaccctagatcctaaaccctaaattcgatacccaaaatccaaaatctgaaaccctaatcacaacgtaaacccctgacctaatctgaaacccatcaacctaaatctgataccctaaaccctaaaccctagatcccaaaccctaaattcgatacccaaaatccaaaatctgaaaccctaatcacaacgtaaacccctaacctaatctgaaacccatcaacctaaatctgaaaccctaaaccctaaaccctagatcccaaaccctaaattcgatacccaaaatccaaaatctgaaaccctaaaacataaacccttcgagaacttgcccaggccttctcctctcaatttcgagcgcgtggccaccggtttcgcgccaatcggacgtcccagtcaaaagttacgaccttccgtaatttacgaaaacaccgcgaaaaccctaggacactgtttcagcctgccacgtggcgccatctggtgaaacacgccccatctgggcgtgtttaaacacgccccagctgggcgtgtttgacaaccccattttgctaaataatttttaaactgcccccttttgctaattaaataattaaattgtattatttttaaatttttgccaagaaaaatgcatgaaaagccaagtcatgtgcattggttggttcccattaccactgcgacaattccaggtggcgttaccccagcttgtcactactgctacctatccacatacgtgtcaaatttctagtgagacacggtttgtaaaatatttatattttattttattttattatcatttttcagtacttcacataacattataaattcaaaattttgtttcatcgttaattgttacatattctaaaagaaaacgtatctgttaatatttttaatttggattttttgtcttttcattaggacctgtgaatccaacacttggacttatcaatggaggaagctgattgagcggttgtttgtgtggacttacaagtgaaattttctcgagatgtcaatttttaacttctattatacagttgtatctgatcatcatcattttaatatctgaaatgaaaaccattattaattgaatctaaccgtggtttcaactttcaattaattaacggtgttaaactaatataatactacatgtttaagtgttgccttcaatacccatgatgtcctacactagtcagtttttagtcatatgaaattactccgctgatgccaaaattattgacaatgtagtttttttattacaaaattattgatggttttcaaattataaatactatttttatttttgaaatcatggaaaaatattttgagacctcgtgctttgtgctcaaatgggtagtttagccaacttgttatgaaatcatcccgttaagacattcctcatgtagaactagctaactgtataaatcttcaaaagtcaagaatctctccatctcacgatcggaaagctcaagctgcatgcagtatctattgtgttcatcatgtcctaaaccattgaagaattatgttttaggttgttcatctcagtcaaaggatggtaacctctcataaggaaaatgaacatgaaaaacgtacgttgtcataaagcagctatatatatacaattaatcgttgtcactgaagcaactatatacatgtaacattcacacaccccctctcttttatatatgaggcaaaaaagcatgtaatgctataacccattgcagctcccatgttcaaaaaatccaacttagcttaaccagtggtagaagcccatcaattaattttcttgtccatttaagttactacaaatagttagaggaagcttccaaagttgaatcccaaaagggagtgttaatatagcttgcacgcattctcttgttcctgtatgaacaatcaaataaatccattcaaaagataaatgaatttaagataggtgggttggattgtacgaggccctaaccttaaccttgtagtacactaggatgagatgacttttttttagtggacaagagtcttgcacgtcctccataatttatccaacatttaaccatttatgttgatatactataggataaaggcataaagcacatataatcactttttggaaattatgattggattgaattaaaatctaacggggacgtacgccatgacccatgagaagttaatgggtagtggtgaacattctcattattcaagcacgacaattttgttcttttgtgtgcacgggtgtgtatatattcattttatatgcttagtttgttttatagtgatttcaactttcaagccactaaagctttgaaataaatgagaatggatttccttttaataaaattgcatgaggccaccgttggttcaaggaagaggttaccaaaagatgctgttggcctcctcttttttgcagggcctttattaatttttcgatcttactttccggtactgattatgaatttaaaaggaaattttttattaaaaattatatgaaaactcatttaaaatttgtaggaaaatatatttctaggtatcctaataagaaaatccttttatctttttctttaggtcactggttaatatttatcttatttttttagtttaatatctctctcccctttctcaatatattcatgatacatcaagttaattaaatgagtagtgcttgtattctataagagagtaaaagagtaaattaaaaatatacaattatacatcaatgattaatattaaaaatttaataattacggcaccacttaaaataaaataacataacttttatttttttagttgtaatatttcatgatttgatttaatggtcaagatttttgttctcactcagttataataaaattccatgtcgatctctagataatattaaaatatttatattaaatatttataatgattattcttttttaataaaaataatttagaatttattagtttttaattagtagatagtaacatataaattacattttagatttatgataaataattcatattatgatataaaaaatttcttcaacggtttattaatattgtcttatctctttcaatccgttatttttatctttatttttaaattgaatttcaatatttttagaataaattattaatattaaaaataacattttattatcatttatcataaacttataatataatctatatgcttgaaaatatactagtaataaatttgtaatgtaactaattataatcaatgtaatttgtctaatctttacataattaagaggattaatgaaagaaagaacattttgatttttgttagaggtaagggtgtgaatcgatttttataacacttatttataatgtttaataaggattttctatttcggaaagtttctatcaagtcttttattttttaaaatgccataacacgattctttgtttatttatttattttaatgtgattctttcggttcaatttagcatgaaggcattaagtgaaaatttcaatagttttaatcaaattaaactataaaaaacagccactttatttcttattttgaaaaataaaactaaaccagcaccaacgacaccagacaagtgttttaagggtcaatacttcatctatggtatatgatttatgatggaacataattaacatttgagaggtgaatgtttttatgaataaacaagtgtttgctaaggcatttacatctagatgcgaaaattgtttgcgagtaaattcaatagggagtgaaacttctttttactcttttccttaacaagcatatgtagatgcaaatatttttaatttccgcctctctgattttcttgattttgacatgcaaatctacaattttagtataattttttatttttttaaaacatgataaatataatgccgattaaatattcatacattaaaactcatcaaaaattgtaacttaacatctcatcctgaattgaaccataagaataatataaaagtatttttaaataataaaatatcacattgagacatcatttaaaaaaataaagaacttaacggaggcttttgaaaataaaatggcttaattaagcattctaaataattgatcatttattgcttatttaaataagtaaatttattaagataaacctttttttatctttgaataagcaatttgaaagacaaaaaatgataaaaagttcaactgaatatcaaattatattggaaatgataagattttcatagtaaaggttttcaactgaatatcaaattaaaaaaatttcaactgaatatcaaatttcaactgactttcaactgaatatcaaattgaaaaaaattattaagtttgcatattaaattcaaaaaagttttaaaatgataagattttcataggaaatattttcaaattcaaagaagatttataatttatttattattttggaaagcttcaatcgtcctttattttttaaaatgccataacacaattctttaattttaaatttttttttttttaaagaaccgccactttgcgccgccaaattttcaaagaaaccagcgtcagggcgttgaataagaagcccgtgtcaacgaaaagaaaggcattgacttgaaagtttgaaacttcaactctgaaaacgaaagaagaaaacaatgtctgggtttgatgactacactcgcttatttgatttcgagaccgagccgtggcagaccctctatgactggtcgacgcggaaccttgctactccggttcctcccatgtcgctggcggaggacacccaacaccacgtgaactagactgtctcggctccggtcgagttgcccagccacccagttgaggcgctggtgcataacggtggtggtggttccatgatgcagaatgctgcaggttcatcggttcggcgcaagagagggagaggggaggcatggactgaagaagaacacatgtagacttttaacgttgtattattttaatgcagtaaatgaatgaaaacttatcaaattctcatctcatatttgtttttttaatggcaggtcttttttagttggactccaaaaatatgggaagggacaatggacaaaaatttcaagccttgtgaaaacaaaatctcctattcaaatcgctagtcacgctcaaaaatactttcttcgccaaaatgcctcactcacacagaaaaaaagaaagagcattcatgacatatccttacattataaaattggagttccttacatcattgatttacaaaattcaatttctcttcctgaaattcgacaagttcacgaaatgcaacaaaaacaacaaatgttgccgctgaatccacaaaacagcttgactcatcaaatgaggggatttgaaaattctgatagtgcatatcaacaagttcatggaatgcaaaaaattcaagaacaggtgaatgaaatacaacaacagctgaaattgattctgcagcaattttcaggggatccatcaaacaacacgactccttagaaatgagtggatttgaatattgtgatgacgagacattgtataaaacaattttctttggttgagtttagatgctaatgttatgggagattaatcttatttatatctttgtattttaaatttgtttgttatgtattttaaatataggcaagttgttagtttgttacacttaatcttatctagttgttttggtttcatcttatctagtttgttatactttgtaacctattagttcaaagttttattatcaataatatcaattcacacattcttctgtaaaatattttcttaacctatcttcttaatagctaatgctttattaaagatatttcttgacataatacaaagttgttttgccgccattctatttttggaatttcatcatggatatgattctttaatggtagcagatattgtagtctgttttaatgtgcaagagtcatgattttttttttctttctcgaggtcataatgtataatttgagttgtgattggttcatatcacttgtttttagaggcagcattttgaagtgggatataagcattaaaagatgtgagatctcatgtttgtccttaacggaagttgtggtctgttttaatatgaggagtcattaattttctttcttgaggtcatgatgtataatttgagcctgtgtatccaagtgactggttcatttctcttgtttttagaggcagaattttgaagtgtgctaagcattaaaagatgtgagatctcatgcctgtccttaaccgaagttgtggtcctattttaatagtatgaacatattcgtttggtttggttatgttgtatagaaactgttatccatgatcgggttaccggcaatgagaagcatgcaagttcaacacaagaaaggaacattaggagagaaagggatgtgagaaatgtaaaaatgaaaatgttaaagttgcatgtgcctacacaagaaagaatattatattgccacatattatatgaaatgtgaaagttgggctggtctgtacggtggagttcggagaatgggctttcattattgagcccatagacggaactggaggaggcccaaacgatggagggatggggattggagtttttggaagcttctagaagggagacgaagccgaggattgggggttctgcatggcgtagcggacgcccgcttgtgctgcgaggtggaggacgtgggagagaaacgacgtcgaagagcttggcgagcaacggcgcgtcgagagcaggttcatgtttcctcacatttttgtttttggtttgctaggtgttaattaccctttctttaatcattgatatatatatatatatatatatatatatatatatatatatatatttattttgttttaatttgatcaggtgcgggagggcatgcatatatatatgaaccttggaagtggtttggaatgatctctagtgtgtgatttttaaaaattattttggttctgcatttactaaattataatatatcatgtagcattttacctgcaaaacacatttgacaaggcctaatcataagctacctatttttatttaaaggggatttcttgtgaccaattgtattgcatgtttgatctaattcatctttaattatctgtttgtatttattgtattacttcatgatatatggttttttctgttgtgttgaaaaggcgtctcatttgttgtctttatcagctaatttgacattttacaattaggattataatggagggtgaaaaaagataaagtgatgcagaataatttctatcacatttcaagtctagtggactaccaaaaattcttgaacccaactgatttaagtttaattcttctaagacaaaattatttttattacttttaattttaagttctactactttgacaatgtttcctttgactttggattcaaatgtcttagtacatacatataaatttcatagatataaattttgtgctacatataaatttcatagagcaaattttcaattaactcttagtaatctgtaactataaataactaatttgctaatgtccccgacaatcttatgaaaatttcatcaactaattctatatgtatgctttcatttttgtagtgattgttggagaagtagccaattttgcagcttatgcatttgctcctgcactacttgtaactcctttgggagctttaagtatcattttcaggtaaggaacatgctattcttcataacattaattattaggatgtttctgctttctttgacacaaatgtggatgcacatcttcatccattaaattttaatttggatgcggcttgcattttggaaagttacaaactaatatcatgatgcagtgcaatattagctcactttatcttaaagagaggttgcacatatttgatgtgctctttgtatggtgggatctacaaatattgtgttgcatgctccccatgtaagagttattgactctgttaaagaagtgtggcaacttgctacagaaccaggtaattttcaattcctgattgtttggtttcaacatatcttttaccattgaatcttgtaaaaaatcaaagtaggaggatacaagatgagtgggatgcatattaagatcttaatagattcaaggcattcatttatggttaatgaaactgacattgagttctttccttcatcaacaggctttctaatctacatgtgtatagttgtggttggtttgcatccttattttctattgtgttctcgatatgggccaacctatctggttatatatgtcggaatatgctctctcacaggctcaattacggtatatcgattatgtgttcagtgctcatatgtgtcatgtaggtcacaataaaactaccctctataaacctaatgttgttccttgttgcataggtcgtgagtgttaaagcagtgtcaatagctatgaagttaacatttgaaggcaacaaccaattcatttactttcagacctggttctttatgattattgtaataggatgtttgtcttttgcagattaactacttgaacaaggtaaactttgacttacttatattagtacatttactgttggcagtcattgtaatttgtcttccaaagtacaacttaaaataattatgtcaaagttaaatatatttttaattttttttattggttattggagtgctaatgttgaaaacagtattttgatttttctgaccttagtgattaggtggtaatttgtaatgctcaagaaatttaactatgcttttgcaatctttgagacttctatcattatctaaatgaccatgtttgcatttctaatctagttcgtggcatttggaaaagttataaacaaaagattttgtattgcttttcttaattggcattgagctatttcatttcctttcctttgccgttatacatgagtaatacgtaacatgcaatatttcagaaatggcatgccatattttttacagtagggatttccaactaacttacaattgaacttcattttagtattggtttttagactttctttaataaataaaaccaataatgttagaatcattcaaataagtgtgccgggttagttgtttaagacaatatgcttatcacctaccaattatattgtaatgctattttatttattttggaatcatgtttcaggctttggacacctttaaaactgcagttgtatcaccaatttactatgtcatgtttacatcattcaccatctttgccagcataatcatgtttaaggtaactaattgccttctatgattccatatatatatatatatatatatatatatatatatatatacttttgtttaaaatgtacctgatgatgctactaaattatgcaatcatatagtagtttaaaacaataacaacaacaaaagcccgtttccactaggtggaatcagttacatgaatcaaaagatatcatcgtgttttgtcaaaaaaccaattcttcaaaaatgctatttaggatctaaatcgtttttcatatatttttacttgaagtttttattagtattcctctacatagttttaactattggcgatcacttatcttatcaactcttcatatagacatatggttgtttatggaaataaaacacaaactaccttttttgaagaacttggacacctaagatctattaaatcagacaaactgaatttaagattatatcatataattttggcatattattgaaaacatattccttaaaatgtcctcaatgtgtaatttcatattttgttttaaaagcatgcatgtttgtttggtagtacttagtacttgaaaattctaacacatagagtttattttgtttatttgttatcgttctattttattatttcaaggaattttttttcccaaaaagtacgttgcacacctaaaagtacttttgctgttgattttcactttcaaaatctgcatcgatggtaacgatagtcagtcacttttccatattcaaacaatttccaccgaaaaaatcaaatagttttgtcattttagagcagcattatattacgtactattatataattaaagtgaaagtctattctcattaatttcataaataaatgtaaaattatctaaataatatatcgtgcttcaccagttcagtgccgcaacccccactaacacaccatgtgattggattataaagatacatatatagcattgttgttattcttttcatttgccagtacctcaaagaatgaggaacataacataatttgataattatgtaatttgcatcagatgcgagggcaaactattctcatttctcaatttgctgtgagagaaaatcgggtcgctgtcctccaattttttccccacattcctgccattttctgctttaacccaagaaattaaaagcgaaagagagtgaatcaccaataaataaataaattaactaacaaaaaaaatatatttgtccatagtccctaccgacataacagaactcaaaaaacggcgttaaacttttaattacaatagttggtttctacttaggtttcagacaaatagattgttttcaaaagacagagaaagttacgtgatatactttggtgcaactcgtgcatagattctttacaaaatctcttttttgttacttataggcatgaatttcttaaacttaacaatacatgcatctagtgaatacagagaaatttatggtggtgataaacaagttctcttaattataaatcaataaacaatacttagtatagattaaataacaatctaatagtagtaaaaattcaaagatagttactaaaaaacgtagcacgcatcatataattaagaatgagttgaattaaattgctatcttgttaattaaactcaatttatatgtaaatgatataaaaaaatccatagatcacatataaacccgacaagaataaaataaaattacagtacctcataattttgtgatctaaaaatatccctatggctaaaagctatatcatacagaaatagggatggatatttgtcactttcttctttttggaaattattttattccatctcaagttttggcaggagtttccagtgcgtaataaatattgtgacagaaatcttgatacataaataagtgtgttttagtttagatatcataataaattattaaaatgatttactttaatttaatttttgaaatatgaaatgaaataaagtagaatttatttttatctagtaataaataaaaacaagcaaatatgataaaataaaatatagctaaattaaaagttattttttgacataatttccatggaaataattattaaaattaaataatgctcctaagaaagttaaataattattaaagtcaattagttatagacaatagaagatacatatacaacatagaaagtgagtcgttgataaggaatggaggataatgataattaagagacttgtgagacacatattgtcattgtaattaatatcattaattttaattaaattagttttagtaactgaggattattcagagatcataattaattacatctatcatgcataaaggaagtacaaccgggaaggggatgatgcaaaggtggggctataataatggacccaaccatgtggtgtggtatgtatatatatactgtatcattgctcttttacagtagtcgaagatcccgggaagggaaatgcacaagaagttccctatcccatagcccataggcatagggtgcctttacaaaaggagattgtggttgttgatatgtccctcctttgtaatagttatttataatttagatatatacagtaaattataatagtagtaacaaagtgttcaagtagatgatatgaattaagataagaaaaacaaatataacagagagatctcaacacagttttattatttgagataaacgtttataaatgaatatggaaataagaagaaaaaaacagaaagaaattttttaatattttatggacttatattagtttatttggttttatgaataaagtaaaaaagttaattaagttgagacgttatatttatatatatgatctatttattaataaaaaaaatattactacgtaagcttctccattgaactaattcttgactatatgcattggtgatcgctcatatatagatgactaaacttttagcaaaacctaaataatctattttttttaagtttatatgtgtgttcttctattttctttgatcttaatttttctaggacgctacctgtattcagcccttgtattgagataaacaaaaagtatatttccaaacaaatagatcgacttctaaactataaagataatttgtaataatcttattcttgagaaattattagataatttaggatcatcatttaattagttcataatcatgattaatttctatatgacacttaattaaatattactgattattttttcttaaattcgaaaaattaaatacatgttatatgaatataaatattgattgagaccataaataaataataatttaaaattatctaataatttttctcacatatgcgctgcacacaacaatttgaaaatttaactggataatcaacatgtgtcattctcgaacgacttagcttaaatttatatatatgtcagaatatcaagcattttcttgctatacagtgggttgaatttatagaatttagaatatgtgattttgaagcatgctagagcttactagctattaattcacacataaatatttttctttttccttctggcatattaaaaggtccatatacaagaaacttagatttgaatcctctataattgaactctttaaagatattaaaaaacaatcaattttcaaacttcacctaactgctttaattggtagaggagattaatttgttccttggacgcatgtgttgtttaaagacaacatgtgattctaatccttctttttatttgtcacatgtgagttgtgctgagaaattatatttatacaataaattaacttatgcaacttttatttataaataagagagaaataagaaatgaagagacaataaaaaaatgagataagtgatagagagaaaagaaaacgttgtataattttttacctttggcggctgataataaaaaattatttagttttcttgtatgaatacaatttttcactggactttcatacaattcaactatagatgatcaagatcttacaaacaacatgtcactttaggaaaaacagtgtaaactaacgtgtttgaaaatgaataatttcacgaaggattttttttttaaaatctcatgaaattgacaaaaaaaatggttatttttaaaataaatcaagctaaatatgtaaaaaaaatatgaaaagattgacaagaagagaaaaaaatggaccaattaagtaaagtttaccacgagctcattgtcattagaaacagttagtttaccacctcaagctttaatttggggaagaaaacaggaattcaagtaatgcataaagatgttaaaaattagatactcatgaattagaataataattctttatttatttataatttcattcattcactttatacttattttatctcttaaataaagtatatttatacaaataatattaacaatatgttgatatttaagatattgattttaatgtcaaatatttaattcttcgagataagatcctgaaagctagaataaattaaagcccaaaaatcaaccaaagtgggatgcgttttgttctttagttgacaatatgttccacaattagtggggtaaagtttatatacaagtcaaaccaaaataaggaaagtttatgcaaactgaggaccagaggaataaaacattgaagctagagaaaacaattccttttcgtcctctttcttctttcacaacatacccgaaatggaaatgaaaacattactcaaaatcatattgaaatgaaagacaaatgtggcatttccatcgtgaagaatatcatttccctcacagacacctcatgtataggttgcagcatgcaatgaaatatggatgaaaacaacaagtacgtgtgtgagttgaacttgaactagggttgttatttactcgtcatgcacaagcaaaactgaaaatcccacgtaatgttatattaatcaataaataccttacaacggtggggtaggctaggttgctttctaattttgcatataaccattattcacatttgctttttcaaaatctagggctagcaaggaataaagatatggtcgttgctcggtagatccatgagaattgactttactacccatttgagactaagacagaagaagacatatggttctcctcacaactacgtcgtcctcttcatacacatatctatataattaatatatttcaaacaacatgcatgcctttctttcagagcaacaaagtcatacttttggcctttcaccatccagtggccaatggggtttagtactaccgacaatccacacactatgaatgttctgcttggcccttcatgcatttgctcacatcatgtttaatcaattctttttctggtgcaaaatttctgtagggaccactttattgcaaataataatatacttcctctatattttatacatatgtttaactgttgtagcaaaattatttcctactataatttcaaaataattgtatatccttgtctttatagggtgtgatatttggagttaagtgtgtgtttgggatttcgagggaaagaaataggaagagatcaaggggaaaatatgggtaagaaaatgaagaataaaactggaatataatcaattagttaataaagaaaataaaatgaagaattaattgagttataaaatacgtaacaataatatcttttttaaaaaggactaacaataatttattggtcggttatatgttaaatgggcaaagccgaaaaccaaggctcatatgtacccataacccatgccacctctaaaatcaaccaaaagctgacaatcattttataaagatggataggtatatataatttaagcaagaaaaaaaaatcaagatgatgttgattaatatgccaaactttatgaagaattaattttgttggaaatttttatttatctatttatatattataaattagaatacacaacttaatgagtgatattttttttccattctcttaattagacattttcaatatttcctctattcttcggtctaaatgtgcattccacactctactcctacattttgttaagaaaatctctcaatcatctcaaattatattattttatccttatttgtatgttttatatttttttgttattttctatccttttaattacacttcttattatttaatatagtattttattgattttttataagaaaatactagtttgttttaacctatttcatttattagacttttgattattcaatgtgattaacttgtatttattatatgttgtagtgatttagtgattaaacatcattgaaattgcaaggaataaaacaattcaaaaaaaatgggtaagatcttttttaaaaattagaaatgaagcaatgaacagtgtttgaaaatgtatatgatggttaaacttgtattttagaatagttttaggttgaatttatattataaacatgacaaatgttgaatttttttgtttaatgtaattaattaattggataatgtggtatcattttatttggtatttgaatttattgtttttgatcgataataatttgaatataattatatatgtttgttataaactgtctgagtttggttatgtttgaaattacaaattggatttgttgtcaaaacaaaaccaacattggaaaaagttgcacaaattacatgggttgccaaaaaatcgatgtagatctctatatccagaataattttctacaaaattgtctttataaagtgcattttttacattagttttaagcaaaattatcgtgaaaagagacattttacattgatttttctcaaaattatttttgaaaatgttgatattagatatttcttatacgatttttataatgattttggaaaaccatcatcaaaagccaatgacaattgtttaaacattgattgaaaaatcgtcattgaagtccttctaaaatcgttgttaaacttttttataatattgtattctaacatcttttatctttatgtcttgattaaatttcaatagattgtttttaacaaaattgtcaatggttattcattataaatctaagatataatttatatatatttcaaggtattcatttattataaatttaatcatgtaatgaatttaaaacaaacacttatcctaagcaacacacaaattaaaatgcttgctaaatattaagtataatgggattaacaaattctttctaccaaatttattcgtactcacttagactggatttgtttttttgcgtaaaagggatgaaaacccagtgcttacgaagtctaagctaagcccataaaatcagagaagaaacggcaacaaagcaacaaaagacagagaactgggctaatctgccagcagaagggagctgttagaatcggaccggtcatcgaagacattaattcaaggattaataattcaatcaaaatcaaattaggatcaaatagattttaatataataacttaataattttgaaaaaataataataaaagtaaatttcatttaaaatgtcataagttataattttttaaaaaaatgtcattttgaaagtttttattttaaaaaaaagtttaagtgaaacagattaatctatcgggttttataggttattactagttttttattggttcaacagtttgcaccaatttaaaggagacaccaatttttaggaagttaaatcggacatgtgacttttaacgtcttgcaagtatgattgaaaatgctggtcaactttaaaataataccaaggatatgtatctgagttaattgaggagcatatgagaatgttataaatcttaatataattttctatttttatggataaaaaaaatactaatttagagagtgaagagaaaaagaagattacaataagaaatatggcatgtgaagacggaggataaacataaataccatcctcttgtcgttgctactcttcagctttttgtgattttttatttataactcccataactttgtgtttatagggaccaaaattaaaatatatatatatatatataaagttatatagactatagataaattaaatatcttacaagaattaaaatagaaaatgtctaagttattagatctgaaattagaaaaatgaatttaaagaaacaaaatagattattaatagatataaaaatatctgaaaagttataagagataaataaattataaataattacaatttacaaatagattatatctgtccgccggaggttttcgcaggcagcagtggccttttgccatccttttcgaagcataaatatggttatggctggcaacagtataccatatgctattttgattgcgatggaatctcatcacagcattatatacttatcgtcttctttcaataatgctttcatttttcttaattggttcttggttaaattgataatcacagttaaaaataattacacgaggccatttctgaagagtaattgatgttaaccttgacgtcccaacccaatgtgattattaagggtaacatacgccttgaacttacctgtttagtaactttttttatgatgtattatttcttaaaagaaatacatatactaagggacacgaatgatttaccttttttatagtttatttgttgtaaaatttgtataattattcatcaatatgctatctttatctttggcataagtttgaaaaacttatttctaagcattgatgaattacagtgaaatacgtttttatatttagctcgcaggaaaggacaaatatatgaattttatataaaaaatacaaattatatcaatccaatttttaaaattctatttctattttcacttcttttataattaaaattttaaaaatattaaattccagtcgaacctatttttaaatttaacgataaattcatagtagtcataatttttataactaattttattaatatttctacttcaattaactaaatacctttctgttagtaactttcagttacaatttttttttttggatagaaattacatttttttgtacttaaagctaacttgtcaattttttgccaattacctatttcctcaatcctcgccttaattaattaacttgctacacactcactcggaataaataaacagtgcatttgttatttttcacaaacccgcaatagtccaaaagtgttatttctgtatggggtccaatttatataaagccaccttgttaatattatatttggtaattattagctgtcacgttggtgatttctcggatgtgcttagtttgagagagttttgatggctctctttatttaatcaaatgaaattataactaatgtatatttttattatttaaatataatggtaatgcaatatctctattttaaacactttaatgagagtgtgcttgtgtataatatttttaaggctaagaatataacattataaactctattattagtcagatacaaaaacagattaataccatgtaaaatttataaataaataaaaacttagctctgaagtacagtacaaattttttaaaaaaagtattaaaaccacttagtgaactgaatctgatatggcaaacatagtacattaaatataatttcaacctaaggagcaaaggtgcaatgactatattttacaaggctgttattacctataaaaccaaaggttgtgtttctgttacattcaaaacaaggcaaaagcaaaggaggacttcaaagagaggaaaagcaatgaggccaccaagttcttccatccactttctcctccaaattcttcttgtctttctactgcacagacccagctttgcagtgaaaaaggtgagctattgcaatttgcaatcttgaaaaagataaataaaactgtggaaaaagatctaatgcttgcactgaaccatttaaattgtagtcatatgtggtgtacttgggagcccactcacacaagccagaattatcctcagttgacttcaatcaagtgacacagtcccaccatgagtttctgggatctttcttaggaaggtattaaaaaaaaatgcaattataacatcttaactcacatatggtacaatttattacctattgaaattgtttgagtttgcttattttttgtagttctaatacaaccaaggactccatcttttactcatacacaaggcacatcaatggttttgctgcaactttggaagaagaagtagctgctgagatatcaagtaagaaccaagaaccttatcctctgcttagttcctctgttttctcttctctgtgcttccttcatctcattgtgtacttatacccttttgtccatactgcttctagagcaccccaaagtgttgtcagtgttcgagaaccgtgggagaaagctacacaccactcgatcatgggatttcatggggctagagcataatggggtgatccaatccaactcaatctggaataaagccagatttggcgagggagtcatcattggaaacctggataccggtaagttttcctgatttatgtgtttaaaaactcttgctattcttttcaaagtggtcagcaacatcttggaattaacggggtttgattattattattattattattattattattattattattattattattattattattattatggtttaatctagatcgttgacttatacacacatgtggaacatactcaaagttatctcatcgtatctctatcccccaccaccaatctgtttccagagtttgatcgtttcaaaaaagttgatttcataacattagtttattattaatttgaatcttgccgtcaatgggttgttagactagttttttccacacccaaagtatgaatgttcacgaaccatcttaaagaaatagactaattgcattattctcttgtgattagctataactacacttacatcatttttatatagtaattatactcaaagcataattaacactaaaatgaaatggacaaacatgacatgattaagtaaaataattttatcccttaaaaatatgatcaaaatcatatatgagaagaagtcaacttcttaaatgaattttaatattttaaaagattaattttcgattgagtgatatcttagatcatccaaaaaaatattatcatcaaaataaaataagatgaaagtaattatttataaagaaattgaaaaacttcttatggtaaaattagtatgtatagaaaatgtttggtgataatggagtagtcgactttcagaatggaccacctttagaaaggcgacatgggcaattaggcatcttgtcatttgtctgttatatatattaggattagaattttgttacaattattggtttatactacaccattagatgttcattattttaaataatttaaaagttataaatatatgttttcagtctatgcatatgttgtgatgcagaaggttggtcataaatcatacttagattgagacaaaactataagttgtgacttctgttcattacgataggactaaaataaataaataaataaaaagggtgggcttataatgtgaggtggggctaagaatggtgccaaggtggggatagtccaaggaagtcataataagctcaccaataagaaaatcgataagtgcattacatgagcttcattttgaaaatgctcccaaactgtaagcatgaaaagtgggtgggggcaatgaaaactaaaaacaggaccatcatgatgctagcttttagccaatttggatgagattgagggagaaggggtagaaggaagtagaatctccgttttacaatatgcttatcttattttgaccacactcttctctcttttgctcccaccgcattaccgctaggtgtttggcctgaatcaaagagctttagtgaggaaggattgggaccaattccttcaaagtggagaggaatctgtgataacggaattgatcatacttttcactgcaacaggtaccatcttcctttgagtttgttgggatatttataaaaagaaacttcgaattaaagtatttaatattggatctcgttaacaagtctcctcagaatatattttttaaagaaaatatagttttaattcatcaaactattatttttattttaaaatatttattcaatgctaaatatattttgtaattataaagactttttaaaaaatcaaacgaaccaacattgaaaatttatggagatggataaattgaatgtaaacctggtcattatattcctgtcattttatatccaaggttttctttaaaaaaactcttaatctgaattcctctctccgtgtctagaacgatatggccttgttagaaaagaagaatattttgaaaaatattaataataaattattttcaacacattatttattatttattaaaaatcatcaatttttctgaatctcacctctcattcagtattctctttcctaatttaataaattttaattaatatcatattgaatataagaagaaaaaaattccttatgtgtcaatatcaaatataaataaatctcagttattttatttaataagaatattaagaatgatttagaaacaaatattttaaataaaatttatataattaaatgatgtcgattaatttttttattagaataatgttttctccttatatttaagattagattaaagaaagtaaaagaaggtgttataagaaaaagttatattagaaaatatgttattaacccttttctaaccatgaagtacaacaatctttggttgaatttaggatttatcttatttagtcaaccacttattgagggccactcttcatgaaaggattatgacattaacttcaaatgtgtacacactattcttgtttttttctccttatctacgttccttccattcatacacactctgaaggtcagcatttcccatataacatgaggggccactcattcctcactcaagacaaacgccattaacaccaatttgaacacactaaacaatgcaggaaactaataggggcaaggtacttcaacaaggggtacgcctcagtggcgggtcccctgaactcctcctttgactcgccacgtgacaacgagggccacgggacccacaccctatccacagctgccgggaacatggtcgcacgtgtcagcgtcttcggccagggccacggaacagccaagggtggctcaccaatggcacgtgtggcagcctacaaggtctgctggccccccgtcgccggcgacgagtgcttcgacgccgatatcttggcagccttcgacttcgccatccacgacggcgtcgatgtcctctccgtctcgctcggtggctctacctccacgcttttcaaggatagtgttgccattggttccttccatgccgccaaacatggcattgtggtggtttgctccgctggcaacactgggcctgcggatgccactgcggaaaatcttgcaccctggcatgttacggtagctgccagcaccatggatcgacagttccccacttacgttgtcctcggtaacaatatcaccttcaaggtttgtctctttcccacacacattttcttttatggaaattttgaaagagtttaactttatccaccgtgagtgtaatttttattttttacaatgtagttctatagtcccttaaatgtttataatacactaagttagtccttatttcactttatcatatcaagataatttgatgatatgtggcattgtaagagatttcatgtaaaataaaatgggcacttgtcatgtcagtcaaaattaatattattattgcaaaaaatgatggaaaaaactaatatgatctaggagacactcttaatatataaaacattatcacctgactcaatattcttgtacattgcttgatttgaagggcgaaagcctatcagctacaatattggcacgcaagttctacccaattattaaagctacagatgctaaattggcgagtgcaagagctggagatgcgtaagtataaaaaaaaaattgaaattcgttatagtcgtcagttgttgagtgatcatttggcataattaacatagtactagatatggtaaataaaatttatgtgcatgcagggtgctgtgccagaatgggaccctggatcccaacaaggtgaagggaaagatcgtggtatgtctccgaggaataaatgcaagagtggacaagggagagcaagcttttcttgctggtgctgtgggaatggtccttgctaatgacaagactactgggaatgaaattatagctgatcctcatgtccttcctgcttctcatatcaattttactgatggcagtgatgtctttaattacatcaactcaaccaagtaagatacttaccagtctagtcgaccacttattaatactaattcatgctatgccttaaagttatgcctactttggagtttgcactatactattgttattatgcttacagtttatggtcaaatggattgctattatacttacagtttatggtcaaataagtaaaggaagcaattctagtttttttgtgattgttattgtttgagctatataaagatcccgaaaggataatcatgaatttcagtttttcaacttgactacttgaaatttatatattgctaggttcccagtggcatatattacacatccaaagactcagttggatactaagccagccccgtttatggcagccttttcatcaaaaggaccaaatactatcgtgccagagatcctaaaggtgacattactcactagtgtaatttggcttgtaattttttgtaatgtgttagatatctaacaactcttaatttgtcccatatattcagcctgatatcactgcaccaggggtgtcagttatagcggcctatactgaagcccaaggaccaaccaatcaagtgttcgacaagcgcaggattccatttaactcagtttcaggcacatcaatgtcatgccctcacgtttctggcattgtgggactattgagagccttatatcctacgtggagtcctgctgctattaaatcagcaatcatgaccacgggtgagtgagatgttcttcaagtttctcacgcttcaaatcctttttcttaagccaatctacaacaaaatgtcccagaaatataaagcttagatatatacatatagaaagtaacttagatatagtttttttaattcttctagtgttaataaaggttttcattaaaagattgtgcaaggtgaaactctaattcgaattagaaaacagcgattacagtacctaagaaactatatgtaagattatgaggggaggtgaaactccaattctaattggagaacgacaccaatagtatctaaggaactgtatctaagtttttgtccatacatatatagaaagcaactttgattggtgaggttaaagtggctatcaaaagttgatgatttgtcctctgcaactttcagctacaacactagacaatgaggtggaaccactactgaatgctactaatggcaaggcaacaccattcagttacggggcaggacatgttcaaccaaacagagcaatggatcccgggctagtttatgacacaacaattgatgattacctcaacttcttatgtgctttaggttacaatgcgacacagatctcagtgttcacagaaggtccatatcaatgccgcaagaaatttagtctcctcaacctgaactatccctcaatcacagtccccaaactctctgggtcagtgacagttacaaggagattgaaaaatgttggttctccagggacgtacattgctcatgttcaaaacccgcatggaatcaccatttctgtgaagccaagcatcttgaagttcaaaaatgttggtgaagagaagagctttaaagtaaccttcaaggccatgcaaggaaaggccacaaataactacgtgtttggaaaactgatatggtcagatggcaagcattacgtcaagagtccaatagttgtgaaggccttcttaactagaaattgaagtaattgatgcaatttagctcatttgcatttctaattgattggtagcctattctaaattgtatgatatatcttccaaactagggcttctttgagagttatctctgacattgattgataacaaagaaaccagcaagtggctttctttgggtgtacttttactatgattccaaggagaaataaaacctaacacgtgcattctccttctagttataaaatctgggaagtttcttactctaatcatatttcaagccttactcgttggcattaagtttcttacatgacatgttaaaacctcatgttgtagtctatgatgtaagaatattgattcttatttcaatttgtattgagaatattgtacacataaagttttgactttgtagtaacgaagtgaggaactatgatatgaaatatttagtatgtaaaacgttgaatatatgatttgcgattgatttagatttgtttaaatgtgataatgtgtgggttgaacatgttgagtcaaattcctgagtacaatttgttttcaatgacaacaaacccctcaacaagataaaaaaattgcaaactttcttaacctgattattttgctaagcgagcagtatagtacagaaagacaaaccacctacggtgaaaatgcatcgagggccttctgggtctgtagaagttcaattcaatctaattgattacatttactggactgatcctcctttttttcttcccagaactttttggttccttaaatgatattttagtttttaattgtaattctggcaatgatagaaatcattagagataagatgtgtgttttaggacgctgattgagcaaacaaatcctacgcctctaatgagaggagaaacgagccctttagtggctgattcagattgcatcaagtaaattagttcaacaaccacaatgcaatagctgctcacttcattcctatgtacattttaatggcttttagcaggctttcttgcattggatccattggcaatgagtacatgagcaaaaataagaaactagaagcagcagatatgggattgggaaaatttacacaacgatgttggaagtatgttgaaaagtcacgctgtataattattaatgaatgtcttattaattttttgcttctaccgattaactcttgatgcataatctctttccaataggagcgtgtggaacttactacagcaagaagacgttgaagtgatgcatcaagaattgattcagtaattagacaatgaaaacaccacaataagaatttgagtttaagttacaaaagtctatctacaataggttacaggattacgttaacttcataatctgccagaggggtattatcggtttatcacaattagacacggagcattttggttttcaagggaggggggggaggcattgaacattgaggcataagaaagacgatagatttatttggataatttttattttttttgcttaactcaactaaaactcatggttgttaagaattaagatgttctgttgagcaatattttgaagatgaaatcatgaaacatactactactagcttgcgaggaaaataaagaaagcaggtgtattatttcaattttgatatgaaaaaaatatgatatcaatcaggctaacaaattaaacatgaaatcaaagacaaagaaacttcaaactattgaattgaaacaccatcacgataaaccctactactcccagaaaggaagacacttatttcctttttctccatttctgccctttgcgccgaactttgagtaacataattcagtagagagcggtatgattgaacctaatccttgtacttcatttcagataccaggaagccaggcatgtcaaatgtggcagagaacttctcaacatcagctttgagatcttcaatggccttgttgttgacgaggcccttgttgaaatccttgagaagtttgccatgctccttctggatctccagtgtgagagtcacagcacggtgaaggaactcaccaatctgctcaaagtccttttcaaccaaacccctagaagtcatggcaggggcacctgttcacacaaactccagtcaggcactcacccatgataaacaaagcacagtcacacatttcactaacatcagagaaaaatacagaaacaggggcaataaaaaaaaagcatttttgtaattaatacatcaagataattcatttttagggataaatattaaaaacaaataacaaaaaaacatattagtttatagtaattgatttggcaatcatattgcacaatcaaacaactagaaactcattaataatggcagtctgcaagcttagcccgatctaatacaccattgttaaagcactagaaattaaaaacacatcctcaatgaaatttcttccaatactaatctacaacttaccaagataccttgtacaaatgcattaaaatatgcacaaaacttagatacaatcactttgtgttttaagcattgttctccaatcaaaattaaaatttcacttcgatatatcccagggctcaaccctggacaggtggtggaatatgctagcctttaatagaaacattattacttacattccaattctgataagaaaacagtacaaaatttcgtaagaaacttcattaagttctgtgataaaaaaaaaaaaaaaaattgaggatatagtcctagccttaggaaatcattatttgatcttaagaatgagatcttgttttgaattgagttagtaaagcaagatctgtattctagcacataaaagagaaataagttggttaccaattcgcactccaccgggggccaaggcactgctatcaccaaaaactgcgttcttattaacagtaatgttgcagagatcacagagtttctccaccttattccctgcaaagcaataaacacaagaaacgagtcagattcagattcagatacattggcaacaaatcgaaatcaaaatgcagcggtccaatcctatatatattaccagtcaatccaagaggtctgagatcccacaagacaagatggttctccgtgcctccagtgacaagactgtaccctttccccatcaagtaattcccaagcgcaacggcgttggccttaacctgcttggcgtaggccttaaacccgggcgacgaggcctgttttagcgccacggcaagagccccgatctggtggttgtggggcccaccctgcagagaagggaacaccgcaaagttaatcttgtcctcgaaatcataaaccgcgttctccggctgccctttcttcggcggcttcgggcccttccggtaaaagatcatccccgcccgtggaccccgcaagctcttatgcgtggtggtggtcacaatgtcgcaatactcgaaggggctgttcacttcctgcgcggccacaaggccgctagtgtgcgccatgtcgcagagaagcaatgccccgcacttatccgcaatttccctgaagcgtttgtagtcccaatcgcgagggtaagcgctgccaccgcagattatcaattttggcctgaagtctagggctttttcctccaagcggtcgtagtcgatgtagccggtggtggagtttactttgtaagggaggctctcgaagtaaatggaggtggcggagatcttcttgccgccggaggtgtagtagccgtgggtgaggtggccgccggaggggagatccagccccatgatgcggtcgtgggggttgaggacggcggtgtaggcggcgaagttggccggggagccggagtagggctgcacattgacgccccaggattgggcgtcgaggtggaaggcctggagggcgcgtgagcggcagaggttttcgatctggtcgatgaattcgttgccgccgtagtagcggttgccgggcatgccctcggagtatttgttggtgagggcgctgccgagggcctcgatgactgcgaaggaggtgaagttctcggaggcgatgagctcaatgccgcggcattggcggtgcttctccttctcgatgaggtcgtggatctcgggatccaccgtcgccaagggcgtgttaccccacacgctcactggatccatgaatgttgaagatgaaatgagtgaagagagtgttgttgtgttggtctaagcctttgagctggaaggcgaatgtgagtgcccagtgcctatgtgtgcgtttttaaaagctttgcgaccgcctgtgaattgaccgttgtaccctgtgcttccggttggttaaattgtctccacttgttcgcctgctgctcgttacagacagagtagcttcttcctcttcctaaacttttgccgtgcctttttttagtaacttttttcccacttattacttaattgccttataatattatattcatttatagtatgtttgaaaacatgcttcacaaccaataaatcacgtctttaatgtggaaaacgtaaaagcaaaaattacgaatatttatttttggtgtaaaaatttatgtcctagcttgttccaaacaggatattagagtgtcggttggacattagagactccaacgtgtgtcaatttcaaagcatgaagtacttgcttccacgtcattcacattttttaggtaaatttgcttgtagatgtgaataaaatcatgtcattattcgtaatgttctggtttttaatttaataacaacacatgaaacaacagagcagtttttaacaggacaagaacaaaacttattaatttatttataaggaaaaaaacagaaaagaacaccgatctcgaatagtgttattagtgggattctctttctgttgattaaaaagacaaacagtggctagtatttaaaaggtgtgctgcttgcactcacactcgtagatttagaagtctatctgttatcaaaccagttagcttgattagctgatcaatcaagcatgggacgagttaaatttggaaaatgcttacattaaaatatatatcaaaggcttttcattcaaaaacaagcatcagcttcacttcttaaacttcaacttaagttaaagcaagctaagaaatccaattgttcaacatttgactggaaacctgaaggtgatgccctcgtagcatatgtacattgtacgtcactgcaagatttggttttaggtttcattctcaattctgtgtaacgttggtagcaccgtggtaggtgggggcaatatagccaatttattcccaccaaaatcaccaaccctctctactgcactgatgcagacgctttccttccccgacaccttgcttcactaacatggggattgttaatttttaggtttctgaatatgactaggaactacgaaatattgtattttttcccccatccaataaattttgattgatgaaattgagtactacaataggtctatgggattaattttgatttaacaatgaagtcaatgttcagcaggcatgcatattatgttgtgcatggtggctgattatcgcacgcgcagggggtaaattgacggatttgcattcaggaaagcctgcttagtttaagttcatggacataagtctttcatctcttgttaaatattttaatagtttatatcacaaaataatatataaaccaatgagtcaaaagtatactaattaatgtaaaattttgtcttttgtattacctatcataatacaacatattcagccaaaatcacatcacaacaacaacctcttgtgtcttcaccccccataagtcaaaagatatttaattaagagcatcattagagataaaccagtggtaacttttactctgcaccctctaatgcacctttaacatgacttgatgtaacaagctttttatcctttaactttaattaatttagtttttatcttttattatatatatatatatatatatctttattattagcattttagttcacgtttccattttcacattttatacatgagctattttaaaatcctaccagcttctatcaaaacatttattattgtacactttacaggcataccagtttactaatattcaattcaatgtggtgaaattatttttaaaatgaagccttttaagccaccctactcagttctataatcatgagaaatctcgtagcatcgtcaagagatattgatatgttatcaataaaaaaataaattccaggatgaggaaaaaatctgcctgccaaaccacttgaacaaatgtacatttgtagattaagctgaaccactccaccaagtttgaattcccccaaactctaccaacatggccaagaaagtcgtaattcaaaatttctcatataaatgagatgcaactagttcactgactaggaagcattttagtttcttacttcataattccagaggttgatgtggtggttgacttaaatcgcccattggccattgtcaaagccatttgtaaagagtctttaaatcacgtatgttatttgcggttggcacgtcccaacttctaagtcctcaattacccacctgcagtttttaatttatgacttactttattatattcaataatgctctcataataattccgtgatatttttatttaattacaacgcaggacaaactgcatctacatctaggctatattaatataagcgtattaattgaggaaatacctaattttacgatctactcaagctatgccaaaaggttgttgatatactgtatttgttttaacttttaacattaatttggtcattgaattgttttacttcaataattacaaattagtaataatagttggaacggccatttgcatgtaaaaaagagagagagaagggcgagctatctgagttctatgatttgatttcttttttctcttaaaaaatgtccctttttataaatagagaagccaaataaaaattaaataaatttctaacaataatttatacaattatcatagtaaaaagttgccaatatattttttgaagaaaaaatagtttgatgcatgtcgtcattatgaagtaactattatgatcatttgaaaaaggtcatcacatctcagatagaggacacagaagcacatgatatttctttcttggatgcatgggtttttttttgttactggtcatattcttttaaattttaatatatgaacatgttcatgtttccagcagtactgtactttactttttaaaaagaattattaattattataattcgcaaatcttttagtcgtatattaattaatttcccgggatcgctcactcttttcctaagaatgcgaatgtaatggaagggcactttttttctttttgttattttttattctcttttctttaaacaggaaccaaccgacacagttttttccaggtcttgacctgtacttgtgtggcaagctggtaacgcaaagctaatataaaaatgtccttaaaaaaagtaatataaaatggcttttaagatagttgaaaattaattaacaaagatattttttaactaattatgataatttcgtcattaaaaaaaattgaaatcccatttagaaataaagatacaaaagtgaagattaaacacattaattttttattggaatcaattctatttgagacgaacatgatttttatgggcgaaaaaactcttcataagtatcaaaacaatcgcattgttattacttgaattcaagattattggttaatttaaaataactctacatcagtttatctatacggtcaaaggtacaaggagatagtaagtgtaacattcaaatcgaattacaccacaatgagagggatgcaaaaattgtgcatgtatgagaatgtatgactgataataacttaaatgaattaattgatactacctctatcaacaagatacatatacttttcaatagttcattacttaagaacttcatagttaagtgtttggcttagagtagttataagatgagtaatattttggaagcttccctgaaagcatatgagtgaggacaaaacatgctgaaaaatcttgtgttgatttgtgggatcagtcattgatcctgaaaacaggcagaatgatagtcaaagtctcaaaaatggctacctacagagagttctgattagtggaagattttgaccaacaaagatattgaatgaaatgtcgtagtgtgagagccgccaagaaattgaaaatcaaagatattatagtacgcgtaagaggacgtcgaagagagaaagggagagacaagcaccctaaggctcataagcttcacaagcaccctccttagctcaacccaaccattaacgtttcttgagccatgcagctgatatctattaatataaaatgtcctcaaactagtcttgccatgtgtcccctcattattggttttaggggggacatgcacatgcgtatgtgatattgtcggttttataccaagtatgaaggtgtataaatgtatcattgcaactaggaataaaaataggttaagttaagctagactttgacaggtttgaacctagtctgcatcattatcattaagcttaagcttgatttattacatgttaaatataagttattaagacctaagtgtaacatgcataaaggtctgtcctagcctaaaaacctatatacaaagtctgattaaataaaaacaaataattaaaagtaaaaaataacataatagatatgtttctcttataagttataaattatcaaatataatcttataaattataatttatatagacacaatgttcagatttaattgatttttttgaaagcctataacctaacctttttaattaaaaaggtttttaaaaagctcaaatttaaacgttttaataaataagttaagccaaacaaaaccttaactaaactagattgtagatccctgaaagactttctagtctatttctactcctaatttacaactttttgatatgtcacgaaacgtaagttcctgacatgagaccagatcctaatgatttagggaccatattaattgatagtatcatgttagtataaacataatcataagagatatttatatcatgaaaaccttctcactcgggtaaactagaagccagccccctctgtcatgcctctcccatcctcctttcaacacaaatatcactcaagtttgatgtacatagttggttggatgtaccaatgacaaatttaaagtatgtaaaattttaacaatttttttataaacaaaataaattagtctaagagtacctcgtatcaatgtatattttaattaaaatttgtaaacttaagtttaaattaaacttaaatttgtaaagtgtgtttgaaaaaatatcataagttttatttctttaaaacagtttttaaccaaattttactctaaaaacatattttccatgaatattttaatggaaaactaataatttccttagtaggtgaaaaagaatactatagaagatcaatgtgcagttgagttttataaaagctagggtgagtacagggcgagaccaacagttgcattttggtgcgattgcaacacgccgagtcgtgccaagattcggtaaaaatatcttctcaataattgtgattgtgcggtgccaatatttttggttaatggttggttccaaggccacatctaattaatctccataaccggggaccacagcttgattatttatgtatgctggtttttttcttttattttatcagaatgttttcagacatgcacattcactttccttgtgtcttccatttacgattcctagttttctttcattttcaaataatttacaagcaaatcaccgacgacagacaccgacacacgtatatatattcagggcgctggcggagggtgttgcttcagcttcactgatattatgatttggcaatccacaacgtagttaataggtcatacaccaatgaaaaatagcaattcagatacaactatggtgaccccatctcccttataatagtacattattaataccaagattttaggagttgactcttgcaatcatctttcatgcatcacatatattttttttttcgtattttaagtgattagtgattttaatataattatttgaattgtttgaacatgtcttttaaatcgtaataaaagagatatatgaagttatttataataattgatttgtatttaaaataattcattattatggataaagtaagaaaataaagttaactaatatataataaattcgatcatttttaattataagattcaaaattttatttatataataaaaaattgccataaaaatagttttcatcaccttcataaatttttgcagcatactttttttcggagaaaaagatggtgaaattgataaagatgtaaatcatagaatcagggtagggtgaataaaatgatggaacacatatgaatttttgtgtgaccgcaaaattttccttaagttaaaaggaaaattctagagaacaactgtaagaccgacaatgttatatggagcgaagtattgactagcacagtggcggacccatgatttttaatttatgttcgcacaattattggtggggttcgggggcaacgttcccgaaaaaaaaattgtaaaaaaaaattaaatcaacattttatgtacaagattataaacccgctcaaaatatagtatgtgtaagatcaaaatatttgaaagtaacaacccctaagtaataaaatgagccaaagatgaaagtcaaatataattaccaacaatattgatagtttaatcatgtgaagagtaaaaaatattgcgacaaactattaacaaagtaatttaggctatacccaagatttatatatcatgaagataaacagagcataaataatcaacttttgtatattgaactttacttcaagagaatgaatcagaagagatcctaatccctttatataagcttctactgtaatgagaataattggtacttgctagtaatacctaagttaaacacatatatcacagcttttatataaattcattcccgcttcttgctaatagaagtgtccatcctttgctagtaatattttttgtaattaaaaataaaaacatgaaatgttttctcaaaccaccctacccctaaagtgccattatcttatcttactctgagataagagctttaaacccactacccaagctcacaaatctacacaacatgattcttaatttcgtaatccacaccccaccactcctgaatcacaacaattccacgagcatcctcttttccaaccacatatgcgtcaaatgtctgctcagtagaaaatattataaaaaaaaatacaaaatatttgtgtctgcacatgcggacaggaaaacaagtgtgggtccaccattggactagcacataggtaacatgagcacaaaataggggtagcagaaatgaggatgttaaggtgaatgtgtggttatacgaagatgaataatataagaaatgaaaatattcgacgaaaggtaagtagtttgatgtatgaaaagattatgagggagtatcgattgagatggtttgggcatgttgtgagacgatcactatatgctctcgttagaacaagagtttgttaacaaaagttcgacacaaagaaagataaaggtggattgaaactcacttggggaaaggttgttaaacaagatataatagagtgtgatatagattgacgaacggtgtgtcttagaacaaagtggagaaaaattataaatttggtggaggattaaacccattagtatatttatattctagtcttcccatgttctagtcttcattttttagttcttttcacctttcttttattttagcttatttttcgtttcttttgtcttatttttcctttttcttttcatctctctttctcttttttgtctttttttatctattattggatttatttattatcgatcctaattaatttagattaaaggtgatgttgatgttaattttttcgaagcagcttttatcttagtgagcaaatagttttatgcaaaattgtataattttattataaaaattaattgataattttaccggaataacgtacgttataattactttttactaacatattcaattataaaacttatttatataataattaactaattgttaaacctatattttgcacggggtgtttgtaaataataaaaatgtcattttttaccatattagttattatacaaaggatatcaaatgagaaaaaaaggtttttaacctaaccaataaaacaaaatttacactttattaattccattataaaatatttcaacaaggaaattaaaaatttatgataatagtctatctattgaaatgtagagtttttatattattattccgtcacaaacaactatatataataaatttattaattttgacaataattatgttaaaagtcatacctatcatatttttaattagttaatacttaatagtataaaataattacacttttttatatgtgtaaaactttttatactgattgtgcataaaaattaactcaatttttcttttacttatgtgtcattttatattttacacatcattgaacatatgaacagagcataataatcaaatttttaacaaataatttatctctatctaataaacattttgtaacatagattttgatacctattgctgctgctatgatatcctttaaatatttataatgtgaaataaatacattgaagattgaaatatagtatattgtgttttataattttagagaaacttggttgatataaaatatatatacaagacaaaaataatgtcaaatgagttttaaaagactaaatgaataatttaaactaaaaaaatttgtccaacatatttaaaaaaatttacttatttactaaacgtgttaaactatattaaaaaataaattttcttattaattatttactaaatgatgcaaataacagggcacagggcaaaaaaaaaaacagatctagtccacctcaccaactccctctccctccccctcccaaacccttatttatacacacactctcacattctttcttcacctcttcactctctttctctactctttctttcttcttccccggctcgtaaaccatggctttgttggtggagaaaaccacgagcgggcgcgaatacaaggtcaaggacctttcccaggccgacttcggccgcctcgagatcgagctggccgaggtcgagatgccgggcctcatggcttgccggactgagttcggcccatctcagcccttcaagggggcccgcatcacgggctccctccacatgaccatccagaccgccgtcctcatcgagaccctcaccgccctcggcgccgaggtccgctggtgctcctgcaacatcttctccacccaggaccacgccgctgccgccatcgcccgcgacagcgccgccgtcttcgcctggaagggtgagaccctccaggagtactggtggtgcaccgagcgcgccctcgactggggccccggcggcggccccgacctcatcgtcgacgacggcggcgacgccaccctcctcatccacgagggcgtcaaggccgaggagctctatgagaagaccggggaactccccgaccctaactccactgacaacgctgagttccagatcgtgcttaccatcatcagagatgggttgaagaccgatcccaccaggtaccgcaagatgaaggggcgtctcgttggggtttctgaggaaaccactactggtgttaagaggctctatcagatgcaggcgaatgggactcttctcttccctgctattaatgtcaatgactctgtcaccaagagcaaggtaatgtctcttcttttcccagatctggtgctttttatgtgtttaaatgtagggttgagttcagatctgttgttcttggatgggttttgtggcattggtgatatgaggttttgaatctgttaactgtttgactaatgccgtctgagaagtctggatcggtattaggtgttattttagtgtgttgaaacttgaaacgtcagaacgttagtaagtagcttactaattagactctaggacaatgatcacatgtttgattccgcaaaataaggatttattccgagtaaacattttttatttgaagctacattagataacttttgaattttactactgattttgatttaggattagaaaaacattcaaacataaagcatgtcgtttcaaaattaattttgcaaacatggatccaaactgagtttttcgtgatgagttgtttatggattagggtcttgaaaccaataagtgggtcattgggttttgtggatctagtggattatgaattgattttgctttattgctcgtgttattttttattaaccttttgatctgtggttgtgacagtttgacaacttgtacgggtgccgtcactctctccctgatggtctgatgagggctactgatgtgatgattgctggaaaggtggctgttgtggctggatatggtgatgttggcaagggttgtgctgctgcattgaagcaggctggtgctcgtgtcatcgtgactgagattgatcccatttgtgcccttcaggctctcatggaaggccttcaggttctgaccttggaggacgttgtttctgaggctgatatctttgtcaccaccaccggtaacaaggacatcatcatggttgaccacatgaggaaaatgaagaacaatgccattgtttgcaacattggtcactttgacaatgagatcgacatgctggggctggagaactaccccggtgtgaagcgcatcaccatcaagccccaaaccgacagatgggtcttccctgagaccaactccggcatcattgtcttggccgagggtcgtttgatgaacttgggatgcgccacaggacaccccagttttgtgatgtcctgctccttcaccaaccaggtcattgcccagcttgagttgtggaaggagaagagtactggcaagtacgagaagaaggtttacgttttgcccaagcaccttgatgagaaggtggctgcacttcaccttggcaaacttggagctaagcttaccaagcttagccaggcccaggctgattacatcagtgtgcctgttgagggtccatacaagcctgctcactacaggtactaagtgattgagatgatcaacggaaagtgagggaaagacaaaatcggttttataaatcggattgattgcttaattttccttttttttgaatttttggtgttagactttcagatttgaggtagaagaattttagcttcttttttctttttttaatttccgtagaatttgtgttcgagtgggtgggacgggtaaggaggaagacatactgttggtttctgtgatatgaaaccaatttggattgaataaggattgttttgtctgggggatgtgtgcattttgctttattaaatactaaaatgtgtttctgtccaccatttcaatatatcaaaattaatcaagagagaaaaaaattcctaccatgtatccagtttcataacacattgacacatcgtgtattatttggtgcttctgcattatttttttaaaaaaggctatcagggtaattaagtaattttattatgtaaactcttttttttatggaagttcattcgagtttttctctttttttatttgaaaaaataatgatagcactggatttgcatcgtttatattacgagttcctattttctttgcatatttttagagccttataagttccaattaattcgattttagctatatggtgaattaacttaaggggtaaagctctctcataagtcataagtagaatcaagcttaagggaaatcaagttctttgttaattgaatttacacagattggtgagttagaattcaattttctcaattgttaatttgatttgatgggtgtttacactgtcgtttaaaacctacagttttaccttaataacaaaaatggcttaaaaaatcaaacattttaaaactagtcaagggaaaaattgataaatattaatatctttaactagtcaattgttcattctcaaaatcaagagagattcctttatattactatcaaactgataataacgtaggataataacaaaggtccaaataacctatgatatcgtttgctttgatttctttagtttttgttacaatgataaaaacaaatttagacctcgcccaaattataaaaaatctgatttgttttcatgggtgcttagaaaaagaaagaaaaaagacaaagtatctttagtgatagatctcaaattaggatcttagatcatttttcggtaaattttatagtgtcacgtaggattgaagatctttcaagatttctcccattttgttctttaatggtagatttcattttgaaatcttagagaaagagaaaaagaaaaaaaaatatttttttttgaataatatgtatatcttaagggtttttctataagaactcattttttcatgttggaaatttctttatctcttttattgaaaaatttaataaaaataagattttgaacttaaaatctttaatcaagattttacattaaagttgttctggaataaaatattccctacctattctgcaaaatgactctaaattttaggcagtaatccaatttaggctcagagaaatcttgtttcacatcaatttttgcaagattccgtgttagatggttctctgtttttacgtgaaaaaaatgagtacaacagcttctcagtgacgcattgaagaatttgaatttgaatatcctaacgtaacgtcttggatgctgttggtaaagagtggtaaaaaaaaaaatttctttgctagaacataggcgctctcgttgtgtcaactattattactgtgtcacccctcttcgatgctagtcttgcattgccattaattacagtaaatttaagtacctgtcaaagtcagattcaatacaacccttgtctgtgccataagggcctgaacttctcaatattggtctggaaaaggaccagaggccaattacacaatctgcaattttgcatgtccgatacgccaattgtatttttatacgcagcctcaaagttcaggagtcaaagtatggggggtttgaagacaggaataacaaaaaaaccaagtatattgagagtggtagtaaaggttgattgagagtaacaagtcacaagcgactattgagatattgctaaaaacgtcataaacaaataaaaaaattaacggttcatttgtcaatacacaatactctaaatttgtttaaagtttcactatgtttttttttttaacttaaatatgtttttagattatcttatttttaatcctccaaatttgaagatactttctttagtttctggaattcatataatatttttttaaatcattctttactgtattaactaaacgtaaaataagatattcataatttatgaaatttttttacaattagaattgattttctactttatatgtataattttttggcaattaaaaattatcatcatcaagtcaataaaaaaaataaaaaaacccattaattattttaaaatttgctttaaattttttcattgatttaattttaatagttttaaactatcataaattgtattttaaaatataaaatagaaaattattttttgagtgtaaaaaattgtccttattctccattggatcacactggtaaaaagagcattactcgactttcaaaaaaaaaaaaaaaaaactttaaatttaaagaactaaaaatgaaatgatccaaaattgaaaaattaaaaacatatttaaatctgttttcactaatacttttattaagaatctcgaataagctaatgtgaggtgtgaaaataagcatgaagaacatggatattaataatgatttgctatacaatgaaaagacaaaaacagacacacacaaaggaatgagaagtggatctagaaaagtaaaaaagggtcgtatcttgcttagtcctcaatcctcaataaataataacagaaaggacaaaacatagtaggttatcaaacccattactatacaagtcccctatttggtgggttgcgtgttcgacaaatcttaaaactacgatctcagttcccttctgtcgaaggagtggcctcacataaataatctttgtgtagtattaataaataataaatttatgcgaaagtgatgttgttatggcattattttagttcaagacagaaaacatgaaatgtggagtatctgacatttggctcgctctaattattgtttgagatagtgtttttcatggaatcatcattcagttggattcacatgatgcctttagttaaggaaatataacgcatgacactcaatcactatggagaagcactaagcaagttgtttgtatcatatcatatcctatgggagcgtaagcaaccaatagaaaatttatattttagtttaggcattaaatttgcaagtttgttaaatatcatttcacggacaagagtttcaaatactagctcatctcatcttgtggtaggtttggttggattataataatttcaaatacttgattcattttatattattttatatttttttcttctaaatcttaaactcataagttttttagggatttaacattcaataaccaaaaattactttaagattcaattaatctttacgcaagcacgaaacattttacgtggaatttttttctcatgtttattatttttcgttcacaacattcaaacttagaactctatataagtaaatcaattattttacaacttgaaagagacgttagtttaaagaaatttatcgtgtaagtgattttttttttcttaacctgaatcaattttgaataacattttttttactactttttactacaataggaagaaagagtagaacttattcgggtaataaaacatcaccaagtaactacattaaaactatataaaagagctagtttgtgataaggaaaagattgttagaagatcttgaaagattaccagtacataaatttatggatatttattcgtgtgcttgggtttcataattttataaatttatttagcctttaaatacaagtttaaatacgttacacttttataatcaccgtggaatctgaaggctaaatcatcacttacatcattagagaggaatatatagtaccctcttctagggaatttattagctttgattgtaaagaaaagagaaaattcgaaaataccaattgttagatgctgaaaagtcacaaaggtttagactctaggctttttagaggtttccggcccataaaggtgaatgttttcaaactgggcttctcaataataggagacttactattattttcagaatcaaagttttacaaaagtaatgtaaatacaaaatgatgactaattgagatattcaactaaatacaaatacttgattattttataaattcatatattgcttatagaataaaattaaaaatttcatagtaagttagtaactattgtttagcaaaaataatattttcaaaattaactataaaaataattaataataacattaaagttcacactaaaaacattaaaattacatattatactaaaaaatacaatttagttcctaagtcttagttttaagatttttcaattgaattttacgcattatttgaattaaaatatatagtaatatagtatttatttaaaaatatgtataagtaaaataaatttgaaaaaagtgtgctgggattttctgatcttgacggagatggaattggaattttttttttattctttcctctattaaacatttaaacctgactccaaactaattcctaaaccgcctttttaccatccctacttaaataccatcatgttttatctgtcatcttaggcccaaaagctttcattccaaaagcctcacagccctttgccttgcctgccgaagcagtgaaacatttgttagatagtagccagtgtagaaaatagtttatcacctcattacctgtcagaggagcactggcttatagatagtagcaatagatttgtatcaattaagataagttttgaaatatcacaaattttacttaagggtttatataacatgaacaaaaaaagattatttggctgtcattcaactacttaaaatgctgtgtcacagaaagggaaatttatgtttcttgtagggaatagaccaaaggtaactcttataatagaaaagagtgcttatttatatatatatatatatatatatatatattaaatgtaaattcagataggaaaagtgaattagttaatgcagatgtgatcacattttccaatataaatgatagaataaaaatcttcatttaattaaataaaaatgacaaaaaagaaatgagtaaagagatgaaaataacttatttcccctctctttatttgattgtttctttgcaggcgattttattttaacaactatgatttatcttctttttggtggttgttgaaaaagaatgaggtggggtgggtaggtaaattgggtcctctttccaaactaacactataaaagatgagggccacaagtgctcgagtatggagtgtggatcccctaggggcaccaatgcataaatgctcacttggatagttgttgttgttgttgaaagtggcctaccattacctataggctatagcatagcatgcttggatatatctagtgttaataaaacatcaacattgccatcacaggccattttgtcaagcttcacaaatctccagccaagcatagctcagttttttgagtttgacattggcatttggcacatggctagtggctattgactaactttgcaatgtgaaggctttgccaagagaaacataactgaaaccatgtggtctaattagtgctagtaatctcttgttaattattatatctgatctgttgctaattcaattatttttcctgtgcttatcttccattagtgcaatgcagcacacaatgaaacattttagcatatgccaacccgggttgttgtcccaagtgcttcattgttcatttgttcagcacatttcactatcatattatgatattattcctaaccaactccccccttcccacgcacatcattactataataccatagtatcacaggaaatatcttcatgcaaatacaactctgtctttgtgattgctatggaggataagaacacattatatgcgatacgttagttccatgccatgaagatttcataatctttttgtgaatagaagtagagaagttgctcctaaactagtattttaccatagctttcagctacgagaatactttgttttcgacaaaaacaagaaaagacttagatcttatgcaaactatccaaatcccccacactaagccgatcctaaggaatttgacgagatcccataaacttattaagagaataaccaaacataaggaagagagagttcataaaaagtgaataattcctagaacttgctgaaaatggctcccacttttgaactttgacacgagaaactattatttctggcagacttttactaacataaaatggaaactacgttcctcttttcataactaatctaagaataagatcgttggagaatgtgttactagcactcttttctatggaaactatgtgtttaaaaactaagatgagatttgttttaaactcggtttgcattttgtatttttcttcttcttatttcctattttctccataccaaatgtgaagaaatcagcttcttttccctgaaatctcgatatagccacgaaggtgcagaaggggattggactcgatgtgaggagcctcattttaaataaaatttagacccattacatattaaataagatacgaatgctcaggttgattgctctgtatgaataatttcctgttaaattttgcaacttgaaaagaagcttgggagaaccacaccataaaaactaaccactatgggtagagtcaagactttataaaccccacactagattccatctttccaatgtgggactgaagtcccacaccttgcaattgataactaaactctacaataaatagattttgtaacagataggcatcaaaatcgcagagagtatgtcaagttgcagtggtatgttctcaagaacaaaagttagatattttcataattaagctagtcataccatatgttacaaggaaagaactaaataaaaagcatttgaaaagtataaaaacaatgaccataataactacacaggaaagctcataaatgaaacaaacaagattagatggaaaaggaaattaagaataataacatacatgatacagccacttgggacactttcctagcttccttcatccattcaatggaccataactgtatcaagttttgatgccttgaacacctcttgcacatccagtaatgacctcacagcccctattataaggatttgctggtcttgcatgacaattgtagtaagaagctcctgctctatcacatggaaccatgtccctcttgagtgtctcatagctaatgtactttatgtgctgaacaccttccagaactctcctgttgctctctgagtccatttctggctctgccaagcactctccaatgcttttggtgcaaacccttttggtcatcacggcagtttcactcaaattgaggtccacaactaataggccattgcagattgggagaagggtgtgaagcagaagaacaagtgccaaacatgggaaagtcatgacaatgaatctgggttgggacactgttctgtgttgttttcagtttgttgttaaggttgtgaaagtgaatgtgagagccttagtgggtggatagtcataaattggagactctgtgtacaactatctctccagttttcgtgcaaaaggtaaaataaaaaatgaaaattgtttttagaagtgaataaataaaactatatttatctttaaatttaaatatgttaagactactatatataggagtatttcaaattaaataaataataaggaatttatttctcaatccccttttaaaagtttttattgcacaaagtttacgattagacaaccagttaattatgttaaaggtatcatgcgatgaaataaatatataagtggagaagtagggtggaattatattcttttcgacacatcctttaatttatttattattattaagaaatttttatgtaagtttcattagatggcttgggtttatattttatttagtaaaattgccatgaaaagacaaacgtgataggaaatgagaagttaaaaagtaaattgaaacaaaaaaaaaaaaaaagttacaggattaaatcaaaaccaataataatgtacatatgaagcgtaaatattaatttttcctcaagtatatatgtataaagcgtataaattgtatttatgtctaaagtagacaaacaataatgtgcttgcttctgatttaatttaaaacaggttgtgttttcaaccaaagaaattctaatataaatgactaagtgaaattataaggttaatttaatgataaagagaaaaaaggagggagagagagatcctggaattgatttttctattaataaaaactaataatcaacaactaatatttatggatagaaaaaaaaatctttcaaatacaaattcactttgaaagattcttggatcgataaaaaaataaaaaataaaataaaatgaatttgataatgaaaatgagtttgatgaaaattaaatgtgttctattttagagaagaacaatgtctagctggataattagtgagttatttttggatcaataactcttgaggtatatatggaagaaatatcctgaaatggagacgacattgagcgtattttttatttataagagtgttacctttaagtccatcgttgattgttttgtcatttttgtccctaacaattaacaactaatatttatgaatagaaaaaaaccttcaaatacaaattcactttaaaagattcttggatcgataaaaaaataaaaatgaatctgataattaaaacgagtttgatgatgattgaatgcattgttaaatatgatgatacatattcttaaataatgaaagtaatgatgaaaagtaatgctacggctaattttgccattattttttatttttctgctaaacggcttctaatctcgtcgtacatattaatttgacaaacaagaaattatcaatcattcatgtattatattgtattaatcacgttaatctttgattttagaaattcttcactttagtctccaattttgtaaaaatcattcatttcagatattttccactatcattttatacagaataagattaaagtgaatatcattttataaaatctaaaactaaaaatgaaatttttgtgaaattagagagtaaactgactgacaattacaatttcaaaaactaaaagtagggttactcagaaatagacacatttctagtttagagtgtatttggtaatttctaaaattcaaataagtaggtaaaatggaataagttttaaaatcacgagtgaatcatgtgacccacggtgaaattttagctaggggagatttggcttcttaaaatattcaaccagcaaaagttatgaaactaacatgatttgaagacaacatatgattcctgcaagggaagataaaccgttgtaattcgtgcggtgtatgtagcgagagaaaatatcgttgtcaatgtgcgttctgaacaaatgttttcatgctgtgttagatggaattccatcatgtaatggaaagtaaagctgatctatccagcaaatacttactgcacagctctctgcgcaaacatgaagaaaaactccataatcaagactttttaagtttatagtaatacgtttgaaagccaaacagaacttgaatatttacaacactgtcaaccagttaattaacattgtatccatcagtcccccaaagctggtaaggattttggatttttcccaagataaatcaggcagtaagccagaataactcaaagtgtgagttgatccatgttcttaatgtttctagagattccatgagctgaccgcccttcatcttgttcatcatacgggtttgctcggtagttggatattgcctcttcattgtcagaacagcctggcctttcggtaagaaactgttcccagaaaacatcattcaccctgtctggaggagctgggttaacttggttgttacttggatcctcctgggatgaagctaaattggcctcagcagctacatttaggtttgaggaaacaccactatcagattctttaccattggcaaaaaatcttgattctgccaattttccaatttcttggcagtcaatttggggtgatctggccgagtatgaatttctgttgacttgcaatggacaagatgccagagttaagtttagttggcaggataaactatcaccttcttcactacttggctccaaagagatcagttttgagctctcagcagttgttgctcttcgcgataaacatgaatccatcttaaaagtaaaagaagccccagtatctgcaagctctaatgtttcaggtgcaaatgtaagagctgttcttgtctgcactccttttggttctacttcagacagctttttctgtgggctttccccatcttcatttgaactctgtgtgctacgtgataccaagttcatatctgaaacagcgggtgacaactccagtctaagtttattcgagaaatcttgatggaaaaaatttccaaattccattctaaaattgctatgactgtccaccaagctactttcggcaactggttgcacgtgatcaacctgaggcaatcgccttttcttatatgcagataaatccatggactcgattttgcgtgaaagatgttcaacaaaagtaggattctgaagagccttctcaaagaagttcagcaattgtttctgcctcttctcaataccatctaatcgctgcagaaaatcttctagcttaggctttgctgttgactgatgttgtttgaagttataaatattggattcaagagaagttttctcacgggaaagtttgtctatttcttcctcaaatgctgccctttctggatctacaagagaacctggaggatgactatgactgtggataggtttcctgcgatgtatattcttaagaagatgcttctgatctttcagaaactcatcattagcaaattcccatcgctctggatgtatttttcgaaatccctgataatagagcaatatcaatagaccaaaacaaataaaaccaaataatggttttattaaatgctcgaaaatatgtattaagaaaaagaaaaaaaatgatcacaaacaataatttttttttcaagcaacaagaactacaattttctttgaataatttaccattaaatccttacaggtatatactctttacaagaaagaaacccaccctctggaaagcaaaagtaggcagtgtttgagttgtgggaaagtaatattaaagaactgaaattatggtcagggtttatagtaaatggaaaaattttgaggactaaagatccaaggcaacccatgaataaaaaaaaaaaccagtaacacaaaagtactaatagcctcacaggctcacacaaatagggatctaggaaataggaagcaattctagcaagagaaagcaacaaactttctagagtttgattgcactcaaagttgaaattaattactgtctgtaatagtacagagctatagaatatgcatgggtgataggtctcaaaatgcaacctgaatgggcctacacagtaatcatagccaacaacatttcccaaagacagaaaattaaagcccaaatatccttttatgactcaatatccataaaagaaactaaggcattagcatttaactacaagcacaaaaatagcacctatcaagaaacaagtaatcagtacctctgtggtggcatgagctttgatgacaatcttggtttatagcaagggttggggagctcaaataaggtacatgagagaagtattgggtgatttaaaagaaaatgaattagttgcaaataaaaataaatgtcaatttgggagaaaatttgttgagtatcttgggcatattatctcaaggaaaagggttcctagttggctacagacacaaaaatgatcaagagtgttagaatggcctatatcaagaattctaaaggggcttcaagggttcttgggtttaacaagaaattaccaaattttgtaaaaggataatggcaagatggccaaacctttaactgatttgaccaagaaataaggttatcatgaagcttgaaagatgtgacaataacagccccaatattaaggtgacaacatttttcaaaggaatttgtgattgagtgtgatgcctttcgggagggtcctagggttagtgaatagtgacaaaacccatccaaacctgcttacgagaaggaactaataggtttggctttagttatctaacattggcagccttaccttttggggagtcattttttggtctattaaaaccaaagaagtctaaaagaattgttacagtagtgagtaacaaccccagatcagcagcgttgttggtcagtcaaaatgttaaggtaccagtttaagatgagatacaaactggttatgagaatacaaaaatataacggttacaaagtaaccatgtctactggagctcttttcctttcctttgttagtaattatatcttcactttcaaactcagttcattttaatatcagatcagcacaaaaagatcattataacacctatttcaaccaagaagttaaggaaaatgtattataaaatcgagcatttttatcaattgatcaaataaagtgccagggaatatgtgctttagactgaaaataaagaactgtgagtgtaaaccatcaagtgcataaacactcaacagttcaatagcacagcccaagaagagtatttacgtattattaggcatctattttgtgttaagacctactaatagacatatgcacctccatcagccatcttttttctggataaagaaaaacatttatggtggaggaagacagtttaaaggtaaagtaacaaatcctattcatgaaaacaaccgaaaatgctctagcatgaatttttcatcaagtttggtaattttatcatacaatattctccagtgatcctagaattcccaatggtttccaaaacacaacattaaaaagtaccactctgcgaaacgacaatataagaaaattgccaaattgtcatgctaatgtctaatgacacctgaaacttaggtggtattaaattcgcttttggagaaccaagggaaaagcatatataagtttttagaaactgctttatactttttactattagacgttgactggtattaaacgcataagaagaatccaaaaaagacagaaagagaaattattgagatctaatgatctatattgacatttgttatagataccaaccactatttctaagataggtcaagtattaatgtacaacaaccctcgctagcagcctactaagattgctaacattgtaagactcataaaaactaagaatcttaatattctaattctgataattattcaacatgcatcccttgtcaataatagaatagcagaaaccaggattaaaaactttggaacacatttggtgatttggtaattcatgagtacgtgatatatatcaaggggttgcagaagatcgataaaccttctctgatgaatgctaagtcctatactaccagattcttattaccttctgctgagtgcctaaattttctggtactttacttgagcaaggaataccacaaggcacagcataagattattctgatcaccttcctcaatgacttctgaatcctatatcccaattcacattccaaaaaaagaaacctatgtttcaaccttgtcaatatctttaactttaagtaacatatatcttcagatagactctatgagatccattgaaggtctctctatctcactatgcattctctccatctcacatcatcatcattaacatttcatttcagctcagtgctaatatccaacaacaacaattacaaaaaattagtaaaatccggcgatcatttcaagacatgcaaacaactaaatgaaagacagaaatccgaagaacgaattagaatcgaataaaaacgaagggagcgcatgaaccgcagcgaaacaaaggaatcgaagaaacgtacgtaggtattgagctggcggatgaagctggagaagttgttgtgcttgaaataggtcgggagaaggaggcgagcgaactcgggagggttccagacaacgaagctgttgttggtagagctccacgaaacgatgtcgttggtggaggcatcgtccaccatgtcgtaggtcttcagaaggaacggcgccggacctccggcaccggcggattgtggcgcaccgtccatttaggaatggatctttctagaacctctgagagagagaaagagagatcatgggtaaaagcaaggctaaaggaagaaaaccaggaatttgcaactacgctgacgctatgcagtttagagagagaaagcgagaaagagcggttttgtttgacttcaacgccgtctctaccgtagcctgctgcaggttgttgggggattgctacccaccttggaatattggaaaatatatttttgtttttctttttaatttcttctctctcttatgtattactatcatatagactctttcaaactcactatattagagatactcaaatatttaagaaaattttacatataataaaagtaaataatttttaaaaaaataaatcattctcacatataaatataataaaattttacttatttgggtcaattatttggatttaatatattgataaattcaagtatgacgaattaggagtgcaaaaatatcactaattttgaagagaaagcaagaaaatttaattttttatagcactttgaggattttcaaaaaaaaaatctttaacatactcagttttattatttattaaaaattataaaagatatttattaaattaattatgtgacctataagatttcaatttttttaataaattttaacatatagaagaaagtatgttcaatataatgtgttgataatatttttcttaaacttaaccttgatttaaataatgtttagttgatttttatatgaaatttataataatatataaacgaaatatctcattttaattgaacgtttttgttctgaattatattttattttcattttgatggtctaaagttaattattcgttctctctcttttcttttttttttaatactttgttcaactactaacgatagaagaagagcaacggtggtgaaatgacagtgctgaaatggtgttaggcgaagttgaaaatcaagcaaaacatctattcatcataccaatgacatgcaagaggaggaaatatcagcatatagcatcactatcgtagaagaataatcagagtttttttttttttttacttttccaaaaacattttgcatactctagatggttttattctgactaaattatttctacatacttctcattcgtatcttctgcacattaggatgaagaaattgagagagttcaatctacatgaaatctttttgcttcctcccagtcttgacaaacagtctttattttgaatattgccttctatacttatgtatcatccttatctctgaaatttacaggtgaagacgacaaaattttcttgcattttatacagtattttgtaagatccaatggaattacttttcttgatacatgtatttctttttcattgtattttttttatagtcttatttttacatgttacttttttatgtggttttttataggtggataagagaagaaaaattaacgagttttatatatttactcattgatccaaactgatcaatccattttttattgaatgattcaatacaaatagacttgattcaaagatttaatatgtaataatttgatacaataaaaaccagacagataaacaaaacaacgcttatgttttcattagtaatatataatgacgttaattgtttagttgcaaataactgttttggatgttttaagattttttagaagtgagtttaatttaattgcaaataactgttttgcaaatagtttctttacaacatttgctgctctaactaattgttccctctttctagtgtgatttctatgttatatattactatgcttagagcatatcaacaatatactatattaaataagttgctagtaattagatgtttgaatgtataaatatatttgttgagtcaatgatttgtatgtcttctttttaacctatttatttatctatccatctatatatacatgtcaagaattaatattttaagatattgaaaagatcaatatttaattacttcactttaaaaactttgtatgcaacatttgtaaatcatatactattcataaaagatataataattatttaaaattttataagtcttaaaaaattcttattaatatagtatttaatactttttcacaccataagaagggataaaaatacattttagttttagaataactaacaaatgatatgttgttattaacaattttttttcatgagacatttaatcacaaagattatgttatcattatttctcaatttcaaatgatttaataaaatctctttctcttcgatattttatacactaaattctttcctagaggtttagtcaaatgattgtcaaatccatttttgaatacacttaaaagtaaaaaaaaataaaaatgctagcaaatatacctccacacactaataagtaaaatactactcttgtatcccataatcacatatgtcatagactagaaaaatattcaagtatttattttatcgttgacatattgaaagagcactaaatctctaggttttttcaaagggttgtctaaatccatttttgaatacaccgaaaagaatgcatgcaaatacacctccaccgcactaataagtaaaatactacttctatatcccataatcacatatgtcttaggaaaataatattttaatattttagactataaaaatattcaagtatttattttattgcttaggtattgaaagaatatagaatccttaggttttcccaattagatttaatggttataaaacttgattacttaaaagaaaaaatatgttaatctttaaaaaaaaataaaacttaaaactcaaacatattgacatagtctttctctcgctctactcaaatcaaagcattttaataggtctttttttatcaaattctctaaacacctaaattttagtcacacaatgttccacatcctaacacacatttaatcacacgaagttgccacaaagttttacacaacacaatgacaactctaaaatcatgttcaaaacctctaaaataatttaaaaaacgctgaaaatggaacaacaacaatcccatagtcactaatttgacattcattatcattgagcaaataaaaaaaagattggggaaaaaattaattaataaattaatggattttaaagtggtcgggattaggatcctaccttaagttcttaaaattgttgttgtagtagaccaaaatcatcaatcttgaagcaatcacaaactcaattagtgcatgtttgaaaatgtggtagaaagccccaaacataggtttgccaacgcatcaaagtattacttctccgttgaaccgtttgatatatcttaaaatatgtattataagaaaaaatgacaaatcaaacgtgctcttaatcacaaataaaatagtctaaggtgagtgatatcgtattgttttaaagacttatcaacgtagtgcataagccctttaagatttaacatatcctctaaacatttgttgaaacaaaactaacaagatttttgtaagtaaaatcctgggactcacaaagggaagactcaagagggagagaaagagaggtttatgaagaaagcgttgaacgattgagagtgaagattttggcaaatttactattcagggtatttaattttttaaattattgattggggactgtttttaaaaaaattatagtgataaagtcataaaaaatattacaacttttgaaaatcgaagtcgtaatactttttacaaatgtttgttattttttattttcctgagtcaaagccgtaattaatcattcgacttttgtgtaaaactttttaaaagtgataaaattgtgcacaatgttacgactttattaattgcttttaaaaaaaaatgtttgagttgaagtcgtacattgtggtatgatcattctattgtttttttttttattatttgaagtagtaagttagtgtacttcttcctttctttctatttttttttaaaaaatctattttattatgtttttattttataaaaacttatgtttattttttaatttatagtttcttaatttatgtaaaaaataagattttttaatataaaattaacaaattaaaatatttattatttttttgtgattttatattttgtatatattatttaaatattttaatttaatgtataatatttgtttatgtaatataaatatgattttttatatggtttaatggtattttgtatatttaattttggctatatgattttattaaaaaatatttatatttattaataatgttaagatatgtatttgataaataactattgcattatttttttaataatatttaaaaatatttatatgtataatattttgcattattctttttatgatatttaaatagctattacaaaaaattaacgtactagtatttgagatatttaattttcttaatcataattataaattaatgaacaaaatcaaaatataattaaaaattatttgatatattataagttaatataaaaaatatttaaatattttcctttaaatttaattttatcaaagacatatcttaacattactagtaaatataaataatttttaataaaatcatatagccaacattaaatatacaaaataccatcaaaccatataaaaaatcataatgatattacataaaaaatattatatattaaattaaaacatttaactaagatatacaaaatacaaaatcacaaaaaaatacatattttaatttgttaattttatattaaaaatattatttttaacataaattaagaaactataaattaaaaataaacataaatttttataaaataaaaaacataataaaacagaatttaaaaaaagaagaagaaaggaaatagtacaccaacttactacttcaaatagaaaaaacaatagaatggtcataacacaatgtaccacttcaacacaatttttttttaaaaaagtaattaacaaaaaggcttaacgttgtgcacaattttatcacttaaaaaaaatttatactaactatttacaactttgacgcaagaaaataaaaaataacagaagtcgtaaaaaatattatgacttactcttttttttgataaatttttaaaaatggtccccaataagtaatttaaaaaattaaatactccttaatagcaaatttatcagaaaaagaatatgatgagttttttaaatgtaaaagtagggagtaggtaggcatgacaacttcacccgtccccacccgcattggcccgcacccgtcccgattttaacggaaaaaaatcgagtttatcagtttctggttcggattcgatttttctctgcatgctgaattcaggggcagggacggttttggtaatgttgacatccgcctcgcccccgtcccgcacctatttgtcctatagtaacacaaataataatgatattcgtttaaacctttgttactatttattatgcataataataatttagttaaattttaatttaatttgattgttttaacaatataatttttttaaacttatcatttatatatatcgagtctgataatttgattaactatcataataaagaacttaaaatatataaaatttaaggataattttaattagttgaaatctataaaattttatattaattaaatgtatataaaattttatattaattaaatgtatataaaaattaaactcttaatttttgttcttttaacttctgttgggggaaggaatttgtgtttgtaggcatgcattttgtattgttattcaattatttcatatcaagaacgataatgtttaatatgagaatttagccaaaataatcgagaagaaaaaaacaaaataatgaaaaagatttaataaagaagtaaaattattttatactattatatattcaatagtgtaattaatgatatatcatattatttatattttgtttcaaacttcacgtaaattctattgaggataattatgttcaaatatttaacaaatctatatatctgaaaatcaaacttaagactgttattaagttttcatattaattaatttatacgtttaatgatacatatcaatattaatataaaatatcaaactttttgtataacaaattaattattatatattaattctaaaattacacgtaacatgaaatacttatatttgattttatttatatatatatatatattattttgttggttcgggatgaattcagtatttctggtggttacttattttttctatgatgaatccatacaaatatagacgaagtagaagaaacaaactagagaaagtaagatgggcggaggcggggaaattgatccccgtcaggggcgggggacaaatttctgacccttcgattttcgtgggtgagggcgagggtggggttttaggggcggggtcggtataagcaaaaatcgcccccgaccacccccgttgccatgcctagaagtaggtacgataagatttttctagaaagattaaataaaaaatcatattattcatataaatataaatttaaaataattaataagatttaatattttaaaatgtcttacaaatgacacaacattataacgacattcatatacagtaaactaggaagtgggctcgtgcgagataaacgaataaaggtaaatggagaatagataaaaagaaataaaggggttgtcctgaatggttattaaattattatagattaaaaaaattcatattacctactgcttaatccttccttttaaatgaaccatgaatacacatggaaaaaaaacataaaaatgacatattccgaaaattttagtgatagaaagattttttttataaatatgattcatttattattttaaaaagataaaagtccatatcagttgatatctgtaagaacatatttcatatcatttagttaaattgattttccaaaactaatctaatttaaaaataattgaaactttattctattactgcattttaacacgaataaaaatattactttattttaatatataatatatgaataaatggtatatgcattattagtacagaacatttttacactgatgtgtaataaccagtagcataaacttaattctattttaaattaaaaaaaattaagtaacacctaattttttttactacccacattggtctcattttgtcgtctcaagactctattttcttaattttgtctggctatccatctctgtcacattccttcatctcaaaacttcatctcccatttcttctaacaacttttcttaatttcttatctttttcaattttattgttaatattttttaaaattgaatttttatattttgttaaaagaagttatcaattgttaaaaataactttttcacaatataaatcatttagtgtaaatctaaaacataattatatgtttagaagtatttatttattaattttttaattatgatataatttttatattcaaaagtttttattccttataagttttagttatataaaataatgagtaacttatacattgtacaaactaaaatactagttataagtatgttattattttcaaaataaatcttaatttattttaaattctatgaaatactatttttttaaaatttaaagtaaattaaaatatttgtatatattaatttgatttattaaaatacatgttaaagtgatttaatttatataattaaataattatatttatctcgtatatttgtaggattttaaaaaatatgatattttcctcattttcaaacaattttttcaaaataaaaaataaaaatattttcatgagacacgagaattatgtttaagtctttaaattttcattcatcgtcttacacacgtggggattatttcagtagcgtgaaacttccagaataactctaaatcagttctcttcagcctgcgctctttcgcttcttgaaaatctttctgaggtaggttctttcttccttttcaaatatttcaagtttactcctttgattttcgttttatcttattatttggtttctctctacctatcttcagaatcgagtcacagagtagagcgaaatcggcatagtggtcgcatcattggttttttgccctaattttatttatatggtttaatgttgcagcttagggttttcttcaaaattagtttcacgtatttgatgtgaaattcaatcaaatttggtttaggagtgttcctatctacattttcatgaataactatagcctgcccagtgaattaagccattcgttttgtttttcacagtttgtgaattgtgactgagtttctcttcccctcgttcatggcttcgtgccctagcctcgcaatgttatttatatggttgaatgctgtggcttagggttttcttcaaaattaatttcaccttttttatgtgaaatttcaaccaagtcaaggcatagagtgttctgttttgctcagttatccaatatctgcatcaatagcgcactatagcagtgcaaagtggccactgtaaagttttgaatagccctgtagtggctgcaatcacggccaaaatagtggctctagcggtgataagtggcgctagattgatgcttctttctaaacccatttttgcccacaaaacagcgtagtttttcggttaagggtgtgttcttagtgcacagttgagatttgcctccccttctttagaatttaaaaatccctaattggatatagtttctctcgcttttatctaccgtgtgacactcactatttgactaacttcggtgcatctctggcagtatttctgccaacactcaccttccatatttttctcctttgaactctgaacctctgttcttttatctgtgcaacacccaccctcactttttattgaatgtttaagatgccttgtatttgaaatatgaacgtgcctttcaattttgtttgtttccttgacttgtattgtatgttttgcttaaaacctatgaccttttattattaatgaatatatcatgaatgttgatgtttgtcatttaaactttgagcgttaaatgtatattgtacagataaattatttaatctatatataaaaattcagaatattgcccatctcactatgataaccatgcttacttgataacgtgtaccaaataatatgtaccattatattgcttgggagaatgtatggaaattgactctttgatgccatgtattccttgaacagatacaaaaatgccgaaagtaaagacaaatcgtgttaaatacccagagggctgggaattaattgagcctacactccgtgaacttcaagcaaagatgagggaaggttggaattttacatcatgtgcttagtagattttattacgttcttgctgaaatcaatgaaatcaatagttttatatcctttatgtggcagctgagaatgatccacatgatggcaaaagaaaatgcgagacgttatggcctatatttaagattgcacaccagaagagccgctacatatttgacctctaccatcggaggaaggaaatttctaaagaactgtatgaattctgtttagatcaaggatatgcggaccgcaatctaattgcaaaatggaagaaggtatctaaaattagttattttattctacttttgaaactggttttgtttttccatttcttttaacgtaggaggaagttctcaaaaaatctgctagttaccaaaaaataaaagaaattctccaaaacaaataagactaattcaataaaatgagccaaaagctgcgtgaaaggtctattgtgaatttgcaacaaatcatttgcattaatcatgttaagtaccactgtcctaacaaaggacatggcttttgaagacaggtttgaattttaaaatggatttatcaagtagaaactaggttagggtgtgtatgaaattgaaagaaagctctgcaggagaaaatactggaagagtccatgatccaaactcttctatctaacttagttgagggagaaagagactcaagtaaaaagtttaaaaccaaaagggattgtagttcactatatcacccatattcaaatctcttaagtaaattaaagtccctatgtaaataatgatcttggattcttagccttaattagaaatggctaatgagcaaagtagatagttgaaacatgcaggaaaagtctctgaaataggagcactccccatctcaacttcctctcaaaacttgacaaagataccattataccataccatcacccaaacattagaagtgtattcctggaaaataatcttccaattccaaaatctaatatgagcagtgttgcttacttggtcagcatcccacctgttctggtgggggttgtacttgctcttatatgcttggtgagttgttgcctcttttggcattagtctccaaaggaaagtgccaaagtcatttaacctctgaaagcaatgtttctgtgttaagatgccaaattatcaacccctaacccccttcattttaggcctatgacaaacctcccaagtcccaaaaagaatgttctcttctctgtttacccacagctgatcaatgttttgtgtctttgggtcaatctgaactcacattgtctgtctgatattgagtactggtgaaattagaaagtatgttatttctgtactcatttgtgccttctccgagatgttaattgttgtaaggttattgttacttggtagctaaaaacgttaaagaaataggtattgttttacagtcactaagattttatttgatttgtgcattctgtgttttcttggattttgagtacttaaatcattatgtttttggtctgaattgcagcctggttatgaacgtctttgctgcctgaggtgcatgcagccacgtgatcacaattttgccactacttgtgtttgcagagttcccaagcaacttagggaggagaaggtcatagagtgtgttcactgcggatgcaagggttgtgcaagtggggactgattgaataccgattctagttttagttgccaatggagggtttcttagaattactttctttgtgcttttagctttctgttgtctgaaatcctcaccatgggaccccacttctccgggttgtattactgtactaaatgagtgctatttatattgggaatattggtttcatattagtcatctgcctagttcaaaatctgactggagctttgtacctttacattgattagcctaatatggtgtacttttgcttgatactttacagcttaaacaatgggattaaaatactcgaaggttagtgtaaatttttaaagctgctttggttaagattggagtcaagctaaatattgtaaaagttattttttatttaaagaaaacaattttgtgagggaaagattgtaaaaggcaaagcattattatgagataaatatatttttgtgtcatccatctcccagtcaattcatttgatgagtaaatcttgaaatacacaaaatgaaaataactggtgatatatagtctaactagttgagagtaaatactatagacggtgttgtttccttgaataattttagtagtggtgtaaattcttgtaatcgtgttgaacgattgttttgttaaacataaaagtttggagggttgtttcaatttaagattaataatttgcttattttgcagtcaatttctttagcagttcttgaaaacaattttaaaaaaattatctttcagaatgtgatttaacgtagatgtttatttcaaagtgtaattaattatattttgaagaatattcttgaaaacattctgatgaaaaatgtgattaccgagtaaactaaaaatgtaattagtatagtatttaaaagtggatcaaatggggggaaatttcctctgaagtgctggaaaagagctgaacccatcaaatggaggatagttcaattaaaaggagcagggggacaaaagaaaatattaggggaacccattaaaaaaggctacgctctatattgttttactgaaaataaggatattgctagagccctatagtgcacttgatccatgtagacaatttcaccgaatagagtaagggtgtgttcggtagagtggaaaaaaaaagtaaattaaaattaaaattttgaattaaagtaagatttaaaagtgtgaatttcaccttattttagtgttcatttatttttctttttcgttctttatttcctcaaatgaacgggcctaggagttggttgttttacaaaaaccattaccccacacatattgtattgttcactaagaatcagtcaaatggaggcagggacaataggatataaccaaaacatcaatataaggcagctcatttatcatatatgtctatcatgatttgtgtgcagtattatgttaatctcaatgctgattaaatgcatagcatacactttttcaacagacaacgtgatgcataaccaatgcgtacgcaaacatatccacaacacaattcatattaaaagaaatcaagtgtctgtgcagacccgtgtatcagtacagtaaatgtacctagtatgggtacaccaaccatgcaggagtggccatgtaccttacccaacatctgcttagatgtttcaatagatatcattataaccaagtcataatattaagcattttgatgcatatcaagttgagaatgcaaagtgctttttgattgccaaatcatttgccaaaaacaattttgtcgtccaaatatacctctaattttgaggcactaatgttccagtcgaatagatccatccacatataatctatggcaagtggcaactaataaaatgttcagaaaacaagattaaaagctgaaaaaatgtttcacaaaaccagatattgttgaaatctcatttaaatgctaaaccactaaaaccagtgtcatctcactgtcaaggactactgttccttggcacatttgaaccatttttagctttacattgaagcaaaatatgaagcattgggcacaaggctgcaacccaataaaatttacaaattacccctcacttaatatgacaagtgcccaacatattgaatattttggttatagacaaaagaacgacatgaaagaactttcaagaagacatgatcacaacttcattctatcactaaaccattcggcagaatcagcatttacgtctcaaaacccagtaaccaatctaatgagcatcattgcttgatgagcaaaccatctagtcgcccccataaaacattcaactgagagtttgtgacttacctgtgtaatgataacctagtctgcagccatagaaagaaaaaaagaagtgaatttataacttaaagagatgaatattcaaagtttcaaacaaaactacttatggtaaagaaattcgaattacaaaaaaaatgttgtgcagatattacaaagaagaaatgtttgactaaccttccatgatccatcgctgaattatttgtggtcctccctcgtacataagatatagcaaaacgagtgcataaagtgatttcaatctgcaaatcaagaaccatgaagtcaaactgttattttaaaaggggggaaaactgtcaaaagtaaataaaaatttgtttgcagagaggacagctagcatcgctaaattagatcttagatttttgttttctaacaggtaataaatatggaaaatttttcccatcacaaacaatgaactaggagagaaaggagtacagtgcagaagtatcaggaatcctcctgaaacagaaaagtaaaatacacaagaaaggaaacaaaatataaaataacattggctccaaagagatatctatgataaaaggaagctactgaacactagctcacactacagtatttttgagtgaggagtttctatgaaacagaaaattcttgggtgctccccagaagttccccttctatacggtatatcagaccagaagatgagatcttttccatttaacttaataaggtgtaccttcatagttgaaatttattaattttaataccagtagctggaaaaggattaagttttaaaaccagcttatgatcttattaaatgtttttacattaatggaatccatttgataaatgtataaaactaagcaataagcaattacatgatttcttgggtatattgaatttgccctggcagaatttatgctgacaattatcatttcctagcaatattgattgacttatccctaatgttatggggaaacaaaatatcctaatgtaacttgcttcatcattaaacttacttgaaggcaaatatataattggtaaaaaattactcagttccataaaagtgcaaggatatggcacaatttctaagttgtatataggactattttttctaagctattttaataacttgaggttttatcaaaataaatgtgcaagcagaggtgaaaatacttaccactaaaaatgtcaaggaacaattctcttgacagcttaagctgtttggtggagctaagaaagatttatatctaacacccccttaaacagagctttttgagtttgaagtgtggacaatgcacaaacccactttaccttggggctcaaatacaagttaattatgaagaagagaatcaacaaggatcaatctcataatttcttatttatgaggcttgtgataccatgttaaggaccaactctcctaatcacacaaattgtcaggtggaagcacttaatggtaatggttttatatatttaacaaatggtaagttctgaagcctatgccagttctctctatggggtcctataggattgtggaacatggacaaattgagagtcaggatttgaataaatgtcctagtgaaactcttggcatttgctatctttctggaaacaaaaattctcgaattctggtgtctccttcattagtagataagtagttgataataatttctgtggtagcagcatctactgaaaaccctttgtctctcattattgtaaggtattttattgaccttgcaatctccttttttgtcagcaagccttggacaaagacattgtaagtgcagttatttggctggcagccattcacttccatatttatcagtaagtcttcagctttatccaacgagccttgtttacagagacccttaatcataatggtataagtataaacgttaatttgcaaacctttaccaggcaaaccagaaaagagttcccatgcagcattcatttttccagcactgcacattccgtcaagcaaaatactataaattacaatattaagatccaaattactcttctccattgcctcagccaatgacacggcctcagaaagaagattttctttacataggccatccaatataacagcacaagtctggagattggggacttgaccatatttgtgcatattaaaaaacagttcttttgcagctaatggtctacctgcttgacaaaaaccacctataagagtggtccaagtgacaacatcaggaacaaatcccatcttactcatttcctccaacagatgcatagccttattaatgtttttgtccttacaccatccatggataagtgaagtaaaaaccacaatgtccggtaaacggcccctgctaaccattaaatgaaatactctcatggcctcattcattttattttgcaaacaatatatatgaatcaatgaattataggtgaagacatccggcccttccccagtcagaatcataaaaccaatcacacttttagcctgcatcacttttccttctttgcagaaagcatcaactaaaatattgagcgtttgcaaatccggcctcattcccattttcatcatctcatccagcagagaacccaccgctttccatcttccaaaattgcaaagaccttgaatcaagcaagcgtaagtgaccaaattaggtcgaacaccttttccattcatttctgagcacaaattcaacgcctcagataataatccatccttgcacaaaccatccataattgtgctgtaaaccaccacattaggtttccaattcctttcatccatctcccttagccaacctaccgccgccaaagtgtctcccgtcttacacaacccattaatcaacgccccatatgtgtaaacatccaatggataccccattttctccatatgatcagccagtcccacagcctgagccacattgccctgcacacaaagcccgttaatgagagtggtgagagtcatcacagtgggctccaaaccaagtttgaacatagtccccaacacagagaacccaaaagcaaccaacttcaaacggcaaagacaattgatcactacattaagagtaatggtatcagcttctatgcctagagaagaaaacatgtgcttaactaaagagatggcagtggtgtaatgcttcaacctcacaataacacccaacaacaaagtaaagtccttcacagaaggcaaaggcttcattctagacatgccgtggaacaagtccaaagcttcatcaatattcttcaatttatctgacctgcataggtttctcatggaaatcaagaactgggttccgttgctatggctctcagtgtcatcagtgtttgtggagcaatgacagtgctttgaaaaagacagagaagaagaaggagagtggatggaaatggaatgagagaaagtacccatcatgtgatgaagaagacgaaaacgagagaaagagggtactcttcgaagcattaaaaactcactcttttgcttccgaacaccatcagtgtcggaaacaacttgctgcaaccgttgttggttgcagaatctggcaagggtttaggtttttttgtcaggaggctggtttaggattttgaaccgttaataaggtacaatattaatattattgttgttattattattattagtagtagtataaaacgaaaatcaaataaaatgcggacaaattgtgttttgtttttaataagaaattaaaacttagtaattatgcttatgttcaaataaacaaaaagctgaaaaaagatagattggtcattgacgtattttttcaaaatacactgcttagtgaatatttttttactcctaaataaaaataataaggattatattttaactatacaaaaataatatttatcttgtatgataaacaaatgaatatatattagttaataatatgctaaaatttaaaaatattaatttaactaataaactaaccctttaggttaggaaatggggaaagttaaatgtattttatgttatatcttatatacaattccaaaatataaaatttaaataaatatgatattccttcaatatttttaatagctttagagtttatatatttaattttaaaaaatattattattatcagttaacagttaataaaaacataatattcgtataaacatgtcatttacatagtataaaataaaaatatttaagtagcaaacatattaaagcaaacaaataaaaatttgcagatttaataaaataaatttgataggagaagctgggtttgggcgacgcgagggttccttccggtcgctgtaatcgtaagtccttcaaacttctctcgtccctttcttctattcaactgttagtcttttgaacccaaacccttcgaatgtttcgcatatcgaattttatcattcaccattgatctttctgtgtttcttcattcatttatttatttattttgcttttcatttaatctgaaatcatctgttgctgtgttgtgtaaaatagggtttggcattgaagggaatcgaaaatcaattgagtaagaacgatgtcggtgacagcgggtgttagtgatactgtgatagcagttagggataagctcagaggtaaaattggccaaactaaagttaagcgttattggcctggtaaagttcctgaatgggctgatgatgagaacgaagatgctgcccccgccgatattagaccttccagggaagctgccctggaaaaagcatttcctcgtcacgaagaagatgctgctattgtcagaaaagatgatcgtaggctccgccgtttggctgagagccggatagataaccgtgaggaggtccgagctgatcatcgccgcattcgccaggctgaaattgtttccaccattgaagaggaggccaggaggcaggaatggttggagtttgaagaagaagatgagaacgctctggcggaaagaaggaggctgattaaagagaagttgcttcaaagagagcaggaagaggcacttcctcaggaagaggaagaggaggaagaagaagaggaggaggaggaggaatctgagtacgagactgactccgatgaggaatatacgggagtggctatggtgaagcctgtgtttgttcccaagtccgagagagataccatcgcggagcgtgagcgtcttgaggctgaggagctggctctcgaggataaaaggaaaaggagattggaggaacggaggattgagacgaagcagattgttgttgaggagatccgaaaggatgaagaaatccagaaaaacttggaaatggaggccaacattgctgatgtggatactgatgatgaagtcaatgaggcagaagaatatgaagcttggaaagggagagagattggtaggatcaagagggatagggaagatcgggaggcaatgttgaaggaaaaggaagagattgagaaggtgagaaacatgacagaggaagagaggagggagtgggaaaggaggaatccaaaacctgctccaccaccaaagcagaagtggagatttatgcagaaatattatcacaaaggcgctttcttccagaatgaatctgatgaccgagctgccactgttggatctgatggtatttttgctcgtgatttctctgccccaactggggaggataaaatggacaagacaatattacccaaggttatgcaagtcaagcactttggtcgtagtggaagaaccaagtggacccatcttgtcaacgaggatactactgattggaataatccgtaagttcaatttctcctatgttctatatctttcaagaatagtggtagattgtttgttctattctttggtattagatctttgttgttttatcctgagaattttttttttggcatatctgttcatatttacttatgaagttcatctgctgtggcactggtccaaaatggtcttggacattacttttatgttcatggaatgaaattgagatgctcatgtcaaaatatttgctgctatttgtcgtcagaagaatgagatgagtatttttaagaagaacggttttgtgatggaggccccaaggcccaagatcactaaggtgtatgtaaggatagccaaaaggttcacatgatcaattttaggagagatataaccaactgccaaccctgtagctgagcatgggaggagggcatgtgggcttgttctaaggagagagagaatattagcctgagaagggtgtgtagaaggtaggctggaattaggcttgggctgggagagaccacacactctcgaaactgtctaggaatcttttttcattttgtaccattctacacagaagataccaggatctgaactccattgattaagacctgttactggaatacaaatatttgtatgcttaatttctttgttttagtctttctagcttgctggtacctatcattttgctttttaaggaatatgattgtgggtgagattgagaaagagggagagttgataggaaggaatatagttaaaagacatgtttcatttagagtaagcatagttatgccatctcacaaatcctattttatttttttggcattcattttgtagaaatatgtacttggcttgaagtttattgtttacaactttcttagtttctcaacttcacctgacaacctcaccttctatgtgaatttagctggacagtaagaagggattatattgcatgtcacaatttaaacgagttgcatattagcagcccttgatatggtttgagatcttgacacaagtgcatgctcatgagttatgcttatttgttttcatagtacttttgggtttcacttttgtcatttgcttgcttgtaatttgtgaagttgagaggataacataacatatagaagttatgattctattttaatttatagattaagttatattctctgttctgagaacatctgaaatactacttttatgattgattctgtttgtgttggatgttgatgtaacttgttaaattgattctgccattcttctgattttattacaacaaaagagtctacacaatttttttatcacacctggattttatcatgcattgtgggttgataggcttgcagtcatgctatcacatattgataatcatctttggaataatggggtttagtatgtttaggtagcattctctgcattatgaaagaaatttttgcattggctttctgcatcttacttttcttgtgtcggatctatctatctcccttgccaagaatttggagttcgttaatgcattgatgataggaattcaattttcttaatgtgcaactaaccccttcccctgaaaaaagggtttctttagtactactgcaatgagccttttatgcttatatattgactgctgcaatattatgctctgatgttcttgttattgttgaattgtaatgcaggtggacttacaatgatccacttcgtgcaaagtataatgacaaaatggcagcaatgaacgcacctatagtgaaacctaaaggaagcaggaaattaaaggattgggaatctcgatgaacttgaagttacaaaagtatgcatgaagatatcatcctttcagttattagactttggagaaataccagagtagatatgtccttgtcctatgtatgattgtgttctgtcttaaacagaacgtaaagtagttcatcacggctggagcgtgtatgttgtggaccatggaaggcaattgtgacaggaattcggcgctagtttatctggatattcttccccagttaatgaatcatagctgatttagagtcctgccagcccagcctaatgactatgacttcctttctttgttttgtcatcattttgacttttactggctggctatgaggatttaattgagattgctgcctatgttgatgctttaggagccactgtttttcaatctaagatcatttatatgtgcaacttcgatactgactggaactcccgagacgagagtgacactgaattgatggtgtcaattggtgtactagttcactagtaaatgtagcataaacttccatgtttggataatcttctagctgaacaaaggggcatattgaaagttatttattcaacccgctgcttgtttgtttataggagttttttgacaaattaaatcatatttatattaatccaaaaaatattagagtaatttttttgggctatatataatctaataagttaaatatgaggtccatccagaataattttttaaaagagcaaagttcaagagagaagggcgtattttatcgaatccgcatcataaatcaaagagtgaagggacaaattgaaataaattacactttggtctcttattattttcatttcttaaatctggtttccattttttcttgtcaatttgatcctacaatttaacttgtataatttcatccgttaatctgatatttgctgaagtggatgtgcagaagcgtcacattgatgtttttgctaattattgaatgtcaaattaatagataaattaaaattgcacaattaaaataattaaatgaccaaatttgtgaaaaaagaatgaggggaacaaatttgagaaatcacagcataaaagatccaaaatacatttgagccaaataagataagaagaggaacggaatatatcttccactggcttgaacactttttattcactgagttgcatgaggcaaataaataataaaaaaattggaaaataatatttaggtaaaaatataaatacatttttatcactcattttttacatcaaattttctcaagagagtgcgttgactgctgttgttgctgcgagtttgttcatgtgtctttctggaaaaggtgagttgctgaattattcatatatgtttagattcgttatattcgagcaccacttatcattatggtacatgctgcgtatggcttctgtaacatgtttcaatgttctgttagttatcagattcttgacaattactgaatcattttcgcattttatttgtaattaaaagcttcatattctattcacttatcatatatatatatatatatatattccacatattttttttaaggagtgtatattgcaattgatgggtgatgtctacgtttataacattacaaagtctattccgtatggcattgtagcttatggttgtcttataagcattaccccccccccccccccccccccctccccgaagtagaagaaaaatcaaattccatctagcataatggaacaaagaaagagttgggagataaaaagaaaaaagattattgatacaatcacagcagttgatctttcgctattgcacttaatattcacttattcagaattgattacctacggtcacagaataagaattcttcattcacagtattagttattagagaaccttttggaaattttcatataatttcaaattcaaaagtaaattcccatcaaatttaatggacaacttaaagattatgtgaacaggcatgattcatgaacaaccttaaaccttaaagatgtttgcatgaagatgcaatcaagagtcagacctacaacgataatacttagagcagcctctattttgaggatttgagggtggaggaagacaccctccagttttactataagcttcaccagagccaccaccattacaaactggtttatctctctgtaaagctccattggaaatgtatgatctcttctgctccaaaaaccttcggcttatttcggactccatcaacagctcatcttcttgattgcattcagctatggaaccattgcatgtgcttgcatgacttatcaatgagagcacagtgcagctgctgaaatgcataaagctgaagagcatgaagtagcagaaacaaagaagtctaacggtggatgattttgaggccattcttctgttgtctcttggatgtactcttccctccactctcccactaataagcactatatagataatattagatcatatgacaccacctttttgaaaaggtgcaagttgcattagtgataagctgttggagcgcacttcaccaaaccttttgttttggacaacatggaaattatgttatttgccatgtgctacagatgtttttctttctttcttttctgtgaagactattgatttactctgctaataagtgattgcatatgtatgagataactgagttgctctcggaagataaaattctaatatgtcccaagtattctgtatactataaatagactaattaaaaattccataccaaataatagtaccccaaaatgaaaaaatatttatagaaaacatgtggttggttttgtggcatttgaatatgatgatatttttttggttcctagttttgttccctgggtaaaatctattcataagaaaaaatttgcaaaagggaagccaaaataatgagataaggtgatatttgatttgagtgtttattttttagttttattttttcaaaatatttttttttcaaatttaccagatttagaaaatatgtatttgaaaaaaaaatactttaaagtgtcatcacattttcacttttttaaaagagactaaaaatattaatttgttgttttcagttttggattatttttaaaaatatttttagaaaaaatattttctaaattttaaacaaatatattttcacttattttttattttctttaaaaataaaaacaaaaaacactcaaatcaatcaattgccaccttaagtttcttatttgaaaatccttacacacatttaagaaagtataaatgaacaaatgtggagttaggtaaataggattataggaagggtgttatcatgacaaaagaaaaaggagagaacagaagctaaggtgtgtgttgatataatcatacatctaaaatatttggtacatattcctcgaagttgccccacctaaactctcagtcttctatcagacaatggacctcaacatacaattgtggtggggtccctatgggctatggatttcgggatttcctttgactctaataaaacgaggacaatgactttgagttcctttcacaccaatctcaaattattgcactcatggaaattgtaaagccaaggatggttccaagcatttacttaatttcttcctctattattttagtttaattacacaaagtggcacacactgcacaggtttgaatcttcacaccttgcatagcattcttggaagcatttcctatcaatagtatgaactagtttgtttcaaactgatactgtgtttggataagtactcctatttaatatcaagacaaatacaggcttcaatagttgcaagcaatttggacctggcaataattttttttcatatatttaacatgataaaaacaaaatgggggtagtgaagttttttttttttgcacgtaggacacaacaatttttgtttatggacccagtttgtatgcatttatcaggttcaaatgatcagagtttttttgtacagtgggccaaaggggtttgatgttggattcactacacttcataaaatagatgtagactatcgagttcacaaaataaatattacgaatatatgcaaaaattactccatgccacacaattgtgggacaacaaaagtagatacatgccataacaatttttcttagcttcaaagaaagatattgaacttcatgtcattatacagtttattatttgatcctgtattattgtcttgtgtttacaaagcagaagccaaaacaacacgcatggccaagaaagcactcatcatagtatatgatttccttattcttcccattggacggactgaagacttcaatttctgctgttgcctatcctggagcatcctctgttgtaaggatttgatgctggcggtaagcagtttttgctacatggtgctatgttgcgcttggtaacttccataataatgtacttgtttgcatttttagcatgattttaagactccatttcaacccttcacataagcttactgcttcattcctcacaaatcattacattttctggtactgattttggagttaagtctgtccatttatagtgctaaaacttgaaaaatgagaaatgagaaccattggtggtggtcacggaataaggcataaggaataggttcaccttcaactaatttttgcacagaacttttctctagaaactagaaagttgattctataataatgttgttcaatctcatttattttaactttggcgtttaagtgatggtattgttgacataactgttataagcttatagatgattccacttattagcaaacagaggttcttttcaaaagtcaatccaaatgagccagtcattttcaaaataggtggagtcctaattagaatgaatcattacagtctacaaaaacacataaatgaccaaggcgccctacaagttaccatctgacaatcacaattcacaacgaaatgatttggttgggttgtgatttcaaatgcattcaaatgggaacaagcaacgtagaaggtgcagcacattcatgatttgaatgaaaatcatagaatcccaagtaaggccattaatctagaatattactctaatagatttactcgatcaggagacccaagttttggaggtgagcaagatttattttacagagaattctgtttaggaagatgtaaatgagaaagtactgaaaactacatgaaaatataactttattacaatgcaagcatcatacatatgcaactattatttatttataacattagcccacctctattcattcttggactaaggaatttattcacatggatattgcttgtagcctggcctcaagtggcatagctatcacatccatatatctgaagtgcagtcaccaccaggatatctcatctcatgtgcaaggcagggaccttgaggctcagctccaaagtcaacaaagaagttagggttaattttcagacctccattttcagtatcaatatcaatctgtaacatgtgggatcctttctctacaagctctggataaaattgtttatcccatgcactgaagagtgagtttgtaacatatagccgcttaccatccgaactcaacagaatcatctgagggccagctctcaacttatttccctgaaaattacaatttttgatctcttcaccttagaccacaaaaaggtcaaaattataagtgtaattatttaccacgtttaagcatcacataagataaaatacaaaagtgaccaaaaatttaaggcaccaatgtaatgcacgtctattatatctactacatctaagaaccaatcaactccaaacatgtgagatgcaagaagcataacactagaatcactaattcaaaagttaaactgcactaaccaggatgtctggaacatcagattgccaagtattaccatcttcagttatagctactatagggctttctttctgaagtagtcccccaacccatacttggccagtcagtacaggatttttagggccctcaatgttatattgtcttatatcaccatgaagccaattcacaaagtacagaaaccgatcattgagagatatcagaaaatcagttataagcccaggcatttctggaagaatccagttttgcactttcaatggtttcactgatattgcaacctgcaaagtcagtctagtctgtaagtattattgatcattatgcgttggttgaagctgcacaaacactaaccacacgactatacaaaatcagtatggatatctatgaatagagtagattatgaagaaaattatatagtctctattatttcatatgagcaccgatacaatatatagaaaaaatgaagaaaaaaaaaggaaatgataaataggatatttcaagaactaggaatcccaaaattacaggaatgaaataaaaatagaatagctgaatgtaaaccttccgattaatgagatgttgtgattctcctataatttagggattaattttttactatatactttttatgtgcctcatgactccatgattcatcctcagtcttgaaaaagcgtaccatgttacttgacaatgcacacccaacgaaacctgtatctttagaaggatcatgcagaaaccttacctgcatttaggacaagttgcttacaaattatctcacctttcacataatacttcacaagaacaagctagagagaaaaaatgtagcaaaggacaaacatatttatgattaaatcacaagtacattaacataatagcttcaattacagcaaaaaaaaaaaaaaaaaaaaaaaacataaagtgcattataactggtggaaataattccagatttatatattaaacaatgtacctcccagggtagaagccctgactcaccaaggtccaatgtttgtctcagttcaccccagtccagctgtatacatgtagatgcctcccataaagaccatcagagacatgctgtaaattaaaacccaagacgtgacacaaattccaatccgtaaaaaattaacacaccacatttgaattacaaattccaatccgtaaaatatagatttattatatagtatgtcgactgcctcgaagaaatactaattacgttaattatactaagattcaagtccagtaactcagtcgaatgtgaaacttcactaattcagagctttagaaaacctccaatttgtttaccacatagagtagtttcaaacattttctcaaatcaattgtatccacattggaataaaatcatcttttattttacttgtctctttttcactctcttcaattgaaaaatacacgtcgactaagaaaaaatagcagaagaaaaaaatattcttacttaaaagtgatatttacgcactaatatattattttttaattactgaaactgaaaataaaacaagtaaagaagacaaatgttttgaatcaatctatatgatactatgcaaattttaggagttcatttcagtactccctccaaagaagagagactcttacctttttttttttctttcttttggaatttaacattaattttataaattcagtaccccctccagagaagagagtctctaggcaccacaattaagtaggattgcaaactggacctagagaatattgtggtgttcatggattgtcgaccctccctctccattaaaaggattaatgtttgttgatgttacaggaccttccaatatcctacttctatggttgaatggtcgatttggtccaaaaaagtgtacagcagtttcaagttagtccttgaattcaaataaattgaaataaagcccttgaagatagcttgtcttttacatttgtcctttcaggactaaattgcattttaatgataacatgtaaatgcaaagacctatttgaaacgaaggatgaatgtgagagaggaaagctactttcgaagactttatttttagtttattaacatactaacttgaagccgtcatatacttttaagaaccaaattgactattctgcctacttctgattgaattcttagttttttggggcgttagcctttttttatctaaaaaaacttaaaagttaacgcatgatgttttttattttttattttcaaacggaaaatgcattttatcactttcaaaataaaaggcaaacattttcagttacaagcaatttaacttcaattttagtaaacaatcatcttagttcgagccaaattttctaaatacatcaacgtcaatgtattgttgagaacagtatcttccattctgtaagataacagaaaagaaaagaaaaaaaattgccaaccaaggattaggactttaaggtcactgtcttaatatacggtcaatgatctcttgtgtttgatgatgccattggcattcaataggttacatgtatagattgtctatttgctccctgtattgagccacaactctatcttttcgaattttcatgatgggtgtcattagaccattatcaatctgtcattggagaaaaggatttaccaaatatgtcagttttgtgatgtgaacaacatacaagatactactgctttgaattccaaatctaaccttgaagggttcatttacaagaaggattggtccaatttgaaatggagattctgatgtcctgcatgatgaatagttcaattatagaatacatttaatttgtttatcattcagtgactccaccataacagtgtccaaaactagtttactccctttaattgtcataaaatttaagtaaagctaattaaccaatagagtcaaacactgtccttcccccagaaacagaaaaacactagcacaccagagatatctgaacaaggcataaacttttttccggcattcattacaagaaacagaaatgaaataagtcttaccaggtcttcaattctttatatatcaggctcgtcactttttccttactgacatctgaactgttggaatctataattgacaacttccttgctaccttcaaaacttcttctttgttaggaacgattacagttcctagacgtcgcttatcctgtaagttacagttattaccaagaagtataatcactacattttgtactatctgaagtacattttatatataatgcttgagctagctatcagaaattgaaagaattcaagaattcacctggccaacaacaacaatttgttgaattatgctactcctcattgcagcttcttcaatttccaccggttcaacattttcaccttctcttattataacaagtggttaatactcaaggaacttctatgatttccaaaggtgagatcaaaccagcgtaaaaacaaggttgagcaaaactcaacaacttaataaacaaattcaagaacaggatcttgtcttactcgttcgtgttttaagaacaacttgtttgttactcatttataatattgtttatgattcattattgcatgtaacacatgttgaacaccgtagaattgtactttacatagtacgtgcaaatgcaatacaattatacaaagatacatatatacaatgtatacatacattaaaatgaaaatttgagacatattatgggttgggaaggagggataaatataggagatttacacttgtagtcatataagtgaattggacaccacatcttgacccaaaaccttaaagctcaaccttatgagtcttctactcacttatatagtgttaaatttttctatttctatccgaagtgagactttaactcagacttatactctaacatttatgaagtaaaatcaattgatacccttcacaatgtgctaaaaaactaattttattgaacattaaaaaagatatttaaaaagaaaaacgtggcaagtaggtggcgagggccagatgttttaagaatttttttattagtgtaaattataaagaacttttcttcaaataatagtagtatagggagctttcaaatttaacttgttcaggtaaacaccaggttccttttattggcagtgtcctttgtttcacatctctaatggatgaaaaatatagaaaacgtgcatacaccgacagatagatatacaaattttaagattccatgctaaacagattacattgaactcaatattctactatacctgttgtagatgtcgaagagaagtaaattctccaactgttagttactaaacgcagctttgtttggtggtacgtgggtggtaacgaccataaattggaccaatcattagaagatactatcacttgtgttaatctttgttagtatatatttaacatttgattattttattattaaaccatgcaatcatatgttactttagaaatctatatttaatcacataaaatgacaaatggggtaaatataagtatacaaataaatttaaaatttatagtcattgagtattatttaaagtatgattttgaattatttataactgaaatatccgtgataacttttttttattttaatttattttgttatgaatatgtagattttaatttaaagcttataaaattctcacaatggctataattccccatcagccccgaaacaaaagggaaaaaaaattgtagttgccttttatggactctggttttgttcagaagcatgagtcaaactgatcacagtatttgggaaggttgtagggaaaggtaatgttatgttcaaaattttgagtaaactattattttagtctttaaaatatgagacatcgttataatagttcataaaattttaaaaatattaaataaatcattcaaattaaaattattgtcattttaattaatctacgatatgtacaacttagtattattattataattcctaaattttatattctcctatcattatagtccatacttccataacaatgtcctaaaatttcaagaactaaaattgtaatttattcttaaaattttgcaagataagcttgtgggaaatgtttttattaaaaccaagtggtagttttttttccttctacgctttattctccctacaaatgtctaatttttgctacttttcatttcaactagtttgtggtgtgtgttttttttcagccccaaaccaagacgaatttattaaaagccatgatcaaagattcaaagagaacaatagcatcatcttccaacaaaggaatcgaaacaaaagcaggagtagagacaagaacacggtgaagttaaattgaaaatactataacataaaaactgaaaaaaaaaacatttatctgtaaataaatacaagttgtctctttggaaaaaaaaatgcaagtcattaaggtaaactacaataacaacactattaacattagcgtaacgtttgctaggagaagaatttttttcatattcaagaatgaataatatttgattgatattcaatatttttgtggatatttaaataagtttactgagaatcaaataattatgtaatgtttttatcaattactttaattatttacaataataaataatctaataaaagcaatattatatttttacactattcagagaaaattttaactcaagaaaataagattttcatagaaaactaactaacattttttggaaaatttctcccctactaaacactcataagggattagtcaagtaaaaatataaaattaatttaatggttgaaaatggagttttaagggtgaagggagaaaaaaaaggtacatttttaacaaaagtaacatttgctaataaaaaaatattaataaagtgaaataagatgaagctttgcttatgataggtagggatgaaaatggatataagtggtctttgacttgacctagtttgtttattataaaagctaaattaagattttttgaaaagtttgtttaaataaaaatgtcagacttaaactttaaaaaaagtctgttaaacctattaaactgacctatttataagacaatataattcaagggacccttgcattgctctttctctctatccgcattacttgtggttaggggtgggaaaagtctttttaattaaaaaggtcaagctataggttttatataagagaaacatatctattatgttattttttatttttaattatttatttttatttaatcaaaatttaaatttgtatacaagttttcaggtcagattagatctttatacaaactagattcagatcttaataacttatttttatcatgtaataagttagtcttaaacttaataatagtaatgcgagtcagactcatacctgtcaaagtctgacctgacctattttcacccctaatgatacgttacatgttcaaattttcaattgtttctttcaaatgagataaatataagttttttcaaatattctgataacttgaaaatttgttatgccatgaattatggttcattctaataacaatttaaacaatttagcccataataaaatagtgacatattaatatatcgtacttttttactttcgaaaattaaattcaaaagttcattaactgatttgatagtattactgtattacacagttttagggactatttaggctgtgtagatatgattcctctcaggtgagggactaaatagcaaatgtaagtgatttttacctagacctattaaaaatagtaaaacgccaccaggaaagtagtctcgccgccgcattgcatccctaggggcacgacaatagtaatcattgattgtagtttataaagatacacacgtgctttcattttatttccgtagcattttactctgcagcagcagccaccacccatggcgtcgttttctgccgccgtcgctcagttctcccgtgtttcacccactcacactctgctccactctcactctcacgataggctcttccattctccatgccgcccccctttcttcctctcgcgcccttcccattcactccggtacgttcctatcgactactaggtttcgcatatcaacgtcgtttcctcgatccttttcgcatttggttttagatcaaattacaccaatgcttttgtagctccatgtctcggattttctaactttgaccacacatacaacagctagtcactcgctattgtgttttacttgaacattccttattggatgatgcgactttactatttttaattcttttttgtttttgctcttaaaagaaaaagaataagcagagaagagagagcgaatctcagttatgaaacgtgatgtttgattattaagtttatcagctgaatgaggaatttgagggtatattccctcagtttgaataataagattataagagcaaattaacaaaagttataaacatcgtttgtttggcagatacgttctaaataagcttttaagtgattggttactccacacacagtatattctctactctccttttttttttttgtttatttatcctttgcagagcataaactgttttctcggaattttggcagtatatacgtgtttaaatgatattctccccatgaaattaattggatttttgtgttttgctatatactgattctcaggaagggtcttactttaccacgaggaagggaggcaccaagtacgacagtacgttcttcatttacaggttgcgacttacttttatgatagaacatgtcctttttgttttgaaatagacaaatatagtaacttatgtttttttctttatttgctagcagatgtttcacggagtgtgtccttggaggaaaaacaactacccaaaggagaaacttggtctgttcacaaatttggtggaacctgtgtaggaacctctcaaagaataaaaaatgttgctgacataattcttaaggatgattcggagaggaaattggtggttgtctctgcaatgtcaaaggtgacagatatgatgtatgaccttatccacaaggctcaatcacgtgatgagtcttatatagctgcattggatgctgttttggagaagcacagtgcaactgcacatgacatacttgatggagataatcttgctagtttcttgtctaaattgcatcatgatattagtaaccttaaggcaatgcttcgtgcaatatacataggttataagctcatcaactctctctttctctttgatactctgttctgttttctcttgttcagttatatctatttcttttataaatcctcttttgaacctaggatgtatcttcatgttgtccttgtttattataagtcggtatttatggctttcactttctggtgttgttttcacattgtaatagtattgatgttgatgtatattgcactagctatgtcttggttgctattttatattattgatcattgcttatgtcttggacactagtatgacaataataataatgtatggtactttttggtcattaatatcacatgacagattagatgtatttcatggaaaatactattagtcacatgatctgtacttctgtagtatacatgtattgatcgtatgacctgtagtatatatgctactggttagatgacctgtagtacacatgcaattagtcacatcacctgtattatgcatgtttcttcatgtgtcaaaaatcaaagtatatataaatgttcaccagctttgactttattttgtttggggttcaacatagatcttaacagaaactagtcactgcactatgcatcctcgttcagttaagatctttacaccaatcaagttttatttggttggtgaccaagagatatatacaagggagataaggagtgaaaatagtaaagttaaatttgctgaccacgttgtttccttggaaccatttatcagggttggaacacaagtttgaaatgggggcagagaggagttggcagctgaatgtgtttcttgagtaaattctagagttgaagataacccttagattaccaccatggtgcttttttgtcctgcatgcaatggtagtataagacctaaagtgacttgcgaaaaggattggtgtaataattacttgaagaattagagttgaaactgtgttcttatcaggaattagatgattcaataagatattagtttcattaaacttcatttatagtaagatttacgataaggacatcccttgtatccatatatttgcaatcagtcccgttctgtagaatcatggaaagaatttaattctaaacttaagctttgaagacaaactttggaataaaatggttttcacttgagtaggagcagaaaggaatatatatgcattgcaatttttgcaacaaaaggaaaatgatttagaagtgaaaattgtagaaatatcttaccacacatttctaagtttaagcatataggatcaatattacagaatgatgaggaagttaatgaacaagtcacacgcaagatataagctgggtggttaagattgagaaaggcttctgttgtagactgccttggcttaaatccaaattaagtcaaacaattccagtctcttctcttagtctatgctcaatcaccttttcccataatttcatagtgtgatctctgtaaacaccttttccacaacaaaaagtgatatttagttttccataaatattattgcttaaaatgaatttgggttaaggaattgcattttaagcctgactaacatttttaatatcttgcagctggtcatgcaacagagtcctttacagattttgttgtgggacatggagaattatggtctgctcagatgttgtctctagttattacgaaggtatggtgtgctgttttatttagaaagatatgctttttccccctttatatgaatttagctcattgcatcatgcttctgttccggttctacagaatggggctgattgcaaatggatggatacaagggatgtccttatagtaaatcctacaggttctaatcaagttgatcctaactatttggaatctgagcaaagacttgaaaaatggtactctttgaatccatgtaaggtaatcattgctactggattcattgcaagcacacctcaaaacattcctaccacactgaagagagatggaagtgacttctcagcagcaattatgggtgctctatttaaggctcgtcaggtcacaatttggacagatgttgatggtgtgtatagtgcagatcctagaaaaggtttgttatgctttgtactttgtgtctgagttaaacattgagtggactggatcatgagaattggtttttagtaaccagatggagttctagctctgacatattgatgatgcttttgtcttgtgtttgacttccgtaacatgaagttttgattaaatataaacaattatattttctgcagttagtgaggctgtgattttgaagacactgtcttatcaagaggcatgggaaatggtgagttagatgctggaaagcctcaatgctccttctgctcataaaaataaaggagattaacttccaaattgtctgttgtacagtcttattttggtgcaaatgtcttgcatccccgcacaattattcctgtgatgcgatatggcatacccattatgataaggaacattttcaacctttctgctcctggaacaaagatctgccatccttctgttaatgatcatgaagatatgcagaacctgcaaaattttgtcaaaggatttgcaaccatagacaacttggcacttataaatgttgaggggtgagtcatgaattgcagctgtgttacattatgaatagttggcattttttgctgcatgaggatttgtatttaatttaaggttttctttaaccaatattaattgtccaagttgtagattccaatgaatttttctctgatgcttttttgcagaactggaatggctggtgttccaggtactgccagtgctatttttggtgcagtaaaagatgtcggagctaatgttatcatgatatctcaggtgcacttataacttttttcaattttctagttgttcacgttgtaagaaatggcattaatcagtaacagtatttgtgtaggctagtagtgagcattctgtatgctttgctgtgcccgagaaagaggtaaaagcagttgctgaggcattgcaatctagatttcgtcaagctttggataatgggcgtctttctcaggtgctaaatccaattcttctaaaaccaaatgcatgtttctgttcaattgttaagatttgactcacttgagtgatatcagactgaagatttatcattccacattttgtggatttaaaactggatgaaacatttgagtgccatgcatggttttaaattgctgttgcgatgtggttgtcatgagtcaaaaaacttttatgttgcggctgcaattgtggtagcagaccgcaatttaaaaccatggtgccatgctcttaatttttttaagtgttgtattatcttttctatgtaatttgtcttcattgcgtaagtgttttaattttcatcttaatattaattaacaacaagggcatattagggttaaaataaatatgcaagctacagtccactcattatgatctagaacagtggaagcaaacatcattgatgcagatatcaacagttgggactaagactattatttttggcactagattgatataaaaatcaaggattactataaaatgtcaagcaaaaggatccattgggaacttctttaaagtgccaaagatgaaggctgaaggacatcaaataacactaaggcttgagccttgagtcttccaggaacaatagatcattatgcccgtagaagccatggttgaattgcattgagttatctttgctcgcttatcacaaaaagtttgggtgttacctttgaatttgttcaccaattgttgtatttgatgcttggatgtaaggatgttcataatataattcaataaaatactaactagggatttgctactttttgctctgaaaatatggcaataacgtatttgatacatcaacatcaacaacacctttaacccaagttaattgggatcggtggtagatgaacccaatgataaatcagaaataagacaaagaacgcgaaagggagaggggaagaaaaagtagaaaaaagacaaaagagaggaaaaataaactaaaataaaagaggagtgaaaggaggaggaaagaagagaaaaagaactaaaaaaggaaatgactggaacatagaactactaatgggtttaagtttgataatcaaaaggaaatgcagtctcttggaatatactcttgtcctcttcctcacaagatagttggatgtgaaagttgtgttaaatggaatgcttcttcttcgtcttctttttccccatcagtttgtgcttatttcttttgtttgttaactatcatgaagtagaaacttgagaaccgagtaatttcatttcttctgtttaaattagtatatgtgactgatgatgttaaaatttaaagcttgctatttaattacctttattgcattaaaaaaagttatgtataatctctcaggttgcagtcattccaaattgtagcattctggctgctgttggccagaaaatggcaagcactcctggtgttagtgcctcccttttcaatgcattggctaaggttaggaaattatgtttaagatattgcttaggttagaaatttttgcttatttgttatatattttcgcttgttttacgttccagtttgttttcataaacaggccaatataaatgtccgtgctatagcgcaaggttgttctgagtacaatattactgttgttgttaagcgagaggattgtataaaggctttacgagctgtccattccagattttatctctcaagaaccagcatagcaatgggcattattggacctggattaattgggagcacactacttgaccagctaaggatcaggtgcagtttctgtagacgattttgtatgcatgaatagtttttttggttttaccttgtttatgttttggtgtgtaatttggcttttattatccttgctgtgaaattgactatttttttcaaatttaaaattccacttcaaggaaataatgcctataattgaagaataatgtttattttaaatagcaggtaattttctttatgttgacgctgcaccagttgtaactgttttacggattaaaatacattttcaaaagaatttatttgtttgtcaatgtaagtaaaaaaggtgccaccacattagaaatgtgacattctactgtagtgtttatatacaagactttggggtctccaactacaatgactagtttttgttgtatggttcttccaaggttcttatctaattgatatcagatatttccactgtgtttctcaactacaaatgagtgacatgtgtgttgatgctggcattgtagtttttgctagggactagttaaaggttattgcgcagcctgcccatgtgggcacggggctgggaagcaagatggaatgttaggatccaattgcaaggtatgagacttgagtctcatatttgaagtttaggatgtataagactgttgactctccaaactacaatgactcgcttttgtggtgtaaatctcccaaggttcttatcattatacaagatagagaaaattcagatgattgctttcaaaacaagtaattgaaagaaaaagaatgagaaattgtaaactaggacttaaatagtaaagcacggttagaattggcttaactgaagtttagttagtcttcttaatggctgtagacagctgaaattcctattgtaagcttgcagaacaaggtagctctagtatataaacttatcttcaatcagatagtaataagtgattcattaatcaataacagaaaatagattcagactctctctatctctagaattttattaaatattaataggtttcttatatggggtatttacttgtctaactctaacattgttatgcataaaaactataaaaaaaaaactacgtacttcattgtccagaggctccctcactatgcgaaggtaaggggggggggatattgtacgcagctttacccttgcatatgcaaagagactgtttctggattcgaacctatgaccaataagtcaccaaggcacaactttccggattctaacattgttatgcatctgggagatattttttttatagagatttgatacctgtcaagctttttacatttctgtgttaaaatatgttcctggtatactatagtggggtaacttcattttatcatgttaacatactataattgaaatatgtggcaaattcacatgacaattcttttaatgcaggcctcaaccctgaaagaagaattcaacattgatttgcgtgtaatgggcatacttggttcaaagtcgatgcttcttagtgatgtgtaagttgaaccactctgactgaaatatgtctttgaatgataattaaatttcttgcttgtataactaagaggccttttatgtgagaaagcagacttcattttacacttcactccttttactgttttggaaagctttattgtttattatatatcatttatgtattgttatttggatgaaagaagattattatatttttaagtaagccataataacatgattaggtctcctagatagaatggactcaaaatgtaggcaatacctgattgcttttggggagccatgtttcttgatatggatggtttttggacttcctactttggtttgacaactctctcttgctaacaattatgaagttaatctgttggcaagaggaattcattggttaatacagtggtcctggagctacatcaacaaaattcatcctatgatttgttggttatatgtgcattcttgaagttggtttttgttcaatcattatatactattattgctccttgcaggggcattgacttagctagatggagagaacttcgagaggaaagaggagaagtggctaatatagaaaaatttgttcaacatgtacatggaaatcattttataccaaacacaacattagtggactgcacagctgactctgtcattgctggctattactatgactggttgcgcaaaggaatacatgtagtcactccaaataagaaggcaaattcaggaccacttgatcaggtaaagtaatccatattgttcttttgatgtataacatgtttgtgtttgttgttgacgtatctcatgtaatcaatgctataagatattttttctgcaagtactcggctgaaaatggaaatttccagacattaatttggattaatttattttctaatttttatttgtttttttttataaattaaagaataattcatttaaaggaaagggaaatacacatcatcacattatcaatattagggagtttggataggaagcttttactcttatttctatcatttacttcatacctctatccactggcagctgtctattttttccttttttcttttttaaaatcaaaatatcatcatgtgagtttctgtgtcatttttgcagctatcatatttgctagtaccagagtaattgtaattttattgtccagcagttatatggctgtcactaacctgtagttagctgcgtcagactcagcatagtattcagtttggctaaatttcaaagtgataagctggttattgaagtgcaagctaaagttcactatacaagactatggagccaacaaaattaatgattcaatgcatcatttcagttttaaacaattttctcactcttttctctgtttctctctctaaacccaggttcactggactctgttgactagtggtaccattgttctaacaggaatgatttataagtataagcttgttacatttaaatgttgatgtcaaccagtctgcaacttgttctcttgtcattccattttatttagcaatttggaaatttattgctttatacaccaagtgatgtttcatagtttagttattaacatctacgatcaaatttcatggttagcataaactggaacgctgaacaacagtaggcattggcttgggttcatgcttttctgatagaacaagtactttgaacttgaagacatgttttaataatatttttcataattttgaaagtgttttctttaagcttcagcagttgttgcttcttagtactcatgctagctttttcacatctatgctctctttatccagtatttgaagttaagagctcttcaaaggcaatcctatacacattacttctatgaagcaactgttggagctggtcttccaattgttagcactttacgtggcctccttgaaactggagacaaaatactgcaaattgaaggcatctttaggtttgctttgatgtgttatttctctttttttttggattgacactgtcaattctcagatcttgcattcagtctcctttgtccaccctcttgcaattttcccattctaaagccaaaaaaaaaaaaaatagaatgttattttgaggattattaatgactatatggcgattattcattaatctcgaccattcaccatgagtattgcctctgaatctgcagtgggactttgagttacatatttaataactttaaagatggccgggcttttagtgaggtagtttctgaagcaaaggaagcaggttatactgagccagatccaagagatgatctgtctggaacagatgttgccagaaaggtacaatttataatatggtatatgtttaccaaattttgttgtcaaatgttaataaagttcctttatgctgcagacatattttgaatttggatttcgtttaggatttatgagtaggctgtaatctaaatgatctaaaagactatatccaaattaaatatttatatgtttgaggctcatttgatcaaacattttgaagcttgaattcggtttcaggctagaatttaaatttgatatacatctacctatccagttatcaagtatttcgattcatgctcaaatttgatatttttaattgttgacatgctgaaagcatttaatgatttaaaaacacaaatcaaaagttgataatattattaatattcctcttttgtgcctatacacaattgaaattaatattatcaatagtcctctttggtgccaatacacaaattttgttgagcaaatatcctaattttaattttaaatgtagaaataaataaatatattggtaagtattttttaatttatttattgtgaaatccatatttagttgaccaccccattctagaaaatgtttggttgttgttgtaactaatcggaaggcttgcttgtttctgcaactaattggatcatgtaggctaatcacaatgtcgatattggttcatgttagcattttgttgcttcatgtaatctgatttaaaatcaacatcctgaagctgctttgactctacaggtgataattcttgctagggagtctggtttaaagctagaactgtctaatattccagttgaaagccttgtgccagaaccactacgagtaagaacctatttctattgattatgcagtttttagttttaatatgtagtattttgattgacatagatgttttgatgattctgtgcaggcttgtgcatcagctcaggagtttatgcaagagctaccaaaatttgatcaggagttcacaaagaaacaagaagatgctgagaatgctggggaagtgagtaaattctaagacagtattaattctatgtgcctttccaaaaaaataagtattaattctatgttaaagtatctaatagaatagttctaccaactgcttcatacatgcataattcatgcatggaatatcttagggtttgttttgtttccatacaaattaaaaaaaaaaaaaaaactgctactttattttcattttcttttatattttcaaagatatgtacaggtaatgttgaaaagggggcattttataatttttagtgataaccgaaaagggaaaaaaaatccttacaaattaggtacccttagtttgttatatatttattttaattctgcatagtacatgacacagaaacatatagtacttatttgagacacagaaggtgggataggaattttctgattagactgatgacataccaaaacgccaaagttttgcatatcaaatcttcaattggttggttaatgaagactctctctccaacctgatggaaggatgcttgttatatatttcaagcaacctagatttccatatagaccttgatttcaagtaaaagtatgacaattgatttatgttgggtttgcggtctccagtttgtgtccttgactatatatataaacgtctatttttcattttttttgatcggcaacgtctatttttcatgatgacatctctcgtatatgtatattatgtccattaaatatacgtatatttttcatgtcctccacatacaactctgagattgttatgtttgcactctgaaggtcttgagatacgtgggagtggtggacgtgactaataaaaaaggagtggtagagctgcgaagatacaagaaggatcatccgtttgcacaattgtctgggtcagataacattattgcatttacaacacgaaggtataaggatcaacctctgatagttcgtgggccaggagctggtgctcaagtcacagctggtggaatatttagtgatattttacgacttgcctcatatcttggtgctccatcataactcacaagtttcattctgcaagcataattttctatgtttggtttcgcatccactgcttcgtgacacattatctgaagcaacgaagagttgcttttatgtccaaaacgtgaattttgatcgaaacgtatgatgtcgattggatatccaaacacatgcaaatttgtatcatctatttatttatcttgattttctttgtaggttatttgctgcttataacgttgtaatgtaggcttgtttctcttatcttttgtctggaagaataataagggaatggaacagaactccattacccttttttgtgagttatattgtaaaggaacggaagtaaacagaattattataattttcaacttcgctaacagcctttttaatctatagtaaaaaaaagactgatgatgatgtgcaagtttaatctatagttgagtatcgtatcctccttttgcacgtagtagatgcttgcacttacaatgtaaaaacaaaagagtaattaatttaatcattaaattattgaaagaatattttaaaataattactaaaatatatttaattaactgtactgtctttataaatctaaattctgtcgctaatcaataattattaatagtttaatactaaactgaaatatgcacaagtttcatatattttgtgcttggttatttagattaagtgcaaatcatggaaagaccatttttattcatggaagttgaactactttttattcttttgcttccgtcactccatcagtatttaaaaataaaaaaaaaattaacaccacattctttgatattcttgtttcatatattcatattagcaccagactctttgacattcttgtttcatttttttttggagcataattgacgcaagtctggttaaatatgtgtttcatttttcatttaatgagtttcattccaaaattagtataatccacataaactttaactaataaaacaaagttgaaaagaattttttttagaggaaagttgaaaagaatattaaaaaatgtagtaccatactttctcctttttgataataatagactgaattataattttgattcccggtttaattttcatattttaaaaaattcccaattcgaatcaaatcctcaattttatataagttttatttaatttattttggtctaattaaattctatatctcatatatttatttaagataccgtcaaaatcagtgtcgttttttggtttctaatatttgacatttgctcttcacagtttgaaatcggtgtcaagtatctatttcatttaaaagcaattgttagttgcaatcaagtaacgtttttaatcttgaaaatgaacagtatattccctgagtgacgagttctctttctccaaagaaatgtgctgcatattctcaccaaagaatatactaagttcatagtatgactccaaacaagaacttaaatattttgttgaccaattaagctcatttctacatatcacatccgcttattattcattcaaactgtatggtcctcacagcaattggggtcctcacaaaatacttgccatctgtccatgttaggctcccaaatttgtaatctccatgaaacttttgagttgacaggaaactgacactaaagttaaggattcgtgcatctgaattgaaactcaaagtttgaggttcaactctaacttttatgccatatggaaccttcactagagctttgtagactgcagtaatatttcccacgtttgtcactgttctcattactgttgcagctctcttcaggtttggaactgatatggaaggaaggttgaggttcagtttttggtgttttcctttcttacaacttgtggtggtcttggtcactttgctaatggatgtactactgtgacccatggaacataggaattgaacataatcctcagtggtgatatcatatatcagtcctggatccagtgctttattggggtccacgtgtccacccccaatatcaaaagggtctgctgccttatgtgtggaaccctcttcagatataaggcttccatcagttccagtttgagatgctacaatttttaagtgtaacaattaattagatacattggatacagactattatatgtaataatgtaaatatgtaattttaatttgttgatttaatgatttctactgactcacctgttgtaaccaaagctgatcttatggctgcaggtgaccaagttgggtgtttggatttgatgagagctgctattcctgccacatggggacatgacattgaagttccagataggaatgcaaatccactactccttgtagtgccttttggtggaaatgcagccaaaatgtccacacctggtgcagctatgtcaggctacctccatgaatcatcccccaaagtagaagttaatgatgacatcatataattaaaaacggagtaagagcaataaatatttatggtaagttgttgactacaatttacagatcatggcacactagataaacattttttaagcacgctcaaatcaaatttgcctttgttgttataataaagtatgaactatatttaattgcttttgtctcaaaatttccgggaaaaaagtttggtctgattgaataaaaacaaaatcatgtctgcaaatgaggtccagatatacctttagcactgttggagacatgctactgggtcctctagatgagaaagatgcaactcgaggtgatgtacattttccaataacagtctttggaaaacttaggcttgctgttggaaaccttccagataagcataatattaattttaactcaatgaacattttataagccaatgttgtcaatctaagtatattagctcaccttgatcttctaatataggttagtatttgtgtccccgcttcataatctaccttgatacatggaaatgaaccacattgattgagtccatcttcatgatattgtgcatatactagtccaactcctccagcttccttcactgtaagtgctgcagaaacaatgtcctgttgatctgatactgaaaagcatagaacaattttgcctgctgccattgttgcatttagacttccagattgacaatccttgcttgaaaggcagacacgaacagtagatataaaatgtacaggaatttgatataaaaaaacagtaaaaatgaaagaaaaaaaaaaagaggtctcacgccaaattatctgatgggtctacagctatgcgttcagaatatgtgagcccaacagatccaagattatgttttccaatatcaatggactgtccctatataacaataatcacaggtttaaatatgtatctaattctcataaatatgatttcaggtgattttaatcctataaaatgagtttaatttttatgcagtatcagtgtaaaaatctgtattgccaaccaatcaaaaattgtttttgatatgatttttgtaaaaatcaacaaacttaacctacataatattttgcgattgaatgacaataatttttacattgtcaatgcattgacacagattattagaaatggtctttgacattactaaggaggtgacatgaaatacgaataatcatgttacattagtgatcaatgtaagataacatgacttttttgcatgtcacgtcaccacttaataatgacaagaacattttaaagaaagttaattaaaaatttgcaagaactaaaattagtggaaattcttgttgaagaaccaaaaccatgtaaagtcttattttttttaaacatacatatataacacatttaagacagttatattaagtgttagcatatttgaccaggttgattcaaaaatagttgtagcatacccacacactgtggttatttccaagggtgatggctgctggaaaggccctatctatggtggtagctccaactgtgatgatccatggtgcagtatttgtaacggtttgagagacaggaccagaatttccagcagaacaaacgactgtgatccccttagaagttgcatgaaaagaaccaattgctaatgaatcacgttgatcaacataggagaacaaaggaatggaaaagccaagagaaacagttaagacatcaactccatcatgtatagccttatcaaaagctttgaggatatcagcatcagtgcaatctccaattggaaagtcccaacaagccttgtagatagctaagtgtgccaacggtgctcctcctctggctaaaccagaagcaagtcccctataatttgcatttcctacaaagtaacctgctgctgtggaagctgtgtgagtgccatggccaatggcatctcttgctgagagatattcatcagtgttgtttccttggaggaatttcttagtctgatcacttattcctttcatgaaccatctagcacctattatcttcttattgcaattggtggagttgaagtgctttcccccttgacaaattcctttccaccttgatgggatttgtcccattgcttcatcattgaaacttggtgactctggccaaatgccttcaagaaatcatatttgtcattggttacattgccactttccaatgccctgcttagttatttttgttaaaaggaaaattaactactagtactacctgtgtctatgacacctatgatggttccttcacctaagttgctgtcagagaaagcagtttttgaagtggaatgatggacccccataaagtcccagcttctggtagtatgaagtttatgaatgccatttggaatgacagaaactaccgcaggaaactctgcattacatggtatataatataacttttgaaatgttctaaactgggttaaataacaagcctaattaatgcaaggatcattcatacttgctattgcttctgcttgatattttgtcaatcttgcagcaaaccctgaaaaaccatgcttatagctgtaaagaatcgaattctttgcagcttctttgcttcagaacaaaaagaaaacacttaaaagttatttttttttcttgactcttattaaagtaatagaatatcagctccattagaaaatgagtatgtgagggacacaggccataccttcctaggagtgatgataacattttgtggtgatacattttagtagtttgtggattttgatatatcttatctcccatgtatacaatgtgcacctagaagcatttatttaataattgattgtgctcaatgacatgtatttacatgtataccaaagcagaactagaaacttaagttgcactcacagagcttgtttcagcagagttgaccagagagtcttgcagtaagagaagagcagaagcaataagcaattgggcctttcttgaccatctccagtttcttgaattagtatccattatcagattatctaataggaggagagtttcaaaggctttccaaatgcataaaaacatacaaagtatgtatgatgcatataatgtaactttttgaaaataagaaaagttgggagtcctttccttttgtgcagtgcactttttaattttttggcccaatcggatgaaaagtatgcacaaatatcttcatcatcagcgagtgttggggaggaatatgtgccagttagtatactgcttttatttttatggctaaagcatactttctcttgtcttatttttgtttgtttcaatttagtctcttaagtttaaaaagtttcacttctgtattttaaatatttatgttagatcaaattggttattttatcagttttgttatacaaattaatgatgttaattatggcctatttgctaaatgtccatatgatgtcttacagttagccaatgtcaaagtttttaaactcctaatccgtctgtctaaaaaaattaaattcctagtccgagttagcactcattgaaggagacaaatctctctcattagtaccctttttttcataagaatcaaatcaaaaccttaaaaagaatcaagctagagtccacttggaataacaggcattggtagtatacttctttaatttgagtgattaaattaagcaatcaagaaaatcacacaaaaaagagttagacattaatgccatagatattaatcacagtttgatctgattgcttatacatctctaatcttttgtttgtaaaattcaactctagctatcaatgctttttcggggtatagtgaaatgatgcagatcataaagtggtgtgtagtaatgtagtccaaaacccatcatcatcccacgattattgaaaccttttctttttctaaactttgagtcccatcttttgcttttaagtcatcaatgggactggactgtagccagtcttttctaatgcaaaaggaaaagggaaaaaaatgcagtttcttgagtgtttttagtgttgtcttccaattaaaattagaattttacctctgtaaaccgaaacttgcattaaatgttaacataaaacatggaatggaactcatattatgattgaaaaataatgtcaaaagccatctaagaaactgcatcttaagttttatacaaagcaaaattgccggagagaaaattctaagcatagcaaatagcaaaaaatagcttgagtaatctcaataaaattggctgatttggatcctgaccatgaaaaataactatatattaaataataaagagaaatacagcttaaaaaatttcgaaccgttggatgaggattgcagggtgctgcagttacttttggaatgcagagatctggtccctatttggaccccccttcaaaagaaaaataaataaagtacacgagtatgacgacattaacttcctataccagcattttttctaatacacccaacatatacaatgcaataccaattttgcccttctcgtaatctaaaagcaatccgtaaaggtttgtatggattcgtaatccataagacgaaacaaagaatccgtaaggttcttacgaattcgcaatccataaagctcttacggattcgcaatccataagacccttttggattcgtaatccgtacaagttaaaattttttaaaatgattttcaaaaatggtccaagtaggtgtcaaacccataacctttaattacgaatccgcactctaaccaactgagctagtggaccattcatgttaaaaactaactaaaattgttatatataacattataaattttaatgtatatttaacacataaatttacataataaaatatattttttaaaattaattgttaaaaaatatatatattataattaaaccatgattttatctaataatatatttttatccaataaaatatatttttaaaaattaattgttataaaaatatattttattggataaaaaatatactattagataaaatcatggtttaattataaaatatattttttgataaaaataaattaaaataaaaatatggcttaattaaaagttatagattttaataaaatattaggttcatatatattaaaaaatttaattttataaaattagatgttcatatacattaaaaatttatatatgtaaaaaatatattattagataaaaattaattatgtaaatttatgtgttaaatatacattaaaatttataatgttatatatagcaatttgaattagtttttaacatgaatggtctagtagctcagttgatcattcatacggattacgaatccgtacgaacctttatagattactttttggatgacaattttgaaatttacggttgcagttttgcatgatctgtgaatggatcggcctttcatttacaaccaaaaaattcagaggataaatttccttctttttctcttttcatgttgtacatctcaaaatggtacatgaataacataattctttattattttctataccgaaatgcaatgcacgacattttccttgaaattggattgcttagaatcagatagcaaatgcaagaagaatctatgccgtttttttcccactttaaaaagttaataaaatactataagcttataaaacttgggtcattggaatgaatgcagaggctgcaatcaaactttaagtcatgtttgcctacacagttcaactttaagtccaataaatgactgtgggagtaaattacaatatgcatcaaacttttatgtgacttacgtaacatcaatcaataccatttatttgttttctactttctcttaattggagtagcccaagcaataatatatatgtaaaaaataaaaagttgcacgagtaatatactcgctgctttggaaattgctcctctttgtgaagaataacacctttctgagctccactttctctatacctttatcaattttcaccaatgtcattttcgcatggaatctttccttccaataatggaataggtgatttacagctggatacaacattttccaatccaactagttactgaaagttcttgcagcaaattctctaatgcataataacttgctaactacaacttcaacaaagagtatttttggaaagagacgaggagagtttataaactagtttgaccaaataccgttagcatatatgatctcatttgattcaattcaaaactaaatattaaaattgtaatatattatttatcttgaaatttattgattattatattttttttatctataaagttctataatattgtgaatttttctttttcaattttattttcacaaattttgctcttccacaatttttttcacggattgatcatatttattatcttataatttatttgtatttatacaaaatttatttgtgataattatttaaatttattttctccttccttaataaagttgttttatttcttctcctcaaagtcgatagacgttaattatcttctttatgatgatttattttgggcgtttcacctctttttctttaaaaaaaaaaaaagaagaagtaatttaagtgtattgatgagtgtcacccctttgtaaaaaaaaggtattaaaatgtattaatgacacgtttgtgacttattgacatcttcctctctcctctctgcttcatcccatcagtgtttttaagaaacatggatttgtaatatttttaatataaaaaaattgaataataataattcctcctcttacttattaaataaagaaagtatttgaatgtttttaaagttttaaaatattaaatatctttatttttatttaatatttttcattaagtattagaaagattttcaagacatttgtattttaaaacttgttcgtaggaacaattgcactgcttaaaaaaatgtcttttaaaaattactttcctactcttgttttggatcttatgatactttcataaataaaacattgttttatctcatacaacatgtaattgataaatgctgatattttatgaaattttttataaaataaatctatttttgaaagtttaacaattttttttaaaaaatactatactgaaaacaaagtttaaaaattatattgaaaacaattttttaaattaaaaaaaaatcaatttaaaacaattaaacactcaagaaatattttttaattagctttgtcagatgccaagaaagaaatagtagaacaaaaatatagctttctcctagtaaaataaaatcatatcaaatatttaaaaaaatcatatttatcaaatctatacaatttcactgtatttaattttttaaagtgagtaatttatgtttctttaccttcagtttcattgttttaaaaattcaatcgttcataaatgcaatatttttcacaccaaatgtaaacgtaaaacatattgttttgcaataattcgtttataaataacaaaacataacatagctatacaattcaagaatcgaagcttgtatttacattttctgaaatggctggttcaaccatcaagattcttagcatagttttgttccttgtctgtcatttctcaaggtaaatgctttcttctattgtatgaaacataatttttttatatattgttgttagtaatttctccatatatcatgatatcaggctatcgtcaatgttctttgaaagatctcactaatttccaacaagaaataaagtgcaaggaaaacaagaatggagtgtgactatcaccaataagtgtccgtgtgttcaaaagaatatgatattaaattgtaaaggatttcaatccgttggatccgaaaagccttcacttttgaaggtcttgcacaatgtttgtcttgttaatggtggtcaaaccatatatggaattcctgtcaaatttagatatgcttcggaccaaccatttccattaaatctcatttcttcggagatttcttgttcttaaatgtagatccaagaagttttctcttacaaaccttgatgccatttactatagcttgatttgtaggcattataaatgcagaataaaacattgattcttgctatatgttgcatttgtttgtcaattcctttttgtcattcttttaattcctgtcattttttttcacttgtattgatggctttagtttgaaatcaataataaggcctctcaaacgaaaaatgaactaagttcattagtcaaaccattgaatcattgctcctaaaaagaaaaagaaaaaataacaattgaatcattgaaaatagataaattacgatcattctaaaattaaaggaaaatttcaaaagttaactattttctattagacttaaatatactcattgtaatttattcgatattttgttttagtctttgtatcttttttataaaaaaattgcccatggaattcagctttgatacacagacacgcgatgaagcagctgaattttttaccctccatcgtactattccttcgttgatatcattagcggttgttaatatatatcaattaacttctgctatgataacaatacactaagtggtgatattaaaagagacacaaaccctattttatatggtggaaacagggaacatagtccacccaataatattgcaattgaaatttggaggatccatggaacctccactgaccaccctaagcacatgacactccacacttgttatgctaacctggtgttcacgttcttataaaaaccagcaggcacaataaaataaaaggtaacgaagtaattatctaacaattgcaattttctttctttatgattttttcgggtcaattctctttcatatataattgaatctcaattatcattaccaattcaattattttcaactgctcaatctgccctatatttttgccaataggtaaaaaaaagcatctagaatgtggtgggcaacttaacatggatacggcatacgtaaccacaataaagaagacagaaatcagtaacacataacatgtgctttgttgcgaaagttatcatccatctactgactgagctttgaatcaccatatgtgcgttcacgtattgtgtaggctctcatcatgtgaaattaaaatcaccacatcacgacccaaattttaagattatatccattttcaaaaaattaaatttattcagtatatcaatgcaattatgtattttcttttaaaaaaatccctttatgtctctttctatcgccaccaattagatgattgttcaagtggtgcttcctcctccacgaaaggtaaggtaagaaggcttgatttctctccttccaaaatggaggtatagaaccttagctagatttaccaacagtgttaaaggatttaaattttgtaacaactatttacttaaagactatctaaccacctcatccccaactcaattgcctaaacaattttgtagatttcgttatcgtacaaagtgttttttttttttttttttaaagtttcgtaactacaacacatcataaattccgggcaggtggtctcattattcatttgaccagagaacatattgctccatttggtaaatcattatttatttgtaaggtatcgagtggaaatgatttatacacacactagaccttataggtggatggagtgttgaaatagatgcataacgggcaaagaagaaagattatgaaacatcaaacatgcgataaatatacttctgattcaaaagggggaaaaaaagaatataatacaattaataaaataataaatgtatagactatagtccttctattcctaaaaaaagtagaaacaaaataatcatgctcacaatcagccggatcaggtaacccaaccaataaccatcctttaaaacccatccgtcggcttaaagaatcaataaagaacgccaaactcagagatccatgtttagttcagatgagtagattttaagaacacaaaagatgacattttgaaaataataaacaattacaaagaaattggtgatgctaatagatcaaagcagctttacaacctctggttttcttgggtattctcaagcaaaccttccactatcatatggactaagatgcccttggatagttgtctcgtttatcaatttggctaccggcaatccattgaatcaaaagagtctgcaaatcctacaggtttagaggggatgcttgattgggtttgtgagatggaaatgtcattaaatattgaggaagtgccttcattggcttggcagctcagccactttatatatgctctccatggtttcctcatcaggattgagaatttgaccaattgcctttggaatgttttccttgttaattagtaccctacggaaccatgtaaccaagtgagacctttcatctggcacagtatcatccaatgcctttctaccggtgataagttccatcaaaactactccacatgcataaacatccactttggttgtcactcttccagtagctggcaagaaacagagtaacattaaatataatcaaacgaatagagtagactagcactaataaaatgcatctaatcacatccaatgcaacattttaggaagttttatgcttgcaaaagtcttgatgctaaatggatcaaaacaagctcaaaattaactagttttaacaaaagatgtgtcaatgcactgagccaccaaggcaatgggatggaaggataaattccacagcagtgattaattgcgacagagaactaccacctaagctcatgacaatatacagcaatccaagatttgatgcaaaccagagtattcatcacatcataaaggataattgggagtcagactctgtaaactgtataaatggctcaaaataacttgaggcatcgaccaccaagaactatgcagaaaacccctacccaactgaaaaaaaacacgtgaaacaggcaaaatataacattgcaaagaaatagccacaaagaattctgaagtagccatgtatctagggatttagtatcaattactttccctttcaactttttcttttttttatgtgtggttactctattgaactacttaaatttgctgaacaccatcgaagtagtaacctacaactataaccaccaaataagtaaaatatgaatttcacaattaaggcacaattgtacagaactaaaatcaaaggctttctatacctgcatactcaggtgcaagatatccaaatattccagccaaccgtgtcccaacagaatgcttcccatctggtgcatttttaaccaacccaaaatcagcaacctttgctctcatgtcattgactagtagtatgtttgagggttttaagtctctatgaatgaagctttgctgagctaaactgtgcaagtattccaccccccgcactacatccaaagctattactaccctttgtttccaagtccaaggtgcatagccatgcccctgccactcaaacaggtgctgtgttaacgtaccttgaggcatatactcatagaccaaaagcctttcaatgccattgatgcaataccctaaaacagcaaccaaatgtctatacctaactttactaagaactgcaatctctgcttcgaactctttcagtcctttgttccccattgcaacagattccatcctcttgacagcaaatttttgttccatcatgcaactgccccttataaactactccaaacccttccctgcctaaaatgttctcctcgcagaaattattcgtcacttgtcgaagaacttggtttgaaaacgttggaccatctaaagcatgaaggtcactgcgatcaccactgctctggctttgcaactcactgggaacaccaccatatccattagaaacatggacagcatcaggtttaaaacttcctttcccattttcacgaccattaaccctactgaacttcccctgtcgcctgttgacaaaacacttccaagacaaacagcaccactgcaataaaaaacaacacaataacaactacaccagcaatccaacccagcgacaacgaagaactaccctttgcggattcacagccacttccaccagtcgaagaccctgaaggagtagttccatttggtccacctccaggactaagagctttcgcaagcaaagcatttcccagagtcaccaacttcacctttggcgggaacttgggaaccaatccagagaggttgctatcagacaaatcaagagtctgaagctgagacaaagtagtttgattcatttttcaaaaattataattaaataaaataatattaaggagtatacaaaattaaataaagatataactataaagaaaaaattttatatttaaacttaaaataatactacctcttaaaacaataataagttaactgttctaaataataaagtattttaaacttagaattaattcattgaaaatgataggaaaaaaaaagaaaagaagcagaaaaacaaaataaaaaagagacagatggacaggaaaaatcacagcacagagtcctttaaccacgtaaactgtgatggtctcgtgggcaaagaaaagaagcagatcgaaaaacaacaacaaagaacagcattaattaataatttagcatgaactgcaaaactggtcagaagacgggaatccaacaaaattatttggcaaagaagtgcattaattatcgattctgcaacgccatgccatcaagaaacgccttcagattcctctctgaaggaccaccttccttcgctgcctcccttgccaaacccttccatttctctgcattccttctcaactctccactccccatcacctcttccaaacacttccttatttcttccttttctactatgccatcctcatgatccaccctcactcctatcttccacacatcttctatcagtttcgcgtttgtcttttggtccgaccactgaggaaacgccaccatgggcacccccgaaaccaagctttccatggtcgaattccaaccacagtgcgtcacaaaacaacccacggaaccatgcgacagaacctccacttgagaacaccacttcaccaacttccccttcccttccaattcctgtctaaaacacacctcctcctcttccttctcttcctctttcactctaatcacccacaagaacggaaaaccacaacctaacaacgcacctgcaatttcctcagtttgtctcttagacaactcaaagtagctcccaaatgaaacgtaaaccacagacttcttttcctttgagtcaagccactcaacataaccatctgagacttgtaacaagtcaccaccaaaggaagtatcttcagggtccttcccatccaagaacgcagaaggaatcaacggcccgatggggatcatgttgagcttatcaacggccctcaacgcttcttcttccaaagcttcaaaagtatttaccagcaccttagggttagcttccaggtcaagctgtttgatctgctcttcaaacaagggaaagacgaacgacaacaaactcggtttcgactttagtaaaaacgatggcatgtcacggggtgaaagcgaaaacgacaatcccggaagcactattttctctttggtttcgtcgttgatgtaatcagcgtagccgtgaaagtagtggtaaaggatatccagcaccgtggcgggttcgatccagtacatagctgttgggaggttgagtccacgcgccacctgtggggcccacggaacgagtaaggtgtagagtaagcaagtgaaagggtggcccccgttggcgctggagagtatgaggttggacacgaacaccgaggcacggcgcttgagttccgaggcgtagaggttgtaatcggagtcggtgccgcggatggcgtggaagccgtcgtcgtagccgtcggagaagggggcgagggagaggccggggacggtggttgtgttggtcatgcggcggtgcatgtggagagtgatgggaatagtgacacgtgcacccatggcagtgagtcgcttcgcaaactgaaaagcggggtttatttggccttgtccggggtagattacgaggaggaagcggtggtggagcatggtggcgctggaactggctagttaccctcttttgctgtgaattcacacttagacaaaaatctttttttcattcatatacagcctcattgaccaatttaatgtgctacaataataatatatatgtttttagttattttttctattgttgaggagttgggtattataggcattatcattataatgcttctggaatttttctttaaatcagtattttttttatggtcagttatatgctgtggtgaagaaaatgaatatagttttattttacaggaaaatgaatcaagatttttttagaataaaaatgaatggagtttaattgctagaagaaaatgttccaaaacatataaaatgcacttatttcatacgtatatggacatccaatgtgaatgcttgtatgtttgactacataagaaaaatgtgaaattcttcgtcatgtcgtttgaaattgaaatacatctcttagacaatttctctgttccacccaagtttttcttcgataattcaaacatcaatgttaaacagttatcaatgactactaaaatacaagaatattatcattaatttcatcattttctatcatatttttttatatttgaaaaaaaaaaaaactgttgcatcacatgggatgggatactagtatcaaatatatagagtattatcattataattataattataacagttggggctgtaagaggtttcgaatagtatgcatgatagaaaccatagattgcatgatcacactgtgttattatacataaaaaagaattgtgtgacatgacgtttgtggattctaatctcaaaagcatcaaaagctaagtctcaccagctaactgccttcatttaattttgtatgatctacctagtagcttcctgaagagggggaccaccctccaaataaatttcctgctatggctcccccacatgcttcgtgtcatcttaattttgggttaaataattttttttatctctcaactattttagattttaatttttagttcctcttcaaatctgtccattttagtttcttatttattttcattattcagaattaatatatgtgagattgatttttatcctttattcccattccaagatcagtgactaattttgtacaataaaaaaatagacgagagactataaacgaaacaacagttttaagagaaactaaaaataaaaattgaaatagctaagtaaccaacaaaaaacttatttaattaatcttgtttattactttgtatattaagccagcccaactcagtactccctctctcacacaaaataggtcacagataggcacataccttgcatttcatatcaataaactcaactggcacatagaaagggaaaaaaagtataagtagagatacataatattggataaaaaattagaagtatttttaacggatttgttattaaaaaattatatttttaatagaaaaactctcaaaaatatttatgacttatattcaaacaagttcataatttttttatgtttttatgatgtaacatgtacaactttttaataataaaaagtaatatttttttattttttagattatttaaatattattttaaatttatgccatttaagttacataaaataattatttaaataatctatacttttaattataataaaacaataacaaattttaattaatttatattaaaataaatttttataataaataaatacatgtaaaattaaatattaaatttatttaaatattaaatttattttaatttataaatttttataatttaaaaaataataactcttcactaatgatacacttaaaataatatttataaaatcaattaaataaaataaatgtcttaaaaatttattaattaaataaccacttgtcacataattgtttattctgaaattttaaaaaaaatcttgatttaaaaatagaaagatgaatttaaaattatagagatgtaatttaacttaataaatatgcctttttttaaccggaaccaaggatatttgatattttttcatcgatggagaatgaataggcccttacaccgtcaattttcctgagatctccttgatgttgtgaaaaatatagaagcctttattaagaaaaaaaaaattcggtggaaaaggaggctcaacattactacatgtaccattcaatttttttccgaatgcaatttattgcagcggcattcttgagaatttggcaatccatgccattaggaatagtctcaaatctcaattctcaaaaggttaatgtggaaacgtcaagaatattcttaacgattaaccatggtaaaaaaaaatagaatattgtttggtcaaaataaaattatgtgcaataatattttcctcactttagttgacatttctcgcattataataatttgaatcattgatttctctatcagattgactccttcaacaaattttttcaattttaggcaatcccttttaaaatgtcccttctagttacatttgtaacactagttgtttttctgtgttttatagacttggacttcttcatatgcttatcacgataacatttgtcttatgctcttatgcatttttgtttccccttcacatgaatagagtctttctcatatattagagttattaccaaatgttcttaagaataagacaaagaacacaacagaatacatgttttatcctcatactcaatttttacatctagctttgctagatggttagttgataatctgattgaagacattcatgtgttgttgaagagcgaaatcctcctacatctttaacatatagtttctacttaagatatagtttgttcgtcaacggttttgacatgtattgactctccaatttctttcatacttccccttggagatgacaacttcatcacatgataaagaacgtcgtttgccaagcataagcatatggtggttgtcgcaactctctcttacaactcctctcaattcaaaacctccatcttctcaaactttgagtcgcacagtgcctctagaaaaccttgctgtgatttaggtttgatttttgcattttgcatattcataggcgatatataaattttataacaaatttttgttgatgttgataacttttcttgtagttttacaagaatacgtgttttctccttatttaaatttttatctataaaaaaaatatataaattctctcggtcccgagcctaatttttagagtttttcctattaattttaatagaaatttatatttcaacatcattatccaatcctaattaatttgcggaacttgcctcccgattttgtttttagagcgtattagacgtgattcagtttgtgtagcgtagtttgtttgttgggtttcatttactcagactctgtgtgccaaaaaataatattcaatcctactagggcaccttgtgtcagtactcacttgacaactttgctcctgtttcgagccaatgtttggtgtagctagccgtgtaggtttatggcttcagcgaccagattgtggtaaatttattgatttcgttcgatgtcttgttgtggaatggtgtgcttccattttttagcatattgggttactgtaggtgatgttgtaggcttaaagttgtatctgaatttggggtgtttaagtggtgatgcctctactagactggttttggtgtattggcttgtctttatgtcttggtacttttcttttttggcttgtctcaatttgatggtgctggtagtactcctcgctccgtctctgatatatgatagtagtttatatatatatatatatatatatatatatatatatatatatatatatagcttaattattttaggtgtcttaggtattgcatttatgtaattttggtctttcatatttcaattgaggaaattaaattcactaaatactttaattgtgcgattttgatttataattgtaatacttaaatgatccaattcgcaaaattgaaaactagaaaacaaaattgcacaccttatgcaattacaccttctttaatttattttcactgatgagcaatcctttattttaacaaaaagtaatcattatggtcctgtttgtggaaaagcttattaacagcttctcttatgttacaagtgtctttatgaatgtttgggatggtttttataaaaagatcctacgacataagatttttttagcttattttaataagttgtaggagtagcttattagcaagtgcttaggtgttatttttagaagggtcagctttcgaaacccacctttgagtgttccaaattcttatatatatatatatatatatatatatatatatatatatattcattcccttcaccgtataacatttttattctttcagcttttcatttttctggctttatctaaaattttgttggctttctttccctagccaaaaacattcacacgggggttgtttggttatgtgtaagagaaaaaataaataaaattgagagtaaatatatgaattaaaatagagaaaaagaaatgtgagacatacgttattttttaataatttattcttaaataatattttttctcttcaaccaaacaatcctagagatgaatatatattgaattcttccaaattaattaacacatctactcgtgtgatagatcaagtctataagactatcaaaaaaacaaattgatactttttacaagcattttataatctcaagaaaatgttttaatttattcagctaatttcatgattcaaaagatattcctttcttttagatttattattcttatttttttgtttttactataaaaataggtaaataataatttagtgattttatatttttaatatttgtatggtatacaacgttatttttttatttttttagttacttttaaatgttatttttagtttgattcttaattttttttaaaattgtaaaatgaaacattttataagttcttatacaagaatgtatatccaaatactataaaattatgaaagcacttttcaacatgaatatccaaatagcaacaacttattaaatgttaagcatttgtaacataagctcttatcgaataagatattaattaagttattttttcagactggcccataatctacgaaagatatgcagctttgaattgcagttgtcatgcgagcacttctttattttaaaataaaataaaacgagcgacaagatccgcaattctaattacagtccaaactctgtatctcaatttccgcttcggctgtcgtatacttttaggagggcctttttccaatccctttattctaattgcactctcctaagttttttttttattttttatatatatataaaatcttacaaaaatactgctaagtggagggtaagccgtaagcaacaaattctttaatttatatttaattattagttgaaacttattaaagattattttcatttttgtttagtatcgaatttttttaataaatgttttttatttatcatttacaaatttcaagataactaattattttttttcaattatattcttattttttatctgatcttcaattaatttacatacatacatgtattatggattatggagtaataatgataaagggtgaaataggaaacctataacttctgtctttgtccctaaatatgagaatattatttaaattttttatacaaaaatatccctaattattatagtctataaataatagtaattgctatgaattgtctttttctctatcttgtgaagattagataattgaggaatttaatttttaaaattaaaattcaactactattattctcttctcgtgcaaaataatttagttagtcccaataattttaggaacaattttgaaaaatattagagttacaaataaatctaatggtattaactaaattaataaattttcttaataattatgaattaattataaaagtcttatatttaaggatgaagagaaattattatgtttcttagtttctacataaaaacttttaaagacaaataattaaaaagaacaaagatcatatgagatgaagagagacacattaaatgtggagataaattcaaatttgtgatttctattaaattttaattattagaagagagtgtatttaaaaaacatagtttttaaatctggaaagtaaatttcaaaactatattttaacaaataaaagaaagagaagggaggggtgtactttgcatgctgtgaaagtcccaaagtgacgcctgatcatatctctggctaatgcttttgggcctttattgtggaccagtaacagggactatttagaacaataacaaaataaacccaacatattcataaatataaccaagctatatattagtatatcacttctatctctatttataataaaaatatatactttttataaattattatagaagaattcttaagatatgtataatattaaaaagataatattttttcttttttttttttttcctaattgagatctaatactagaaaaaaaataggagaaatattgagagatctttaatcttagattaaaatctcaatttaaaatctattattaaagatgctctaagactctatcttaattttattgtgcattaatttttttttactaaaatattctaattcattttattacataattaaatgttgatttgaattgtcttttttctcatttttataaagataggagaagataaatagaatttcaataatattaatattaagaaataaatttaaaaaatgttatatttatataaaaaaattaacgctaatacctaagtttaacaaactttctttaaatgtataaattaatcaacaaggttttataattagaaacagaggaggtagtataaaacaaaaggcaactgaatagcaaggtaaacatctcgaatagtaacaaatatatatattacaatttatttatatttattattatagtgtatttaacttttttatttcacaagtattgttctttaaattaaatgagaaaggatagaaaaattcagatacgatgaagctatatatgcatttattgtgggcaaacatgatccagaaaagcccttagattcttatccgaagagccgccatcttgcttgacagcttccctggccaaacccttccaacttttcgcattgtttctcaattcttctcctttctttccactccccatcgccacttccaaacgcttgataatttcttccctttctactatcccttcctcgttcacctgtttatccactctcacccccgtcttccacacatcttctattagcttcgcgttagtcttctgttccacccactgaggaaatgcaagcataggaacccccgaagccaagctttccattgtcgaattccaaccacagtgcgtcacaaaacaccccacagaacgatgttgaagaacttccacttgagaacaccaatttactatctttcccttctgttccaactcctctctgcagcttagctcctcttcttttccttcaactagtgacttattttctttttctctaatgacccacaagaaaggacttccacaatctaataacgcacgtgcaagttcttccatttgcttcttgggcaacacgcaaaaactaccaaacgagacataaaccaccgacatctctgccttcgagtccaaccattcgctgcatccatcagagacgcggaagatgtcaccgccaaatgaagtatcagtgggatctttcccgtccaagaaggccgagggaatcaacggcccgatggggatcatgttgaacttatcaacggccctcaaagcctcatgttccaacgcttcaaaggtgttgacaagtattctgggctttgcttgcacgtcaagatcatgaagctgctcttcaaacattgaaaccgcgagagagtcaatagtagggtttgaacccaatagaaatgaaggtaggtcccgtggtgcaagcaataacggcaatcctggcagttcaatggaactcgaggggtctttgattttgcctttgatgtagtcaccgtgttcatgaaagtagaaatagaatatgtcgagtatggtggctggttgagtccacagcaacgccgtcgggaggtgaaacccgcgcgctgcctgagctgcccaaggaaggagcacggtgtggactaaacaagtgaaaggatgaccctcttgcgcgttgaaggcgatgagattggtgacgaattcggagccgcgacgcttgaactcggaggcgtgcagggcgtaatcggtggaggtgtaaccgtcgtcgtagccgtcggagaaagggagaaaggagaggtcagggagggtgggtttgttggtgatgcgacattgcgacggtgcatgtggacggtggtggaaacagtgacgtgtgcgcccaaactaacgagacgctttgcgaactggaatgcagggtttatgtggccttgtgctgggtacatcacgatgaggaagcggtggcggaacatggtgcgtgatattgtaattgcagcttaatgatttgaaatgattgattttatgttcggaatagacaaaggagaaaactactgcggtgggtggaagaagaagaaaaggtagtgagaactgagaagtgataagaaaaaactgaatgtatatatactgataatcaattaatcatagactacgacttgtcatagtttgtcatttgtgacctttgaggtgacgaatacgtagcggacttcctcaatctatcttcatcccttatcctacattttagtcaataggagtagttgaaaagatagattttctgagaaaaaattcccttcacagccgacacatgtttgttagtggttaaaaattaaaatctttaaactattatatgtaaaattcaataaacaatatatataaaaacatattattgaaaaaataattattaccatatatataattttatgtttgaatttcttttacacaattttttaatgaattcttttacatcagattaagaacaacaataaatatattatttattgaaacaattttattaaaatatttttattattctcaaatgcattactagtaatcattgagtgattaatagtagtggttgaaaaaatggtaagcataatattcaaaattattatatcaatgcaatttatttgacatttattaaatatgtcatttttgatatttatttgttaatttatccgttagttttacagaacattttcaattaaataagtcaacttataaatttttaattaacttttcaacttttaacttataacttacaaattttcagttatcttgtcaatcagtttgtcaaacataatcttacgattttgaaaaaactatgaaattataacattttaatttcaaacatagtcttacagttttaaggaaacctatgaaatcataacatttaaatctcaaaaatggtcttacaattttgaggaaacctataaaatcataacatttaaatttcaaacatggccttgtagttttgaggaaatctattaaatcatagcatttaaatttcaaatatagccttatagtttcgaggaaatctatgaaatcataacatttaaatttcgaacatcctaatcacaaaaaccattgccaatttgtgtcataaaataactatctaggtcagtttttttctttaaaaaaaactcttcatttataatttatatatgaatttatctcaaatagctgcaaatgaggacttttaaaaggtggatattgttcctttgaactcaagcatccttgctcatgcttttttactttataggtgtgacaagtttgttgaattttgaaataaatgaaggagaattaggaagagtgagtagaggaagatgaagatgggataaagtaggggatagacttaatatttttagagagaaaaaaaaaaaaaaagagggaaggagagaacgagaggtcaagtcttttacttcttaatttgatcattatatgtttgtcacctttaattataaatcaaactacaatgttttactaaaataatatcataatataattttttattttaaatataaaatatattttaaatatgtatttataatataattttatattaatttatttatctattataaattttagttatatgaaaaagtactttcttattgtttattattttcttaactattctgaaaaacaattgataagaaatagggtataataaacaatgaagtcgaaaaaaaaaataaagacaaaagattataattctaaaggagactaaaatccccgccaaaaggaatcctttattcccgccatgaaatgtctctcatatccaaccattgcgccaaatttcgcgtatccaactctagcgcgcaaagaccatggacaccgtcccaagctcccgtaagcggaaccacccttctggaacactgacccgcaccagatcacagctctatcatcaccggaaccgctccggtcaactccgcttcgatcctgttcccgcacaggacgaaccctgcgccgaactccttggctttcgccgaatcaattgcaagaaaccgaagcgcgacgacaaggagcttcctcgccctctgaccaaggaccttcgagctaggcgagtttattcccctccgcaatctacaaaccccagtttgatcgaaagcacgtttcccaagggaagcgccgaagcaaccgagagtcccgatttggggcttttttgtgaggctcggggcttcggtggagattgttcggagaaagattgcgagggaaagaacggtggagattgttcggagaaaattgatggtttggatggagcaatgactctacccgactctgagatttgcggtggttcaaattccaaggttaacgaagatgtagggaaactggacgcagaggttcctgtcaaagataccccttctactgggaatgtttcttctctcaagagcaaatctgtaagggtctcacatgttttttaatttattttctttatggttatttatttatgcattttttgggtgaatttcatacacatgtacctggagattgaagccctgaccacacccttaagaggtttctttatgtttattgattaggccttctatccttagttgttagatccaaccttaattatggcgaattatgtaattaggttacatgagttattgtgggtgctctaggttaaaattccagtgaataacacttgtttttaaatattattgtagctttgagaacatggttttattattgtagagttgattgggatctgtttgcaggttctcagaccacgtttccagggaaagttgttcaaggccccgggttcagtcaattacagaaggttgtttccgtttctaaaggataccgtgagagatgattctggtaattattttgtgcggcaaaccccttattttttatttacttcattggttgatgatttagttgggtatgtgtgatgaatgagctaattggtctgataatatcttgtaggtacaccaaaattgggtttttgtcagaaagatgaggagggtagacagggattccaacttcttttgtcatctcaaagtcaagaagagtctaaacaagaacttaagacggatgccaccgcagattatggtgttaaaggtgttgcaagtgatttgcacaatgatgacttgaagcaattgtctagctacgggaataatcttgatcgtgctgaggctagtacggcacaggagtttggtgtcttgaatgaagaatatatacagacaactcctcctgatgctgatatatgtgttaattcagaggtcattgtcaaaccgatagattttaccagagacactcaggaaaatgctggtgaagtgtcttgtctgaaagttgacaaggggaaatattctctcaagagtaaatccgtaagaatctgtccttgtttctaatcttgtttgctaccaatttatgggttagacatttagttactgatctttgctaaactataattataacttagttacataataaaattaggtctcaaaaccataagtgatgaaatattttatgatattatattccaagaaaaaacttttgatgtagtagttagtcggctttctagcatttcatgtgtctgattttttggtaatattaacaatatggttttacatttagttgcaatttaaatatgatttgggatgtccacgcaggtgcctagacaacatttgcaccggaaactttttaaaaccccaggttctatcagctataaaaggttgcttccatttctaatggatcttaccaaagatgactctggtaactatccttgtgtattcaaccactttaataatacaaatttcattagatgttttatgcggatatgaagtagctagttgattttacagatgcatccaaatttgatcatcaagatgaggcaaatatgcatgcaaagagctcccaactccctttgtcatctcaaagtgaagaagcttctatagacgaacataagacaaacagcagtcccatgcatggcacagttgaatctaatggtttggaaaactatgtattagttaatccttctaatgagctatctcatggcaaccagccaaaattgacaccttcccaagacttgcctgaattgtcaacacaattggacgcaaaagaagtggtttgtggggatttatctgcaccctctgtcagtgaacatacagaaaactttgcgattgcttctaaagatgaatgcttgagtgcatcagagcttaatccatgttcagtaatggtggatgattttcactctgctaagaatgttgtgcataatgatggcgtcaaggaagtacagaataagatatccagacaacacaataatgagtcaccacccaaagatcaaaatatgctccatatcaacggtgatgtctctgagcttacatatgtgcatcattcaagtaaagaaaaaggattcactattgcttatgatgaaagcaagcagtttgtgaatctggaggagcatgaatctgtcagcagatttcccctgaatgtcagaccctaagtcaatcggatcccaatgtgctagatgctgaggagaatgtaacaagtttaaatcatgtccgggtttcaaatgatatatttagagctccatctgagaatattacctcagaaaaatctgacatggcaggggatagtggtgacaaagctggaactgtgcagaatggcatagttttatgttcaagaaggccttcaaaaggtagtaataaccaaaatgctagtgaaatcgaaaatggctctgaatccaagatgacgtcggtgaggaccctaaatttatctagtgctaaattatatttccataaaacttgcattaacgaacaacattatgattctacttgccactctcattgatttaactgatacttaatttttttgtccctgtcatgtatttatctgaaatatgtttgattatgtgattttgaaacaggttctcaaacgctgtccgcagcttaaattgttgaaacaggctggatctttaaactacaagagattgcttccatttctattgaataccatgaacgatgattcttgtaagtattggttcttattcttgtggaagatacttgtttagtttagtatctttcaatttttttcttggtcacggcagctgtagttctaaactaaacctttaatacttctaggtgcttcagtaaatgatcattacccaaaacttgcggaatccatggatcaaacacctcttctgccaatttcaacttcaaacttacaactaactcctgtaaatgattcaaatggctgtgttcctatggaacattgtgctggcaattctggtcctcagcaacaaacagggttgcaggcttgtgatttaaacaatgatagttcaagccccaaatctcaaattcctgaataccagtcatctcatgattcatgcaaagtgattctactgcaaaatgaacaggttgtattaaatggactatgcaagccagagagctacactgatacatcaatttctgttcacggaatagacttaccaatcacaaccttggcgcctatgattaacaaagttaccaacagagaagaaaaggcttcacctacctcgtccatgtcattatcagtttactctgaagtaaaaggaaataattctttcctgatgccttctaatgagaagctaccagaaacacacgaatattgtcagagcttgtctcaactgcaagttgtagagcaacctagagtccctgccgttgctttgaaaaaaggaattttaaaaagaaacccaagagggtgcagaggggtttgcacatgtttgaactgtgtttcttttcgccttcacgcagaaagagcatttgaattttctaaaaatcaactgttagatgccgaagaggttgcctataatcttatgaaggaactatttcatctaagaaatatgttagaaagttctgctgataatgtcaacaacaatcctgtttttgatggaagccaggtgagtactaccttgatttgtagttagtctctctaatgtgttaggtagagtttgacatgtgttgcattacctctgttccgttttttttctccatctggtcactggatcattattttatcacctagcaaaacttgttattttgtcaagcttttgatgccctttcagtttgacacgtgaattttatgactgaaaattgtgtctatctcttttaagtcttaatagatattaaattagtgtatcaagatttgttgggaatcgatcaaaagggaaatatatacaagtttttcacatgataaaatcacaggaaactaaaaattgaacatgaaagtattcattcttcacaagtatataatattctgctttgggcttaagaagaaagattgttggtcagttaattttggccatgttctatcttgagggcacattgtattgacagcatcactcagtagctttctttttaaatacatttgagctatgaaaatatatcttcattctcactattatttaattgtttttttccttgtccgtttcataaacttttttggacttaatctagtttaccgttgaacttgtaattccatccttttttcgtgtctgtataggcaaaatcgcaatcaattagcgtaaaaataataggcaaaatgcttaccaaactgaggctttttaccccttgtatgtttcaggtgaaagaagcttgcaggaaagcatgtgcagcagaagaagttgcaaaggaccgtcttagtcagatgcacgatgatcttaatactcattgcagaataacggtatgtgcatggttgttatacaccaataattggttccttcatttgaacaactgttttatttcaagttgttggtgcagagcttgcggccaccaacggttacgtttgcggttcatgttgaagaaaaagtcattcaaccaggcggataattctgtaattgcggtcttaaagcatttatcctctcatcttggaattttttttaggagtgatatcaaatataaattataaatcaggtttagtcttggaaaactaaatatcagagaaatatgttcgtccttttgaaacagcaagaaagtttgagttggagcggacaagaaccttagagatttttttttttttttttttgtaatttatgttattgtaaatgccttttgttcgcagttatgattcattctaatttgccctatttttttaagttaaataattttttttatttgatctcattttttaaaaagtaatactttttttggtcatgtcattagtatcttcattccactatattaaagattaatttcatctagcttaaaaaattttcacatagtagaaattaaatatgaaattttttgttaaatacgtgtgattaaatactaataatttcttttaaaaaataatagaagaataccacaccattgcatgccattacaaaaatatgaataactataaaattgttggaatgattgcagatgtgaaaaaacaaggatttcaagttacttgagttttgaagtaagcttcttagagtgaatattttgatactcataaatttaaggtgtgtttgatttagaaaatagaaatagagattatataaatagaagataaatttttgaattaaaatagaatataaaaaatgtaaatttcacataaaaaagtacaaaaatccttttttattttattttcatccttcaaaataaacacaaccttaaatagagaataaaatgcacaacatatgacactagcttggacaaatgtgaaatttgatgttggattttggtatttttaatattaaccattcataagatctaatgattattcattcttcttacgtaaaaaaaaaaagacttaactgtcttttatagattctttaattcctaccaccgtaaataaaagaaaaatataaaaaagtagaaagtgaaaaaagaggagatagaaaactaaataccctaaatttattatatttttcgcatatataatttatcttcgttttgtttttcttatttatattttctcttaaacgcacctaaaataatgaattcctcgtataaccaacaatcacttttattgcatttaagatatttttaggggtctgattctctctctctctctcttcaagaagagggatctctaagtacaatcattggcacaataattgtcgatacaaacaaaattgttagtctgattatgtttggccaaggggataacatttgctcagtcaaggtatgatggatcacttttccggaagataaatgcttctttttttttcagctatgttatttatatactttcttccggttttgaatagtaatcaaaaattaatttacgttaattgagaaaatatgttaatattatttatttttattaattatatttaaaaaataatattttttctaaactgtcctttattgaaatttgatataaaagggtcattagaaatacaatatcattaaatgaaaaagatgtttgaaggatcatttcattaaatagagtaaaattaattaaaatttatttatattgtggacaatttttttatattcaaaattaggggagtaacatttagataatacagtatattttcaataatattattattttatttcttttaattactttaattattttattttatgcttttccccctttttgtctcttttattgtaaaaatcatatgcagtaattttttttataaaagttatataagtagaaattttatttttctctttatctttttcgataatattaattaagaagctattcacccctgatttaagtggcttaaataattaaactcctttaatgttgactcgaaagaaagagatttcacataatttctcatgtaatatgtctgcatgcatttgtcttaccctacgattaaggttattttctctctctttatttatttatttgtttgttcttttttgtccaacgatattgggcgctctgcatgttaatataaaatatatgaaaccttttgagcatgcagaatattgatgttttgtttcaatttggattctatcaagtacttctcgccatacaattttaaaattatattcatcaatcttaaatatgtgattgacggatcataaaattatattaaccagcagtaaaaaaatatattatattaaccaatttattactttattaatttaattttatcgtaatcgttaaacgtaaatgtatgtctacattgtctagaaatttttggagaaaaattggaaagagagataccatagaggatcatcaatggtgcaaagtgggatagctgatagtagaggatggttcaaaatctcatttgagggaaaaattctctttgggtccatcttattaatacattatttaattgatgaaatgtatacatgcttgggaagagaatatatatatatatatatatatatatatatatatatatatatatataaccaacaactgtctagttgacaatgatggagttatttaaatatattaagagaaattcaatttctcatatatcttgcatatcaaaaaaaaattatttggaaagacaaaattcaatttaataattttcatatatcgaaaattagttttatgactttatgagatatcttactttcaaaaaaaagaatatctatatatatatatatatataatgtacgaatgaaattactctaaattattcaggccacccatttaatttccatattctctttagatctcttaccaataatgcacagaataatttttatcccaaatgttaatgtttttatgtgcttaaatttgaatgccccattttgaatcctctcgtttaatcttatttcctgcagccatcttactaattttgaatgcccagggtctacgattttttatgtcaatgtggtatttctgacagttgattattaattattaacattccatacgagcaaagtgacgtcgatcagtaccagaactacagtgctattaaacttgactacacctttttattatatgaacagatagaaattgattccaacatgatcaatttcacagggtggacgagataggatgagactaactgcccatattgacaagaaaattaaagtggtacaaagaatatgatttattattatgaccccttaatatacatatacattagcaactataaaatagaaactaaaaaaaacaaaggaagaaaaaaaaagacagaagtcaataaagaatctaagacataataaacatagcatattttacatagacgattcaaatccaataagaaagtggccattctcttcatctcttggaaccttcagcgtctacattcagcaggaagaccttgtgggaatcgcttgagatcactgcagtagttatagatcatgaagtacttctgaacccatctcagtcttcttctgctataagcatcaagctcatttgcctcatattcagcaccagaatttgaaatggaagacctggatgagaactcagtggctttgaaattgcggtagtatgctgtaaagggtgctttggaccaatcagttttcaccaatcctcctctggtggcccagtcatcagcattccagaggctagaatagattctcatgggctggttctttggaaaaggaacaccaagagattcagcattcttgaatacccttattggtgtgttatcaaccaagaatctgcagttaacccaattcatgatttggttaatggattttggtgaaaacttagcatagagataaacaaagttatatttctatgcaatttcagtgaaaacaatttacactttcaaatggtatgacttctagttcaaagataattgatgtcaaagtcaatgaacttaacatatataatgattatggttgattgcaatattagttgatagactatttattaataaacaaaaaattgtattttgaatatttgtttattatcacttacatgatgtgctggggcttccaaatgatagaataagtgtggaagtttctggtggggtcgaaccagagatagaactgttgctccctgttacctttgccttgggtgaagatgtttgtgtggagaatataagggtccccacttaggtttcccaaaaactcgaaatcaatctcatcatgtgttggcccttgggatgacaactgcaccgcagaaaatggaattactatagttattgatatggcctttgtgtgtggtagcagcacaaacaactcgacaaagaaaaggacctcattttggggaattgtgatgtttgttgtttattaacaggaatttaaattgtgtgcatgcataggaatagtatgagtttatcaactaaaaaaagccttagattttttattttttttatcaattcaaaaccagaaagtacattatgataaaagtagttcattaatattacacgagcctttttttttttttaatttgtcattagtttatgctatgaaccgaagttttcaatattaaaagttagtaatgttttggactaggtcaaagttagccaccttcccctgtcacgagcgctagttaaattcactgcttaaaaacgaccaagttgattaatgtatacgtcaatgtttgaaacagaaagcagcatggagtgaataaataaagcattagttgttgacaaagtaaaattctgtagtctaacttgtttttgtgggtttgctacaatagcattctcgtgaatgtacagttgagtttgacaaaggttgatgtcttaagtgaagaagcggtcaatagtagtcgtatttgaagacaggattttatcatgttctttcatgaagaatcaattctaaagcaacctaaaagaagaagaagaaaaaacatatacacacatacaaaaaagtctacagtatcactgtattagctcatgaagaaggaaagaaactaataatttgaattagtatatttttcttatggtaaaagcaagggtaaatgagtataccaaaaaaaaagaagataagaaacatgataatagcacaatacaattttttaatttggaaaaaatagaaaatatattgaaatatggacaaaatttaaatacactaaaagtattattctgtgatcagaattagagttttacttcaataatctaatctgtctgttgacatttattacaaacctatattacccaaattatccaggtaaaactgtaattttgattgaaaaataacactaaaagtatcaaaagaaatcatatttaaattgtgtttgaaatttttgtttgtactttgtagtataaaatattgtagtaatgaaattaaataatgtattgcaaatattaatgaacatacgtagtaagcagtgacagtgccagcagagttgccagcaacgagcttgagctgcatatcaatcctcccaaataggtattctttctttgatttgaagccagagccagagactttgtcaagggaaagagatagaagctggccaccattgaatatcttagcacggtcaccaccccatgttagatcaaagtcttggtagaagctaccagcacaggtagcaaccatagtgctaaccattatcccaactagcataagaacatagaatcgaatattgtgagtagaaatagtagccattttggacacaaaaaaaggagagaaattgtgcttcttgtgatgtgagggagtgtgttcaaaagaggggtatatatatatatatatatatatatatggaggtggggatttgggtatgagactatggtgggacgcgtgaaggagcaataactggggctggtgggaccaaaagctggtgccagcttagcaagttttgaaagctggtgcctttttgtttggccattggttatacttcaatagattttgagttatggtttttgggtttgtgcacaggatgctagtattattcagtatgggcaatgattgtttccatgatattactcacaaatgaaaaataaataataaaaaaggatttaatcccggaaatataggggtggaccccatttttgtatgatttggaacaaaatttccctttctttcataaaaagagagaaaattaggtgatggatggatgccaactgggtgtgatgtggaagcagaataaagacatgagggtattttaccacttcttagtaccatcaatcatcaattatgcatccacttagatggtgccatgtggcggagttgtactgagttattgcccctaggatattgcctaaaccaacacctaaattttcactgttaaataatcttcaagtttgtgacatatagatatacatattctttgatgttggagttaaaattcaaaaaaatagtcacaagattgccaatgatatggcatggttatccacttcggccatgctgataactctttctgcttgctttgtttcgggttgttgcattgcttgagttttagtttgtcttttccaatgcagacaacaactttggatgtgaatgacaaaacaaataaaaaaataattcaaaccaatatgcatttatttctcacgagtacggtgcatatacaattatattaatatctacttgtatgacaaattatttattagaaaaaatattagtgaatgaacaaacttcctacctgcatccacccttcattgttacaataaccacagatttttttcctgataaatggtccgagcatttaataaggaagttctacagaatcaaccttgaaatgagggtaagggcatccataatggcacagtaacgaagagtatggcaatgaatgatcgcttcattactaaagtactaataagcgttacaaattatagttattattattattcaggaaatgcagaaactagatcaagagttggagactgaaaaaaaaaaaaagatcaagagttggagtatttggatacttaaaaactattcattagtgccaatcatcattgaagtgtagccttgcatccctctaatgttaattaatcaccactaactagttattggaataaaagtgcaaatttattggttataacttataaagagatatatggtcagtgggaatcaacttatggcaaccagctatcagaatctccaccctttccttgcaaaaagtaactaaaatgatgatgccttatttaaaaagtactccactactattttaatgaatttgagaatgtatatagcacctcagaatggacctgattttaatgtgaatacatatagttggggaaatttaattagtgtccttcacttctttctaaattctatctaatcaaaacagaaagcatgttttcttttgctaacaaaataataaacatatcagtacaattatacaaatcgactgcataatgcatatgattgatgctttcggcaatttatgttttgcgtccttttaaataaaacctttgtttggttgaatatgagtctacatataaagtagatttgggaaagccaatacatggaatcataggtgctgcaagttacttggaaagttcaaatgaaacaaaagagtaaaacaacgagatgaatgtgactatagaatttatagacagtgaaattgctgaattcaactaaattggttggtcacgatgatattgatggttgagatattgtcacatatatgatatataggtccattaattaattaaaactacttattcctcatcaaatggcagccttcatgaaaagcaaaggaaagatcataaaaaaagtgtgatttcatccccatagctcaatgatgaggttccttctaacaatcttttatagcatatgcttttggtgaagattaaatttggtatacgccactaattagtgacaataattgtggaattaaatatcatggacgtatcataataatatttaattagtaaccacaatattctctttgaagaaggggggacattgattccagataaacaaattgagccatagtttcaacttttatccgtgaatccgtgatctacaaaccaaaccaaaagcaactactgttgctgtatttgaaatttgagctaacagtctcaccataatgaaaaatggtttgaatggtagtttcccatatgactgcaggttgcgctggcagacagggtcagttgattgtttaaaaaccagaaatgggtggaaatggaatttggaatctctggaagcaggttctatattcattgttttataccaaatgaagcatcagttaatttagaaaaatggtactaaacaagtatacgtacaaaaattgaagatataaaaacttgcatattctttatgcacgaattacttaatttagaacttttttacacacattcctgagttatccatgagtatatctaattaatgaccgagtatctgtatctagctatgtcccgtttttctccccttagttaagttggctcgtcaaattaacccgcattcatattatactaatcaagtatttgcatacaagaatgggatatatatcaaatttgtttcaaataaataaattttggagaaaactaacaaatatttctcgtattgcatgatacacaaaaatacgaaaagaaaactacagatttagaaaaattaaagaaaaattatttaaatgataattaaaaatatatattaagatataaaatatacacattaaaaaatttatagttaaaatattaaaaattaatcaattaataaaatagtacttaaatgatcatttataagaattatatatattatgcttaatgttaattgaataaatttaagtattcttgtaaaaaaattaagtattggaaaaaataactgtgaaaattaaaaggtctcttttaaatagataataatttaaggagacaaatattgatttgatttaaaaccaaagcttataagatgtgtgtaacaaaacgagaaagggcatagatatataagttgttccatgttcagcaacgaagaagatttaaatttataatataagatatagaataaacgtgattcgttttccaactttgattttagaagctataatagtatgtttttgttatttataataatatttttaacaattttatatttcatttctttttttttaatgattaataatatataaactaactggtgtcaacagaagtaaacaagtaataagggcaatttgttgtatatcaaatttagaagagttatttagaaaaacataatttgcatttagacatgatatttttaaattttaattaaaaaaatattttgtttagtttgtaaagtggaacaatttttagatagtaaatgcatacttagtaattgaatttaataaataatcatttcttaacatctctctcaagaaatttataaaagtaaatgattattttttcataataaattaaaccaaacatatactaaatgagatataacttgaaggtccaaggaaaaagctaaaaattgagatgagatgagaccattcatgaaaacaagagaacaaaaaacaagtaaaaagtattttaatttttaatctaaaattaagttatggagaataaattttaaaataataagagaaaaataaacatgcaaacatatttttttatattttagtttaaaaaaaaattctaaaaatcaataacgaggcatacccatattcatttaaataaaccgtgcatgtaaaaaagaaaaggagatattttgaaattcagcttctattctggttaaaagatgaaaaagaaaacaaatctagaattcagcttctgttctcgtgaatctagcaaatcttggtttgataagtttatgttttggtttcaatgcagcggattttgctatgcgaggctatgtgatacttgtttagatatatattgggttgcaggaggctcaaactttgtttcttttcttttgtctctttgatttggtgattaataaaactcattttttttaatttagaagaattaaaacaactcccgtaaaaaaaaaacaacaactcatcaagagaaatgtttattggatcttttatttcaacacaaactcttcttttctcaagtagaagttagtagaatctaagacctttgcaacaccgtcttatttagcataaacaaagtttaacgtgtatgttttttactaatattaggaaaaattataattaccgaatgcatgaatcaattggtataaacttttttctaatttaattttagagcacataactatgttaaatactctatgtcgagtaaaattttctcttgttgacccgtggtcttgtaaaaggaaacaaaaaaaaaaaaaacttctattacaagctttttttctttgtaaaatgaattaatctgaatattaagattctagctcaatgtgtttagattaagtttcaattctactaaagttaagttgaagtccaaagcaacaaacaattacttcaactttttaaatttttcatcatgattttagaggttaaaatcgattctaacttctaagagatgtacaaacacactataagtgcatgtttgaagaaataattgacattttttttaacttaagaaattgtagggggaaaaatctttaaaataaattaacataagtgtacactgaataggtgttgaaattaatttattttatagtgaatcaaatcaagcacaaactaaaagacagaaatataaagcaaaataatttcgacagacgtaaaaacattttaaaaaatgctggtatgtacagcgcatacagtaatattggaaagtacgaaatgagaagttgaatgctcaaataaaaatcaaaatccatgatccatgcatgcatgttaattgttattattatttctggtacatgcatgcatgttataattatattagtaattgatgaacaaatttttgtttggtttccaagtctgaatcgatgggcaattgaatagaaagagacctctacacaacacaggagagtgcaccgaaaaccaaatgaaaatccatcaattaaggaagcgcaacgtcacatcgtgcattgttgaggtgggtcctatatatgaaaaaatgctttctaaatataaggattcatatttttggggtttgagaattgagatattcctttgggatggggactcaccaactcttatcatatcaaacgcgtgatttcaatgatttcgggtaaaatgaatggtttggataattttgagttggattaaaattaatagatttaaaaattatttaaaatttaaaatgtattaatagtataatgtgtcatttaattataaatcgttgtttgatagttttgttaagctttatactagttatttaaatagtcatatttgagattatttcttgttgattaacagtgttaaaaaatattacatgaataacgtgtggaaaataaattcaaattaatagttaattcattaaaaatacattaatcatttaaaagaaaacatctaatttatttgccaataattttcacagatggatatctaattatccatttaaaattatttttttatttgtcaacaaaacttctctccttgtgagtactatttgagaacctactatgagcatatgctcttattgtgatcatcattgatccaatagtttaaattattggtttataaaatacgatagatggtttatccatcatccaaaccatcatgttttattcttataattgggcggataaatttgtacatgaatatattagatgattagtgaataaatggaggtaactatcagcctaatactttgtttcaattagaaatgaaatagacaagaaagaaagaaatagaaaagaataaaaataaaagagaaatagaataaaaatggtttttgaataaataaaaatagtaaagaaagaagtaaagaaatttctcttcacttgtttggaagagtgaaagagaaaaataaataattatataaaaataatttgtaattaaaaactaaatttaatctaaaaattaatttttaactattattttttcttaacataaaattatatattgatattttttaatcttttgttataaaaaaatatttagttttttaagaaaatacgacaggaaagtgagatccttccttcatgccaatttggggggagggggtgaattttttttttagatcctacgacaaaaaaaatctccttattcatacgccccttcttaaacaataagtgagaatttgatatctgttgtctatttctcttttccatttcttttcctcccaaactccagtaaagcaacgagtaaacgagaaagggaacaaatttgtgccatctctttatgaatacaacgtgtcttgaaattgatttttctgtgagcaacagcaatcatcattcatcaggaaaccaaaaaagaaaaaaattaatatttatcatccataaatggaggaccaaccaatctatgccttttggattggatatcagcctgtttttctttgacttgtacccctcactacggcactataccccattttgtaaggcaattgtcaatttaaagttgtccatgctatcaaggaagattataatttgctgaaattgtagggtgtgctatctttttcctgcagccaagacaactgtactagatagaggaacttccttgatagttgatgatatgttggttaaaaaattatcgtgtgctaaaggtgctttgtgcataagttactctagataagttcgaagttaaaatgagaccactcgaaaggttaacgaaatagccaaattgaacagaaaaatgaatgagaccacatttaaactacatgttagtgatgaacaatttcgtgacgtaaacaaggtcagagataactaccatttgagatcttaccaccgctccaaatcaatcaatagcaatctcacgatcaagtgaagcacctccaagtggtacacgatatttcagaattcagttagtgtacattagtaataaagattatgaagtctgctaaaatctacttgataatgaaaaccaaattagaaaatgcaaaacccaaactttccaataacgtttcatattgaagacaaccataatccattcagaatcaaagttcttttccatttccactgtattacctcattgttgtcaacgtgatgtgatggtttgttatgcccatcgctggtggaagtgagatgatcaatgtaaggatagaagagtttgcagtcagaagtttgtcctatgcacaaaacctaaataattgtttgacatgtgctatggattaaaagctaataccataagcataaaaggtgtcatgaatttgatcatcatcctgccctactgctcattggagtcgtctgaaacatcaaatccaggaggtataaaaataacatcatcccagttcgatgtagaattttcctgcaaaattattttatttagtctcaatttacaaattagattaaggaatatagataattgcaaaaaatcccttccctcaaaaaggggagtaacaaacacaaagggttaagtgaattccatcttctactgtaactttgacactcaccttcatttcttttattacatcctctagagtggcaacctggaaaataaatcatggtgattcctctgaaacaacaggtcatacattgaagggaatcattgtggtctgtacctggatatcgccttttctcatagtaggatttgttctgctcaagggctgccgatttaagtgtattttccaagtcctcctgtgaaaaattcgtaaggtgagaattaaaaaaattcagcttgatttctgactatctaatctcaggtaactcaatgcgagcaaatcaacaatacctttctgaagaaaagtggacgaaatctcttattttggctcttcaatatcagacttctggactgaaacttaccaatataacaactcaaaatactagttaagggattcacacatgaaaaaaattaaggtatcatagcatcaatagaaatgagtgcaatcacaaatgataacaagattataagaattagtgctccaaatatacttgtagaacagtagaacaggtccagttcatagtgtctctaatacagtatcaactcaatcaagtttcttcataacataaacataacaaatccgttaaaaaaactggcaaacaaggaagcacaggtacttcaaaatataagttttacctgtgtgttagacacatattcgtgtcaaatagcttctttttttttttactttatatttaaattgtttaccaatacatatggaaatgccacaaaaactagaaacatgatagccttttattatgcctacaatgactcgtgctaactgtaaaacaccaattctctcttttgattcaagatttgtgtatttcgttttaattttatacttgatacttaatttgtgttatatgcccataatttttaaagtttgatactcatttcatgttgtattgtataggtgcctcgtgtccaatgttgtaaaaaacatgagtttactcgttgactcgtacgagttacaagttttgcaccctccatcgagcaaacttggaggaaagatcggagacactgcggaacggtcatcaagagcgggtttactcacgagaacggtggaatgttaactgttccgttcccgaaggtggctttttgtggcccagtttgaacacgtttaaaaaaacccaaatatgatgggctattcgggccaggtttgctgacccagttcaaaaatgaaatagaagaccctattttcagaagcaaaatgatcctccaagacccctctcggaaaaattccatttgctccccctcgctgtcatctccatcgtcggcccactctgccttcgccaatgcttccgtcaaaggtttgaactttgaagaaaggaatgaatttgttaatggggagtggctaatccgaggtttgaaagatacaggactccaggcatgtgctagcagcaatttatgagtagcagtaaagtacaagaattttagatggtctatagttaggaattcatggatagaatagtggtttaggctgtaaacctgtagaggttttcggaacttgaggggcttggggtttgggttcctatcatatgagtattatagatactggttctgaatgtagaaattaacagaatgaaagaaaggcaaatttattgagcagcatcctgcagcctcctactctggatcaatggaacccagaatgaggataatggctttttaaatttaaagtaatctccaaagaatcgaaagcttggtctctcccacccactactaactaaccaactaactccttccacttacattctctcccactatttatatcctacctcttacagcatcagagtcccaactaacaacaactctctaaatactttaactagcaatatattttcctaattgtgggcctcttgctaccaaagtactccctcctttccattttctttgacactttagcaaaattaagaaaaaaaaatagtcccattttgattggcattttaatatatctatgaatccttaaatatttgtttcctattatatccttaaccacttattatggagtgagaaaataaaagagatgtatgaaggagagagaatgcaattcatataaaagacaatctattaggaaataacactattttttatgaaattaaaatattaatggtattttttagttcttgtgccaaaaccttaaacatcacacaaaatgggacagagggagtaaccatgttgttaaatggtcatggccgccatggtgggaggatttgttgccaaccaccataggcaatttgtgaagggaggcccattatggcagtgccataggccacaatgaccatctgccattgacaacattggggagtattatcaatatcatattcacaaaccaaaattcccatttatgaactaatattaaattgataactgcatcagaataaaagactatggagtgtatctctcactctcattctttttattgagctggttctttccccttttctcttaaataaaattataaaatcaaacatacaatctatatacacaaaaagcatgcacgttgctaatagaacttcacactcaaccactcagtgccacttgtttaatgatgtttcacaagtgaagactatgttacctacacagctatgaaattcaaggactttcattattataatgatgtacttctaagacataagatcactttatttttctttttttttttgttctaaaattgtatatatttatttatacatatatgtttgtatgcatgtccttgattgttcatccaattttgcaaggtttctgcttctctctataaacagataatcagcataaaaacagactcccctgggtggggataaggttgcatgcatctacctccctgagaccacactgggtgggagcctcaaacattggctcacccttcttttccttaaaatttatgtagtattaaaatgttgtgaaacattcattgaatcccctattttcaaatagctcgcaacataggaattaagacacaaatggaatgtccagacttaaaaagctgggagaagaacctggaaaacgggaacaccagaaaagccactggaagcaaagccagatttttccctctcctgtatagcatgagcgtacattatcattactgtacagctcaatgaccaatagcaaggtaaatagataatacagggattacaagcaaattttcaaacttcacatcaactatgcatgacgaattttaagaaaatggtatcaaattagctaattagaccaacataatagaaaaatgactagtacaacaccagagcagtcaagctctaattctggtaattggtgagaaccaatccaaaatcatagtaaatttgtgaagaagctttctatccacacagtaatttttcccccaagaaagctttgtcaacataaattgcacacaaagtactaaaaaataatctagctcaaagagaaacttctaccttcctccattagacaacatcacatatcagaaccaatcataattccgagagtaccaaggggcctgggctaaacgaattaatacaaacactgaagagtgaagaataaggcctatttatctgttaaaggtggaaagcaaagaagaacagtgaaatgattcaagttgccatgtttgaaaagccagtagcataaattattcattcaattgcttctttgccatatatccgagacactacagaagtggtccatatttgaatcctcattactccaattctaacaatcatatcgtacatcaaccattaacagtggcacatgttctgttcaatcttctccccaaggtaatttcaaatgacacattaaaatcataaaagaatctcaataatcaggtttgattaagatattaggaactaatggtagcatttagggagtgtttggtaggagagaagtttttggttttccatgtttggtatgtattttaaaaaaataacattcctgaaaggatgtttcctgaaaatgtttctcaatcgaaaatttcccatggggaggtagtaatcttactctcccaagtttaatttttcttttacaacagtaaaaacatcgtattattctttattaaattatataatataataaataattaaaatatagataactcttcgattcctccaaaacttatctaaagatttccaatgtcaaccaaactaattttattcattcccagtaaacatgattcccaggattcatgattcccggacatgaaaaaactttttccctaccaaacgtccccttaggatttttgaagggtttaggagtgtgcaaggttttaaatttcggtataacagtacgcagagtcgcagagcatcgtttgagcgtatccaactatacatttggcatacgataatagtaataataaagaaacgactcacttgcagggcattctttacttgagagaactcaggtatcaatctaaacgcaacgccgttcaccttgagctgaaacaccttgttcaaagcaacggggacaactttagagccctggcgcgcgtgggggtcgataagcgtaacctggttgaggagagcctcagcgtcgtccttgttgaagcagaagaggccaaggtttttcccggaggaagagcccgagaccaagagaaactcctcggaagcgttgctgagggcgtaaacgggaattccctctaagcgctcctcgattgcctccaccgtcatggccatgggcctgcctccccagggctgggctatccgagcccatggcggcctcgcgcggttgggctggagacgggtcaggttgcccagcagcgtggagcagcgaccctgaagctccgccagagccttctggaagccgtcaaagttcatcatgtttcttttctttgtagattgcagagaaagaagatgatgagtgagtcactagtgaatcttcaaacgctttgttcgttcgcaaggaaagtatcgtgttttttttttttttttctgtcccttgaaatatctcaaagtatgattttaatttctataacaaaaaatctttgataaacttattttccaaacgtagaaaaaaattaagttctgaaattaactacgaaaataaatatttctagaaattaaattctgaattttttaaattttttatacaatttcgaaatttaaaatacgggaaccaatttttttaacactgctttgagatttagatttcgaaataatgaaatcaaatctatgtatgaacacattattgaaatgaaaaataacaaaaagaatattgggtgcgctttaaaaagaagaaaaaaaaaaggattttataatcccctattgttgtatgctgtgaatgtttttgggctagaacagcagcaggctaaggctatattgatgacccaacaacagccataatatgtgtgggtatagggattctataagtatattcctatagaccaaaacgaaaaataggaatggcaattgctattatatctccacaattgctaaatatatttccttctttttttatatttttattgcacagatactcttttatataaaatcataaactctgtttttgcacctctattttttattgttctttgaacttaaaacttattttctcccctcacccctttttttcaatcagtaagcatttctttccataaaaaaacgtattctataatttactttccagaagcaaaattaggggcaagaggaagaaagatatgaacaccattttgcccaaaaaaagaaagtgtgaattggggatccatcaaattccagtgctacacatattgaaattaaattttcactctccccaaaggaaaaaaaatacagaaaaataaattagcatccttaaacaatataggagggagtagattctggaggtgtatttgcaagcagcgcacgaatgcacacgcaatccaacaccaataaatcaagtatgcttcctcaaatccttgttatgaataaatgtgccatgaaagtgatgaaacccatgaggaactcgagatgaaagcttgatgggaaccccgatttgcaactccaattggcaatttccacttttcttgttatgcacaaatgccatgtgtgtgaccatatgatctctaccgataccacgaaccataaagcatccagacagcccaaactaggcatggccataattaacatgaccatatgtgctcggtaagagtgatacctaatatatggttcaagttttgcgttgttgtaatgtgtgtgaatcgtgacatcaaagtgagtgtgtgtgtgtgtgtgtgttagcgtgggtcttagactgtagatggcttatgtgggaataatcaaatactctccaaaaagttaattttcagaaaaggaatacttttgaaaagaaaaaaaaaacgataagatgttaaaaaaagtgcaattactaaatagggaaggtaaatatatcaattgccaataagaattctatattctagaccaagcttgagcgtcactcggttagagtcggattaaactcaaaaatctaaaaccatagtgaattaaatatttactatttaacataaaatccatccatttatattgtcgattatgtcggataacaagtcaaatgagttttagatgaattagttgggtatgtgtcgacaccaaatgtggttgaaagataaagtagttattatgcgtgcattgaatagagaggaagtgaaggtaaaggaaagtgagatcgtgataacatatttaagttttattattttttcattatacaatttaattatacacaataataaggttgatatattacaataacaggtaaggtcaatgatcttgtttcagatttatatggtcttaatcgggttggggcatgttcaagaaactaaccctaacaatttttggattggataagcaaattaattaagtttaacacttctagttacatatgttctctagtagtagtatgaacaatattttaaaaaatattattataaattttaattatataaataaatatttattttgtattcaatggacgaactaaaatatcacttcaaaaaaagttgatacagtatcttacttaatttcgtgtactaccatctcttatgaattaaaagttttcttttgaatttatttcttgtttttattttgaaatattcatctataatctataattacatataaaaaatgcaaagttttggtatacacattttttatccttttttattatcataactgccttcataaatctattttattacatttttcaaataacccataccgatagttatatattgtaatccacccacgattatttaacttttattatttatattttttattttttaaaatttacagagagacaccaagtattaataataaaaacatcccattatagagtattttattttttaaaacacataatttcatcatacttaataataataacaacactagtgtgttctttaaattttcaatgctcatttaactcgttagtaataggacaaaggtgaaaggtttctctctccttatcatttgatcatttaacgcaattaaaataccaatatttgttgttatgtgattataatacttctttattgtcttctaaggcacgctcctccgacactaaccaccttaactaaaatttcttagatctgccagttgggcaaagatgattttatccacaagatctccaacaacacagcacttgctaagggccccaccattgtgccacttaactcaccaaattattgtgaccatctccttctccatttctaataacttggaatctcttcaagtttacactacttttggtgcaccaatattttgcctccttaaagagaataaactatttattactaacattttctatttaggatcagtacacctaagtttgtttgtttttaatgtgttttaagatatattgaactgacctttaaaattaatttaattcatcttaaacttgcaatgacagtttattacgtgatttattatttaatattgtttttttttatatattttaaaaaagttctgcagataaaatggcatgataatgatttgtgaactgtgtaatgtgtatgaatccaaactgaactactccatacatatactgttggttcgaaagcgagacgaaaccaaacccagcgtacatcaacaatcatatatatgttggagatggcccaacgtcccagaagtttttatttttaatctgttataattatttttgtacgtttaaaaagcattgaaacttaaagaaaattggttaagaagtactagtcctatcttcgatgattttaacaaactgctacaaagtaaactgaaaaatattataataatctgatatgttcgttgacttttgaataactgttttttactgttttttccatttaagatcaatgtgctctcttgccgaatagtgttattccaatttaaaacagaaattacattgattgtggtgacaactttggttataattggtactttttttttaagtggttatatttgatacttcttttttgaggaggttatgtttgatacttaataactggtaaaatgaaataaaattaagaaagattaaataaataaattgtcagacagtcacttagattaatcctatatacttagaagagaaatcatcctaaaaaaagagaaatgaaataaatgaaacacattagtttatactttataccatgttttattaaattacatctcaatttggacaacctaaataacaacataaattttactattttcgtgaatataatcgtaccatatatagtcttccatgttagtataattttgcacgagctcacaataaaagcctcccatcgcctaattaagaatataaatttttaataaatacaaataagtgagaaatagtaaatgaaatgcaccaaagaccgaaacctaattgcagcgtaaccatcgtttctcagatacaaacaaaaaaatagtaatagaactgttagaagtagttgcaacgtacgcaggggacatactttctcatttggctttggacgcttacatggatagaccgtacacactacactacacatcacaaagattttactccaaccaccaacctcattggccgtcattctccccaccgtcacagccatgtaacccttccactatccgcagcggtggaaaggtcgtcacggggagaggcacgtgcagcgcatgtgcacactaagaagtgttgtacgttaacgacatgtatacccctgagaagaacgtgagaagaccgaaatacccttttggacgtacaaatgtacaagtgtttgaagcggagaatggagatggaaacggaagtttcgtgtttccatgaacagtgagtgacttacgttgtccacatgggtgcgggtccttttgtttttttatgctgttgctccaaaccagtagtgtactactcctccacttccactgtaattaccctcttctttctctgcagcttctctgtttatcttaatctaacacacacacacacacacgccccaagccttcttctgttctgcttccattccagtaaagttttgatttttctagcctccccattcttcttcttcctctgggttttcacttgttggattttcttactgtctttcattttcgatggataaccaggatcaaagaagaactcacactgcaggtgctttttcttttgcattttctctttaaagggtcactgccctcatcctcatccccttttttctcccttttcttcttcttctctctcttttcctttccatgtttcattattatattatttctctttctgggttttgttggttcggtgtttttcttatgaaaagtctttgtctttctggggtgtctggttttggaaattgtgtctgtgttcttttgaagtgttttaagtttctccaggtgaagatttttatggtcttattattttttttttgttgaaaaatttgatgttgaaggacacgagagtcatggagttcatttgtgtcacaaatgtggatggccatttccaaatccacatccgagtgccaagcacaggcgtgctcacaagaagatctgtggaaccattgaaggttacaaactgtctgcctccgagggacaaccccatttgaatggctcagatgatgaacatgtttctgatgatgatcacaaaacaccaggtggatttccttcttatatgtagtgtgttaactttaatactgagaaatactaggagatgaagtaaatcttactaactttgatgctgagaaatactagaaaatgaagtaaatctaactgatcttgacttagtgagattaattttaattacttttcttcatgtatagactttgaaattagtactacattccaaaacaaaaggtttttctgattcgttgctattttattaggtttggttgtgtcaggtccaaaatccttggagacaggcaacaatgagaagggcaatgaaggaaatggagaaaaattaattagatcagaagatgaggtgttttcggatgcagttgcagactttttggaaagtggatcgaatccagaaattaaggaacggttgcaagataatttggactcaggtgctaatgtggaaagggttgacataaaagaaacaaaattttcagggtctactgaggacaaagatttcaatggtgcgaagataggttttagtgttttacatcatatttccttttattaaattgccttgttagttttttcaacgagtatggacttgtgtgcggtaaaacattttggcctggttaattaaaaataatgataattatgtttttgcatgatttacaggtattaagcttgatgattgcaaaaaaatctctaaagcagtttattgacttaatttgtatacgttgattggattgctcaactgatgaaagcaaaatttgcatcttttcacatgactgctacatgatgaacatcaataaactaaacgtgcactattcgtcttgctttgttttgttcaatgaaatttaacttgagtattatttgcttgttagaaacttttgaaaaatcagatatgttataaactatacctttttaagttaacttctgttgtaaaattatattaaaaggggggaaaatcagatatgttgttttgatttttattgatgcaaatatccaggatagcacaagtatattgatgcgcacacatgacataacctacataattattttctaagaaattattgaataggcattttttatgacaatatctcccttttactgtgttctttgtttcttctctgtggttctttcatgtctgattatctgtttcacagctgcagatgcacgtcagttaactgacaagtcaactgatgacagccaaattcaaaattctaatatttttcaaaatgaaagtgttgaagtgggaaccgcggtggagtttcaaggtcaattgtcaggccctactgtggacccattgtcaagttccattgcagacttgaggactgaggaatcaactattgtggatagtgatgttttttttggtttgtcaagtgactcacttcttggtgaaactgaagccatgcctgatatattgccagaaaagaaaatccatgctgctgagaatgtgacagattgcagtttgatatctgttgcaaaggaaactaattttaaagaaaaggatgagattaattctgctgtagatgtggttgaaattgtggaatcatctgataatgttgtcggcgaagcatgtgaaggagtgtctaaaatagcagttagtgatgcagtttccttggatcatcaagtgggtgatggagctgttcatctgaaggaaaataatggtgctgagcttaattcctacagagatgtggttgaaattgtggaatcatctgataaagttgtaggtgaaacgagtgaagaagtgtctaaaatagcagttagtggtgtagtttccttggatcatcaagtgggtgatggagctgttcatctgaaggaaaagaatggtgctgagttcctttctttgttgcccccagataaccttcctcttgagttaaactcagttgtaatgacaaatgatgctcagggagactctgcatgtatgatacagtttgctacttccagtgataacaaaaatttgcaggaaaagggagaaggaaatgttaatgttaatcctcttcctacatgtgatgatagatctgatgaagtgcatcctcagagtgagtatggagactttaaagatcttgaaggagtggtataccaaaatcctttcctacaatcatctgagtcattgaaatatgagggagatgacttgaaggacaaaattactgaggaaaataaatttcatttcaacgcaaaccaattgagtgaaaaaagtgacatcctctctccagatatggatgttatagataatagcatgaagatggagctggtcaacagggagcctacgcctaaagaaatgcatgccgaagagtgtaccaaagtttctccagccaagctcacagttgaatgtcatcaaagatcagatgacattgatgcctcaatgaatgctaccaaaactgagacaaatgaaattcgtatggttcacctttctgaagagcatggatctgatgatgtgtgtaaaaattcccagcagataagtttaccagaaggtagtttaatggcctcttctaacgagagtcagagggatgaatcctttagtgaaacaactagggcaattaacatagacagcacaagtcatcatgaggtaaaaataactgaaataaatgatgtagcttcagatggcaaggttgtaggatctaatgtagaaaatgatattgaaattatattgaaagatcttcaacccagtgacatcttgcaatctgaagtcaaacaatcaaatgccttatttaagagtgacagcactggtaagagtgatgctgctggtgaaatgggtaaaaatgaacatgatattcctgatgctcaatgcatggaaaggtccattgtgagcgatacttcattgcccaaatctgctaccagtcattttgaaagcccagctatttcagagtctttagacattgtggatgatgggcctgtgaacaagtcaaatggtacagagtgcagaaatataaatccactaccaggtgcccagaaagacataaaagaagatgaagtctatattaatatcaaactaaatgaagaatataacaagtctgttgatacttctaccaagtcacatcaagcacaagatgctggactattagtgaaggctgcagaagaccttgctagggagtatacatctcctttaactactgaaccttctgctcagcctgacagggaagtgtctggacttactgcagtgcctgttcaagatcaagctggtaataacttgggtaaacttggttcatccagagttgatgcttcagttgactcaggtagccggtgtgacagtttggaaggcaactggggctctttttcaggtatatatacatttgttgtttttaatagaaaacatttgtactgtcttgatacattctatagtagggctattgtaatatgctagggttagtcaatgaaaccaggtaatgtgatgcagtgcttgttaaagagaagttatctgtagatccaggtgctatactgcaatattacccacttttcatagttgattagaatgggtgagatctttttgcataaacttattctcaccaaagacacatacatactggctattatacctgtgtgcaattgtgcatccctgaatcttgcctggggctgaaatttccaaatgagtttcgttggtaatgatttttgcatgcttgcgaagatgcatgcctagatcttgtctcttaatgtttttcaccaattatattcacctgttgctttggcgtgatccatatagttttctctctcatcctttctaggattgtttttctttgtataaaggtggagaggaaagtcgaaagaggatccatctcttttgttgtgtccttgccttgcattatttgtataaagaaattaaactaaaatattttaatggttttttggaagaaaaatttgttttactttttgtttcatgatccgtgaaacagttctgtcaatgcaatccgatgcaacagctgttattgatgctgaaaccttgccatcaactggcttgctggcatcaacagaagcagggaaatcaaacttcaacaactcaaaagctacacctgacacacagcaatctggaaaatcagaaatgtttgaagcaccatctttaatgacattggttgatcctagtcaggttagcccaaaagccactgcttctgaagtccagaagggacagaaaacacgacagccagattccacttcacaggctgcttggtttcccactcttacacaagttgtcaatgagtctcaagggagaaagaagaatgaagaaataatagccaaggtgacaaactggagcactagtaaggagcacactcctcttaagagccacttaggtgaggctgcccatagcagcaacccaagatctccaaaaatggaagaaaactcagtgagtcagaagagtggtaaagttctggaaaagaatggttctgggttgacaactgttaattccattctgggtcctgaatcccctgtggctcaagtggtaaaaggagaggctgcaaaagaatggaactctccagcaagatatcctgctgacatcaagagagaaaaaaggaaagttaagagcagaccatactggatacaattggtatgctgcacatctgtcggtcctcagcgaaggtagaaaattactaggttctgataatgcttccactctgatggattctggtcattgacatgctatttacagtatttttctgtttttagtttgtctttaggtgcatattttgatcatgtgtcttctgttcattttggtagcctcctaggagttttgttgtatatgttgaccatcttcagttattattttatccctgcaatcatacatttttactatatatagtaacgtatcattattttggcctggacccatattttagtccggacttagttcttgaattttttttgtcccaagggtggggaaatatggtctttgtctgagattatgtctcataataactaacttgcggtttctgccttttacattggattcattcttgttaaatcctttgataatagaagccctaaggagagaaatgggtttgagagattctgctttaaggatatctcattaatgcctgtataagtagactcaatcatgcatgtgtgtatgaagaaggaatttactttcagaaatagttgttaaaggcgggagtataaattgactctcaaaaaagttcaatgaccataaacatgtggatcaattagtggacgatttgatttatttttagttaatcggtggtctcaaatttttagaacgtagatatgttaaaattcagtagggaggaatctcgtcgcattgtggtattacccgagctttaataagttagacttaaggaagacattcaattgatatatcatattttaagtctttgattttaagtcaagtagattgtgtattttatttctgtcacgggaagtagtataccttttgaaaagagaagaagagatacggattaaggagtagaaaaggagcaaagtgcattgcaagaaatcgaacatgcgctctcagtatattgtaattattctagttttttaaagtatctattatgctaatgaataaggatacgttgtttgcacattaaaatttaatttatgttagtcactaaatatgcaatatatttataattaaatttattcatttttttattttacatatgtgagtgtaggctgaaaaaatatttgtaaataaaaatcttattaatgatgattaattagattttgtcataatatcattacttcgatgatgtgattttaaaataagtaacattgacttggattttgtataatctaatcatgtaacactatgtggattatataatcatatcaattaatcattttctttttgcaatttaaatttgaagacctaatagaaaattttatattttatattttgtttttaatttagtattttattaaaaaaaatcactttatctttaatctttctaattcaataactaatttgtggtgtccatggtgaaaacattagtgggtgcacgcctagaagcaatatattttcttcgaatttcgaatcgcgttgttgctgctactgtttactttctcctccacttcctgggagagtggtaggaaaaaccaatgttattaaaatggtctagatgagaattgttgtctaggtcagtccgggctggtatttggatcgcttatgtatgctgtccagtatcgctcgcgttgacctgggttgagctcaccttttttttttcctttcttgaaacagttttgtttctcatattctccaaccatgctttccgacaagggtcatgtggctcaatgtaaacactcattttccaataagaaatcaaaagaattcactgtcaattcaaatgaagaaaataaatttgttttgaaaggatattaatcgctacgattcgaagagagaactattactttttatgaatacagcaaggaagattttgggttaggaatataataatccaatttcgaaatcaaataatgccttatttataaaagttgaaatattttgaaaaaaaattcaaaatatttcaaaaggtacacaaataaataaaacaattctgaagcttgttgtataatttaatttctaattaagtccaattctcataaataaaaagtgatacacaaaaaaaatacagataatagactaacattttaaaaaatgcatttctttagtattaaaatttgaataaaaaaagacaacttttggcaaagacatggttcaaagacatttttctcaattgcataaacattactataaccactgagctaaagtctttagtcaataattatataacaaatttaacttttatagagtatcaacacataaaatttatgtttttaatatacattgatttattgggttcaactaatgtttatcatgataatgcttttaaatttggaatatagacttgtgttgttaaaaactctattgttatttgatatattagataatttatcctaataataattttaaatttagaatatggattaatcaaagaatgttaactataaatttttaatatatataagatcaaaccaaaccaattggtgattactggtttgaccattgatccattaatctagattttcgatcagaccgatgactaatttgattttcacaacattgggaaaaacatcaaaatgttgttaactccttctccgcatggttgactttgacttgctcctcccaagtgagttatcagaaaagtagcttctttgtggttttgtgtggggaagctcaaggtatgaagacattcatatttaggaagttagagattaattaacatttaataaattattaaattaaaaaccaaaatataaaatttgttattatgtccttagttttgaattgcaaaaaaataaaataaactttattggttgatgtgactatatattccacatgacattacatgattagactatacaaaatacacattatgtgacttattttaaagtcacatggaagtaatgaccttgtcaaaaataacaaactaatgaatattcttagtcaatacattgataacacaaatgttagaagagtactgtcatattttttaacactctttgtaacacattttcttctattaattgaaatccatgtctcattaatttaaaaatgagacttaacgagaaaaatgaaacctatgtattaattgagctctataaatttcatttaataagaaacaatgcatcataaagaaaatgtatattacaaacatttttatgaatgttagtaggttggaggcatactaacaatcaacaatgttttccccctctaaaataacgataatatagtatcaattttatagtagagctgacaaaatgaacgagttagttctatccaatccattggaccaaacgtgaaaaataggttggatgaagcttacccatattttatatggtattcctttttttatagtccaataaggcccaatgacctattagactagcccatattggtgcatttatttatttttttacctaaatttataaaaatctaaaataaaaattttaaaagtataaagttaaaataagtccaattaaaatatgtaacttatatttcttaagttcagcctaatctaatagacccaattatattagtaccaatgggctgatttgtaagtaagtttttgtcttaagttaaaaaatatttttctaaataatttaaaataatgacacatgtactgcgactttcacgttatcaacgtgacactccaaccaactaaactaataggtcaattatgctaaaattcaattaatattgataaatataacattaattttttaatgtatatttaatacacatataagtttatataataaattttgtaacaattaattttgatctaataattaaagtattttttacatataaaaatcatagatttaaataaaaatcataagtttaataaaaatttacaggtttaataaactgtaaatacaaatatattttttaatttaacatgtaaatacaaatataatttttattagacctgcaaattttattaaaattatgatttttatttaaaactgtgatttttatatgtaaaaaaaatactttaatcattagatcaaaattaattattacaaaatttattatgtaaacttatacgtgtattaaatatacattaaaaaatttaatattatatgtatcaacattaattgacttttagcataattgacctattaccttaattggttggagcatgttaataacatgaagatagcaggtttgaaacttacgtgtgctcttattttaaattatttgaaaaaatattttttaacttaaaaaaaaaccttaaaaccttaaggattagcaaatccttatatttgaagcctgtaataaagcggtgtataaagtttttcccttcattaagttggccctttttgaataggtagtaggtacccagcgggccaggcccagccgtggcgcgtagggctgagtcaaagtctagaaacccaaaccctatcacccaactccgcaaccattgaccgaaccacttccaccagcagcgaagtgagtgagtctcctcaactcaacaatggtagctgcaaaaccaaagtagacaactttagaagctgcaaaaccataatagacaacccaagaaccccttctttagtgtttgatgtcttgtttgttaacttaatgcaatccctcaagtcacaccctgctcttttattttccctttccaatcacttctcttcttactctgtcagatcctttctctcttctttgtcaacccaatgtcaacactcaaggaaagcacttccattgttgattatctaaatgccaagttcgaattctcgagaactcaatccttctacatctctagacatgtttcaatcagcagattcccacaaaatccattgtttgtgctcagtttttttttttcaaacaaattggattttctgaagcccagattctgtttttgatccgtcacaaaccccagatattgttcattgatgttgacaaatcttgaggcccaaaattgagctctttcagctgttgggtgtgagccttcggagttgtgcaagttcatttccaagaattcctccattttgacttttagtttgaagaaaacattggtcccttctgtggaagctattaggaaaattctctgcagtgagaaagattttattcatgttttgctcagatgtggcatgaaaggtatcaggctcagatagaaaagcagcaaggaagacgcaagtatacaaggatgaaagaaaagaatgaagagaaaatattataagtggagaattatacatggtagatgagtgaaaatgaggtaattggtgtattttgcctaaacaacaagcttcacaaacagaggaagctgaagattgtttttgaactatagaaggaagattacatttgtttaatacatttctaacaacattagggccagcatggcctaatcttttgtgccatagatcaaaggaattacatgcagaaaacagggcaatgggtgagttttgaactgaagattgtgaatttagatggacattggtgaactgatagaggtcatctttaagagtgcccttgagaacaattttcttgctgacctgagattttacaaaacaatgattaggatgaaattcaaagaaaacattgttatccttggcaaattgggagacacttattaaattcttggtaatggaaggcacatgtaaaagattagcaagtttaaaaatagtgggtgagtgagaagttgtgaaagaagaatgaccaacatgttgtataggcatacatgcaccattgccaacatgaacctgatcaaaaccattgtattcagaaccagatgagagattaccaaagtcatgcgtgagatgatgagtagttccagagtcaggataccaagctgtgtcaatgagagatgcgggacctgctagataggatgtgggatggtgaaaagaaggaggtggaggtggaggtggagttctctgattctgattttgaggatactgttgctgaggtccttgaggggtgtttagatatgtggtgtcatagcggtagaagcatcttaatgcaggatgaccatgtttaccacaaatttgacattgtaatcgagtttgattccaaaaagaacctttgtttctattacctctgaaggtacgatcccctctacctctgcgtccacctgagaaacgacctccaggataatcttgtgcagtgtttcgttggctgaagttggcttgaacaggggtaatctctgttttcttgaaacggtcaagcatattttcttgagccaataggaatgcttccaattcaattatagagaaaggaggagatctggacatggcagatgtgattagaggagcatactcttcacttaatccatcaaggatagcctcagagtgttctgcatcagtgagaggagctccaacagctcctaaggagtcaactattttcttgatttggagaagatattctgaagctgagcctttctttttgatagactttagttgatttttgagttgcttgacctttgcctgtgtgtgtgaagaaaaataagtctagagctttgtccagatttcatgagcaaaattgcatcctaccattctgtttttgaatgccatgttcattgatgagaggagccaagaacaagaaggttatcttgttgatgccagtgggtgtatgctgtattttccattatgctttcttggttttctaatgtctgtgcagggactttgtctttatcaagatggtcttgaagattgtgaccatgaatggaggctaaggcaagttgctgccatggcagaaagctctcttcatccagtttgtctgcaattgggattgaaaaagatttcatgatgatttttgttgctggtgtgctcatgttgcttgtctcagaccgaggagaatcaaggatggagtccatggatcgtagatgtgctctgataacatgaaaggtattaggctcacatagaaaagcagcaaggaagacgcaagtatacaaggatgaaagaaaagaatgaagagaaaatattattgatcaataataatctttgtacatgagaaagatatatatatatatatatatatatatatatatatatatatatatatatatatatatatatactcccaaagtacaaaaaaattatggccaatgttgtcttcttggagagctgtggcattgttgggtctcatcttgcaatgctactcaaacaacagccaagtattctcatcacacagcagtctactataggaaactatgtttcgcgcactgtaggcatgggtttccatgaaaattcaagaatgcttgtccatgtaatccattcaataagtagtttgagctataaaacatttaggagaaagctggagctaattatttgtttcgatttttccaatgaggaaggcctgcaatgtttagaagatcccccaactttgcttagaacatcagggaagaagttgaaggttggaatggaattcttcttgcatacacttatgatgcccaagtcagtcctggttcatcagccaagggttttaatgtatagcatgaaggatcgcgtgcttccccgatatagagtcttccagctctcgataaaaaaaaaaaaaaaaactttgcaggaaggttcccaggtatatttatttgttgtgcttgtctgaggaggtgttcttggacaagtatatatcacagtccagagaaaaggcagaggaattattagtagcatacaaggttcattatctggaagcatagtcatatcttcaaattctgtttctgaatattctttacaggaagccttgggcaatttcgggaccacaaaccatgttggtgcttatggttttcacctccttcagttatcccctcacccttccaattgcaatgagatatatgttctgatggcaacagattcttctccctagttttcttctgtttctccaatttgctctacacttctgagtctgcaatccattgtcaattatcacagtgacaaaatggtggcaaatatgcatttaatatttaaatagaagtgtacctgttttagcaacaaaaagtgtttacttacattaccattttgtaattgctcattttcacaaaacgctacaataaatatttatgagaattactcataatgtgtcgttctgttaatttgtacctttttcatatatgctcgtagtcaaggttttaaaaaacagtccatgaccacaatttcagtcacaacttcaaagttttcgggggtgtctgtgactgtaattgctattgcaatgactgtatttctccacaatttccagcaatatcaagaaacgtgatgaaatcacaacctgtatttaaaacttcaatctagtcagaggctacagcagggtagtagtgatggctttcaccaacagacattttaccctgttgatgtttcctccattttgattttaatcattttttaagtcggttcgatatagtcttccctgcaccatttgttacttctctctctccctcttctttttttccttggggagaacattttactacttctattatgttggatggagacatggagttgtaagagccgaacttcttttcaggtcaaacaatgatagttatgacttatgaatatttttgcagacggctttagtcctatcattatcaacagggaagttgtctgaattttcagcatattttaaccattgcaatcaaacgttgacctttgcaaactgagcttatatttcaattcagtacgaaaatgtttcaattttaataagaaacctttactggggttcaaatcttgatgagtttatgggaatttttttgcctaatcaatacgacctatatgaggatttgtaagcctttgaagacatttagtcaacaaatttctaagtgatttttgtcatacgcgtaaaatcaccagatctatatagagattttataggaaagttcgattaatgtttttgatacggaattaaaatcaacatgtataagtataacatagaaaagtgtttgtaatattttaactaggcatcaacttgagctcgaaaatacatgtatgaatcgccttacaatgattgaatcgaacaaccaaaaaaataaacaaatatggatctgtcaaacagaataaagaattacgtcaacgctcctcgccgccacaacctcttggactctgcttgtggtggcaccaccatggtagtggtggtcgtgcttgtcggagaaggatggagggtggtagtacttacggcctgtttgggggcaattagagtgaaaccttgcagcaatccggaccccttggtcaagaatctcaaccagcttccccatgcagctattcttcaaaactcaaaaaaccattcaccctcttttctattcttctctcagaatttcttagaggggagaaaagagaaagggtgtgttacatgaagacaagagacatgaaaatggaaaaagagagattcttgattgttgattgttgtgttatgggaaaaaccagagtggattgacgtatatatagctggtgccttgccatttccactttctgcctttctgaggcagtgccgtttcttagtattttctttttttaatattattgtcgacttgttcggtcagaaccgcgtttcacatcatgcatatgtttgtgcatcctatatttgactaattatttgtcttttgatttttcttttcttttaaaacattgtatactttttaattttttttattgctttgttttatcgtaattaaggggggagaaattgaaaaaatagattgggtcaccgccaagcagctgacttaattttgaaaataaaaatggttaaatataatctgttactctataggtcatcttgaagattttttaacgtttagcacgacttttttgaaaatttggtcaatctgaattctaatttaaatgcttatttaatagttttataattccttctaaattaaaaatagtatttgaatttttttttcctaaacgcacgtgtcttctgacctattgagtttagaaattaatataactagttaatctaattcaaaagaatttttcacgtatcaaataaattgttttatcaataatatggatattgtgaaaccttacattattgtattagtcttatgtgttaaattatttgagctgaagtagattaatttagattacgtattatttatagttttagaataattattcctaattatttattaaaactataatatttgagtttataatggttaaaatcaaaagtattttcaaaattaaaaagagaagaagagagaaacagtaatagtgtgcattgatttcaaaagatatatctaatgtaatatacaaccttatatagtattgcttctaatatttaattaagaattgaatacgaaattatgaactaactaatcataaaaaaggactacaatcataaaataaaataaaaaatgaacgaagtcagttaattagcttgacttttaatgaaagagtactataaatttacgtgtttatttgttattattagtatataatgtaatatgtgtggaaaaatataaaaaagaaaaggttttctttagtggtgtattatttggagtccataaaattaacatgacaagaacttatgttaaaatatggatgttagtctttttcgtcaactctaatataagagcacaaattttatccaagctatttatcaaattgtatatacttatttatctattagaaataaattatttataagtaatgaattatgtagaagagttattatgtcattataataatatttacaatcaagtatccgaaatttttgttttttattttgcatgtccctccttatattcttttcgtaaagggtagatgtaatccaatgcaaaagattataaaatctatctttattatgtcgattttgatttcaatcaactctaaattttgataagtgcatatgattttttattcaaaaacataatactatgattatatatattttttgtgaagtaaatatattagcataagccacaaaatatgttataaaaagaagaaaaaaaaataagaactgaaaacctaaaaaagaaaatgaagaaatacaagctgattctgccataaggcgttaacaggaaagttatgaacaacatcaccacgcttggcaaaaatatcagcaatttgatttgcttttctataaacatgatttcacaacttgacatattgatgaatattatgaatagacatcaccaaattatagcaagaatagaaatcaccgcaacctttagaaagaaattaatggcattgtagtcaaagtaagcaactagcttttgaaattttacactctaagccagctttaacccatgtcaaatattccatagctgtgactctaaaatagaacaagaacctaaattaattgcgtaacaaaacaagaagacacggtctctgttaatatactcttccgttccaaaataataatttctttatagctttttgttcttattccaaaataatagtttcttaaaattaattttctaaaaatatgcctggatagtgtaattaagaagatccattaatatttgcattaaaaagagatatatatcataaaaataagtaataagtagtagaatgtattttttattggtggataatgagatgatttatgataaaaaatagttgaaaaattaagcgtattttatctaaatttctatcaattcaatattttttaatcagtatgtcgtaaccttaaaagactataattttggaatggaaagagtatgtcgtaatcttaaaagactataattttggaatggaaagaggacatgtgttattttttgtataagtaggttaaagaatataataaaatgaaaattaataaaatattcttacgcggtttctagaaagttacatgcatcagtataaaataaaaataaaaattatatgcaccaacctatttaaaagtaaataaataataggaggatactttagtggcttccggtaagccacacaccaaaccactaaaaaaaggagagagaagaaagtcaggaacacgaaccttatataatacacaaagcacgtcaaaatgtgcctttcctttcccttcataacccaaaccctaacgccgttggttcttcccgccggcaaccatttcagtggcttcttccgccgtcgccgctcattgccattcctccattttctgatcaggtccttattctttcgatttcttctatttcgttatctgcggtattctctatacactgtctcgcctttgctttctagttcctactgcgactgtgagtctgtcttcccaatttcccgttcccgggttttgtactactctcgaacgggaaattcaacggagttgtgtttgggaatcgcgttttatcatctcatttctctcgccattcacacacttcttcatttttgcgtttctcttttctgacgctattttgctttcattttcatttaacctaaccgcgtttatttttcttttcgttttcctcagttaattctcgtgtttcttcagagcgagcagaaggatttcagcattggagaccgaatcggggtgagttttaatttcaatgcttctttgttaggtcaaatttgttactcaatttgttttctgttgaaataaacaagtaacgtaatatattgcttttattttgaagtattttttattttgaaagagtaaataatcaaattagtgccaaaatgatacatcagtaatatagaattgtgaaatttacattcacggtccccaaatatgtatttaaagctttttgtttaacttacattggcctcaaagcaactctgttattgctttcttgcttaattgctttggaaagtgcaccagcagggaaccaaacatgctactattcgttgttgaattgatctctcgatatgtgttctgtcagagtcaaattagtctctgagatttgtgatatgaggactgatttgacccaagaaatacacattcaagaacctttaagcataatttctatcattcaggaactgatatgacctacgctatatcattgaaggactaatttgactatttacttaattctttatatggaaaagaaaaatagattttggcacaaaaaaaaaaaaaaaccccaagcctctccaaatggccattatgtttgaatggataaaacaaaattgaagcaaaaattgcattccgtttcctttagtatatctgtaaatgacctcacgatggtttgattttctgtagtttaatattatggtttgcattttttggtttgaccaggaagaatgaggcctacaatgatgcttagggctctaaccaagcagtttcttggaattgtaggcgatgcagcaaacactgtcgctaagaagccacccccgtctcctcctctgctgtcacgcaaaccagcattcattgatgcattcttgtacaagatgaagaagaacccaaatcttttgtcgaacaagaccatttggtcacggagatccactgtcttgccagaatttgttgatacaactgtcaagatttacaatgggaaaaccactattcgttgtaggatcactgaggggaaagtgggtcataagtttggagagtttgctctcaccaggaaacgcaagaccagagaacaagccaatgccaaaaatgttaaacaacttaagaaaaagaagtgattctttttccttttgtatttttggacaaaaaataattttgcggatattttaatttctgcaattatttacatcaatctgttctttcttaggttctctagattgtatttgaagacctaacaattttccctgtgagaatattggcaacaaggattttgatgaaatttgaccgcgattgtagttgaattgcttctttgactatctgaactattcatttcatgttataatttaacttgtggatgatagatcattgattgatcaatttatcctcatcacttgtgaggacctgaattttatcgtagtttgcttatatgctgaatgcccctgcaattgcatagggatgtcatcattatgtgatgtgcctttgtgaccaggaacatgattctggaatgctccactgcaagtaatatgaaagttatgccagtaattttttcatgtagaaacctgaggccgggattgaatgcccggaacacagcataatcattaaatggccaaatataatatgaatctgagaaaaactccacactcaaggttgcttcactaaagttttgcacttgacttataatgcattacttcttaattggtacagaaactggtgtccatacttttagtaaaagtttatcactttccttaccaaataggttctacaatgtcatcatggtaaatccaaaggccattaaatgttatctgtacaatttgacaacaaaatttaaaatagggaatgaaattatgaaaaaatgagatgtaactaataataatttaatagaaattgatagagaaaaataagttataaattattgtgaataagacaactcttaaaagttaaaaaattgaattaattataacgtgttgttatagaacaacattgaatttcaccacatgcatttgacaaccaaaaactaaaaaagaatgttttataaaagagtaatacgctaatcgaagggggttttgtcagcttaaagatcccctaaaccacttaaaaacttttggtttttcaccattgaatgatttaatccaaaaatgacttattgcacagcaatcagtaagcaatccttcatataaaggagatcacattttgagaccggctgttcactgtgggaaaaaaaaagtatttacttcaccaggatgtgtcctgtaacgctaacttcatatacagaattgcaaatattgttgtaattctatcaaattccacaacatcacaaaatgactttaattactctgcaacctagtgtgatcaaactaccctcatttgctttgttgctgtcacagacgtagctctcaacttacatttcattatcctttctttctgcaacacccgaggtccgtttggttggagagaaaatagaaggaaagaaatcagaagaaaataaaatacgattatcgaaacattttcttctgtttgtttgaagagaaaatgggaagaaaagttattttttagttacaaaaattttaatttttccttcatttcatttttctttcgattcaaattttaaaattttctttccattttctttccttctatttttttccttcctaaccaaacatagggccaaactctatgagtccgtttggtcggagagaaaatagaaggaaagaaatcgaaaggaaagaaaacacaattaacaaaacattttcttctgtttgtttggagagaaaatggaaagaaaaattattttttaattacaaaaatttaaatttttccttccttccattttccttccgattcaaattttaaaattttccttccattttccttccttccatttttttccttcctaaccaaacatagggtatactttcgatgcctttatttctccacgaacaaaatccgaccatagccctaaagaataacatttcacaactttctttattcctcaataggcatgggctacgaccagctctcctttaagaacaaagaaaagaaaataactgaatggaacagcaaaacgtagaatacgtcattggtgcattgtccaaaccaaagtccaaaacccgtaactgtcagtcactactatcaggattggacagccagtctctgcagatgctcgagcctcaaagacaacttgaaggctcacgttgtcagtgaagattacatctgaaccagcagccatctcatgtgcgttattgtatgttgctgagggattcagctttgctaataaaaaaaatctagccttttcaacttcagtgaaacccaactaaggttctcatcaagaaaaatctaaacctaccaagcaaaatggattaatgaaacaattttctgctcatacattatgaaagtggtatttcatacatcagcaacactcacaatactagtaaatttcaggaaaaggaaacaatgtaatacatgtacttacttgagaaccatgttgatcacatactaccaatctaggaacagggaaacgctctccaaatatgatttgagatatacccctgtctccattttaagagatgcaagtctggccattactactgcagcagtctcttggtcatatccttggaccaattcctaaagataaaatatatattctcttttctaataactgcattcttcttaaatgatgaaaatgcattaatggactgaaatacagcagcatgctaaatgacaatatagaaaagcataaccctaaaactattattttttcacatatattcaacaatttttgtggaaggagaaggctgcatacaattaccctccaccatacatccacgatgtgaggagcctctggcatcaggatacattagttttttttatatatatatatatatatatatatatatattcatcaattttcggcttgtccttccttgtttgttgtgggcaatgcagacattgtgtgcaatgcacgcacacttgcttggagacaccattttagttatatattatgccaggcatcctaagtttaagctgtatttgagaaaggaaagagaggcaactttaatttaatcccacacctaggtagtgtgacaggtatgacctcatgtaactacccactgaacaggtggcaaacatggaaagttatggtgggcttcagctaagagggaaaacaaaaagtggtgagaaaggagtaaggacagtatgggagaaccaggcctctcaaattgcctagatatattgtattttcttttctgttctctgaagaggaagtgaggaaaagagtttctacaagtttctctgcaaccgtagtcctctgacatcagcagtagaatttcagtgacaatgcagcactattcagctatttctgctccagttctatcacattacaatatgaccttgccaactatagttatttctatgccaattttgttatacacgaatttttatccaatacttacaaaatgcagtaactgaaacaggtctgtttctattaaatggatataaaaaattggtcattatttattaatcaatttaacaattaaattgtcacaaaaaaatggtcccaaattccatataatataaggtattagccataaaaattcagtttatattatagatgcatgtagaggtaaatcattagataactatgccaaagtttagaatcagaagtgacagcaaggaaagagtcaagagaatattatgataaatgtagaagctacaactatacttttgacaatgagaaataaactaacatttagccacaaatataaaaacaaacaactgaaactacctcagagcaaacagcaacatctacccatcttctagttactatggtgactcgaagcactgattgaccgtttgggctctggtaactgcaatacaacatgatcaatatattcaagtatcagcaaggagggggaaagaggcatgtcaaaaatagttatttaagacaactatataataaagatttaacacaaaaatatttatcaaactaaaataatatcgtgtgacttacaacttcccggtgaaaaatagaatttaaatataaatagattctgatatccaaatcaaattaataaaaataaaataaagaaaaaacttgctcaacttttagttagattcaacgtcaacagtatttttaattcgaagttaactaaaattagtaataaatgaatccaattatagataaaaataggataaagaaagagaaaaaaaatgtaaataagataaaaaagatgaaaaaatttgtttataaatgttagaacataaattatattttttataatttataactatattaataataaaaattattttatttaatatacatatttttagtaattctatttttcaataattattttttaatgattaatccattatttttagttaattaattttttttcttattttatttagcttttaacccttttttttatttatttaaaatatataaagaggcacccctggtcatcataaccacaataatagtaaaaaataaatggaacgaacacgataattctggaaccatcttgacaaccttggattatagaactctctagacacactctcctcttccactcctacctatataaacatgataaccgtaaaccatttcttgtgatcgtgtgagaaatataaaaaaattattttctgtgatcgtgtggttttctgagttctaagaactcacctctttcgtactcatttattcgcttgttgtgggaagccatggacgaagacttcgagttcccaagtgctggcaacatggaaatgcctgaggaggaagagtttgagagtccgatcctgaacgtcggggaggagaaggagattgggaaaatggggctgaagaagaaattgctccaggaaggtgaaggttgggacacccctgacagtggagaccaagttgaagtgcattatactggaaccttgcttgatggaaccaaatttgattccagccgcgataggggcacccccttcaagttcaagctgggccaaggtacgcattcttttttctttcttttgttttgtagaggcggattattgattttatatagagaggatttcaattgatcgactatataaaattctttgctgagtgatattattctttgcttaaaagtgaaaaattgattaggatcaatttagttatgggaggtttgagtaattgatgaagtattaagttgaaattttgttactggtattgtctgtactctgtatgtagatgaataatcattcattgattaaaaaaatagttgttaatgttatatttacatacataataaatcacaaatgtaatcaggatgaaagtcttttaatttatccttatgctggacatgaaaattaaactaaagtgattaatgatgaatgaatgaataactatagtatttaatgttttgtgacttgattaatgcagggcaagtgataaagggatgggatgaaggcatcaaaaccatgaagaaaggtgagaatgccctttttacaatacccccagaattggcttatggagagtctgggtctcctcctactattcccccaaatgcaactctgcagtttgatgtggagttgctatcttggacaagtgtgaaggacatatgcaaggatggaggaatcttgaagaacattattactgaaggggagaaatgggacaatcctaaggacctggatgaagtgtttggtacgaaactctatcctgtattgtctttgagattcatctgtttagcaacactttcagtattgtttaaagtttccttctttctctcttttctgcagttaagtttgaagctaggcttgaagatgggacagtcatttcaaaatctgatggggtggagttcactgtggaagagggtcagtctcatgcttcaaaagtttgaattttgtccttaccgtgtaacttgattctcgttgcaagtaacaataatatgacttttttcttttcttttatcatgcagggtatttttgtcctgctatggccaaggctgtaaaaacaatgaagaagggagaaaaagttctcttgaatgtgaaaccacaatgtgagtaagactgttgttatcagcaatacttatgtctacacgttttgcttgtgcaagtttattgacattcaaagtttttgcagatgcatttggtgagagtggaaggccagcctcaggagatgaaggtgcggtacctccaaatgcttctcttcaagtggatcttgagttggtctcgtggaagaccgtgtctgacattaccaaggatagaaaggttctcaagaagactttgaaggaaggggagggatatgaacgaccaaatgatggagctgtagttcaaggtacagttttattacaatattttcaatcccttctcttcctttcttcatttaaaggttttgtatatactggatgggatgctgaagagtttcattatttcttttgtttcagtgaaactgattggcaagctgcaagatggaactgttttcgttaagaagggctacgatgatgaacagccatttgagttcaaaattgatgaaggtacctctaacaatcatttaaacttcataagtcttgctttttctattactagttactaagttgtatgtttgatcgaccatgtagagcaagtaattgatggacttgaccaagctgtgaagaacatgaagaaaggggaaattgcattgctgatcatacagcctgattatgcttttggcccatctgggtcctctcaggaattggctaatgttcctcctagttccactgtgtactatgaagttgagctgctttcctttgtaaaggtgagaagtgagagaattatcatgtcttcttcgtcttaaactttgaactaatttgaaatgtaaaaccatttactgaaaatgggggtgcaggaaaaggaatcgtgggatctgaatacacaagagaagattgaggcagctgggaagaaaaaggaagaagggaatgttttgtttaaggttggcaaatatgaaagagcttcaaagagatatgaaaaggtatacctataaattccaaaagatcttatttatgtaacttggttactgacggttatgttgtggtaaaaatgaactaacaataggtgttctttttctcttgttgacaggccatgaagtttgtcgagtatgattcctccttcagtgatgaggagaaactgcagactaagacattgaaaatcacatgcaacctcaacaatgcagcctgtaagttgaagctaaaggactacaagcaggcagagaagatgtgcacaaaggttctttgtctgattcagcctaaatttgttctttttccttggctgaaggctaaatatattttcagaacctaaaagatgactgagtctagggtgcgtgagcgaaacaagtttagtgtgatgtgaggtaataatttttttgtcagttgtcaaatgcgtatcgcctacatgctacagtaacagagtcaaggactgcatttttttcgggaaaggtagaaattatttgaatcacctgataaagcaaaagcaaaaaaaaaaaaatgtgaaaaacactgaaaatttaaatagattaattatataaacacaaatagttttattttgtcaaattttatatttttttttgaatttgaatattcacacaaattaattattactaaaaattgaaagttcttttgctttttcaaaaagttaattagtttaataaatagaattttgattatgatgatcattttattatttttttattttattggtaagtctaagatacgttgagattatatactaaaataaaataaatgagacaaataaaagttagatatgaaaacatgagttctgatgaaggaaaagtcaagtacatattattctatttttactaattgctcagtctcttatgttgatggtatactttcttgtttgttaagcttaaaataggaatttgggtcaattgagttgaatgtagggtcatataggttttcgattatgtcaaaagtttataggttttcgattatgtcaaaagtttagaatatatatgaccctgcgtttaatttaattgacccaaattcctattttaagtctaattaacataaaaagagatgaaataattagtaaaatttgtacataatgagagagtgagccaaagtggaacattgtgtgcttggtttttccttcctcctaactcatgtcttcatatttagtttttatttgtctccttgattttattttgttatatgatatgacagtgtcaatgtaagttagacttatcaatagaataagaaaagataataatatgatgatcataatcaaaattctactaattaactttttgaaaaagtaaaataactttcaaacttgtagtaacaattaatttgtgtgaatatttaaatttgaaaaaaaaaagtatacaaatttgacaaaataaaactgtttgtgtttttataatcaagttacttaaattttcagtatttttcacatttttttgttgattttgctttgtccggtgattcaaataaaatttctacctttcccgaaaaattgtagcctgtaggcgatgtccagttatgcgcatttgacaactgaataaaaatcactacctttcccaacatatccgataaccacttcatcatctcatcttgatattgatgagatatttaaatccaacggtctaaattatttttgcatcagacgaaacttttcatttacgcaccctatactccgtcctaagagatttactttctttcctacgatatttatgttgtgttttttgtcctcgtattttatgaatgccttttttttattttttgcttgaagttggattcgattaactccaagcctacatgtgaactgactttgcaagtaagctgacttattagacaatgaaatatagacacgtgttaaaaactcttctacccgtttctctctcctaaagcctcttcttctccctcccgccacctcacttaccctcttcctaaaccatagcctcgccggaccaccaacaccaccgacgagtgcggcaaagtcctggtgttgtcatgattggagatttctgatttgggggctaggatttcaaattgggggtggggatttctgatttgggagggatttggcttggaggtggtacgtatttggttcaggtgtggtgctaatggtggtttaggtgtggtggtgatggttcaggtggtgacttgttttttttttttattattaatttataatttatagcaattaaaaatatcacaaattatgttattgtattttttattttttatataatttgtaatgattggaaacatattttagccttagccttagcgggattcaaaaagggaagagagtgaaaatagttgacatctgacttttgctttatcaagcaggttttagagcttgatagtagaaatgtaaaagcactgtatcggagggcacaagcgtatcttcatcttgtggatttggatctagctgagatggatattaagaaagcccttgagattgagccagacaataggtatgcttttgttctcaagtgttatcaacttgaatatatacagttcatatactttagttctaaataggtaacactgatacatggaatttctttttgtattaaccactgttcgatggatattatcagggatgtcaagatggagtacaaaattttgaagcagaaggtgagagaacataacaagaaggacgcgcagttttacggcagcatatttgcaaaaatgaataaactagaacaagcaagaacagcaacagcaaagcaggagcctgtgccaatgactattgacagcaaagcttaaatttggaagatacctctgtctgcggtcgtctctgcatacaagtaccataatagtacgtattccaattgttgtgtcgtctgaagtcttggtcacataaatagctttctcatatcttgtgtgattttcatatgaagaaatgcatatggtctaggttgtcagttgtctactgatggctcataagcatattttcatatgaagtacgtattcaagctatgtatactgatggctaataagaaatgaagtgaagcaagttttggcaattctaaatgtctccttgttccctgaatcactgagattttcaattatagtttagtttatgttattgtttattaaacaaaggattcggtgtcaagaattttctaaaattgcaatgcaatcaactacgctgacacggcaagccctcgtagctacgtatcatatatttttctccaggacttgataataggtattcaaaaatttaggaggcagcttgagtaacatactataggctcttttcgctactctaagcctagtttgtaaacaaattattagctccttcttcttctaccgctacaaaatcagaatgcaaccgtcttgtctaccacagaagtcatatacagggcttttgcgatcacatcacgagacgaagtggttttatgtgaaacttttcgaagaccaaggtgtgaggaaatttaggtcatcttcaatgggtattttggagagaattttaaggggaagattttgttctttcaaacattctcaaaatcttcatatattagaggtttgattcttataagataacttcgaaaatctctatgctttttaagaaaatcaattattattattctctttccctaaataattctggcaaaaagatgggaagaaatagatcaacaaaaaggaagaagggaatagatcaacaacaaccatgaacagtccagaaaaaagttgagtacataataatttaattttaaaataaaacacataacaataaaataatcacaaccgtgacaacttcgggagaaaaaaggacattgggttggtgtggatcaacaaccacaaggaatattgaatagtccagaagaaagtacataataatataattttaaaacaaaatacataataaaataattcaacagtgcatagagacatggtggttgattcgtgatggccgaagacgattccatggcctgatcggaagttccagagcaccgcgagaaatgtggattgaaggggacatagcgaagtgtgtgggaaagaaaatagaaataaaaaaagaaaaagaaattatattgataaataaatattttaattaaaaataaattttgtattttagttataaatttttaaaaataaaaaattatataattaattgtttttaattattttaaaataattataaataaatattaaaagatgagttttttttagattttcaaaaaagtttaagatcttaaaataatagttaccattaaagtaaaaaatttaaaagatgacaccataagatccaaaaaaagattattaaaatctcaaaatcaaattgataaaagactaaacagtatttttttattataatagaaaaagactgaacaatttattagcttcaagtcttccattttgagtcaagtgttaatctacgtagaatttgagtaaacaatttaataacacgtagcctcccaaacataataaatttggccgtttagcaaagcaataaacaagttctcctggatttctagcgacaatgctgttgtgctcaaattcttgcggaacatttctatgatcttccaccatgggatttgattttcctcacattttcaagctcctttcttgtacccgatagtctctgcaatgcatttctttcttcaacctcaacccgttccttcgaaactgctttctactgttgagcttcatccataaaatgctctgccgctgaaattttggaagtaggggccaccttattccgatgagcttcgagaactgtcttctcatcatttatagcaaaggtttgctggatggaatatataatgcatttctttcttcaacctcatctttaaaggaaggtcggacaaaagttaaaagcagccaaaaggcaaaagctgcatatgaaacgtggatcaggtcctccttataacaggcaaagtccttctgaactaagagcccaatcataatcgcaagcaaatatacatgtagtatccactgtcgccattaccaggttgattagatttatatgttctctagtcacaaattcctttgtccattattataatgccattcaaataccctagtatttctgaagcaggttagatctcatggagtttctactctctgcttatccaacttcaaatttcttgaggaacgggatccccatgttgttcattgaacttaatatttagctttgttttccttcccaacggatttgtaaaaatgcacagctgcactcatgatgaacctgtcgccttttgttgattcacaaatactttaaaaaaagttgattccttcttccacatatccacatttcaggtaaccattcggcattgttcggtaacatacaagatcaggaactaaaccaaaagtttatatatagatcctcataaaccctcttggcttaatcaatcaatccagcttttatgaaggcgtggagtaaaatattaaaatggacacaagacagtggaatgcctttgctttgcatagcatgtatggtttcctcggctttagaataattcaggctccttgtatatgcttggagaagggagagatatgtgaaagaatcaggcaaataaccttgcctctgcatggcctggaaaagtttctccatttgatgaagaactccagcattagcatatacattgatcatgatattataggactttggttaaatgaaaaactatttttctttaaaggaaatacatgtttatcaaaaatctcaacagatgtaaaggtaacattaattttttttttaaatatcaaaatgagtattttgaaaataaaaaattaaattgaataatttaaataaagaatatacaaaaaaaaatatttaacctgtaacatatttttttacgcaaaaggtaattatgtcatttcatccatgataaaagtgttaatacaaataggaataaattcaaaaacatggtggtggttaaaatacagtcgtgatagccttgcgagagaatgaggaacccgatttgcttgtgttcggattaaacgcacctcaaggttatgaaactcaagaagcttttgtctgcatctgtgaataatctgcacgtcttagctttgaattatcgggtgataaggataaataggagtcaacaacttgtttgcaatgaagctctataatatgagtatatgacgttttgcaaattcaattcattctaattttaatcaaacttaattttagtcccgataattttaaaatcaatcaatttaatcttataataaatttaatccttatgcatcgatttgttgaggaattaaacaaaagttaaattcacctattttttaaaaatatagaaatcaaattgattgatttaaatgacacgaactaaaatcaaatttttaatgattaaaaacctattttaaatcttgtaatccatatctatatattaatacattttattgcatgatttttactttcttttttatctccacgagatataaacatttaccaaatgtaatcacttatgttcatacactttcacatatctttgtgatacatttaatttatataaaacttatgtaccaagaaagaagaaaatacatctttgtaataaaagcaattgaggtaattttacctaattagaaaattatggtagtaattgccttttgtcattcttcctcatcagtcatcccctttactggctcaggaatggggctcgtgtaccccttggaattggctgagtattgttgaacatagccatgcacgtctctatagcctttttcagttagaattaacaatcgtgataataaattaatcattagtagtattaatgattggtttgtttttacagaaagtattaataattaggctagaattacaagttacaagtagcaaaaactacaaatattactcctttttccacctgatttatctctttcgtattaaaattcacctaatttatttctttcgtattaatacgaactttgttataaagtaatcattcatcacaagagtgaggcagaatacaaatgacatgcaaaattttactctaactttatatttgatagtttataggtcaaccattggatgaaacacaaaagatacgagaaaagacacgaaaaataccaccacaacaaaaagcttgagcggagtctatatatacacgaaaaaagtcatctacttattttattatttactctatctcataattatttttaaaatctgtaccatcctaatcaccgattgacctaataaggacagcaacggtcaacgctttagtcttatctcaaagtcatgtttatggtactggtacaaacctacttaggtggtagccgtcgagatctaaggtaacgactagatgataatgtgtggatagtcacgcatgggaatatcagaattaatgaccctagacacgataagggatataatgtggaattgaactcagacgaaagtaggttacacatgtacacttaaatgttctaactagttcgttcaattctagttctacgaacgatttatattggaataaaattaaacatgaaataagtattatacattattaatatttatctctcaacaacaaatctaatgcatgcttttctctcaaatgtatttattgttgtgaaagtatgagctcatatcaatttttaaaactttgatctcaattgtatgcaaactgcatgtggagtatacgtggaagcctctcagattagtgcgagcctatgtgtcagtttgtcgaaaccacaccaagccaactattttacgcttggcacactcgatcatgactagattcgttattgctcctgtgcactgtgctgactctctctctcgcattgccctatatcaatcatatcaccaacacaactcgattacgatgtgatctgctcccaaacctaacctaacaacaaaagcgcacacacacacacaccacaccaacaactcgaatacggcaataacattgaacaaactaaaaagaaaaaagcaatctcatttccgtccaaaactcgcatccgaatcgcgacacgcacgcggttttcgtttccccatgccattcaccttctctcggttagtttttcatgcgtatccaaacacctatttctccctttatataaacgacaccgtatatgcaactccatcatcgttctaaattaattctaacaggttcggcataattgagcgatcgatgacggcgttgataaggtcaccggcggtgacactggcgatcctgacgatctcggcatgcatcgcgtgtacggcgtcgtacgggggattggtcgggggaaggtcgaagatccctgacgtgaaggcgaacaaggaggtgcaggatttagggcggttctcggtggaggagcataaccggatgctgaggcaggcgcagaaggaggaggaggaagtcacgttcgtggaagtggtggaggcgcaacaacaagtggtgtctgggatcaagtactacatgaagatattgaccacgcagggtggcgacgttggagattccagaatattcgaatccgttgtggtggtgaagccgtggcttggttccaagcagcttctcaacttcgctccttccactcagtgaaatatgatcaatttcggttccctttcaactactattatttaactcataataacatgcttaatttgtttattatgctttaatccttctaatcgtagtaataccaatacatcttgtgaagagagaaataaatgtttgtagtttctgtttcagatatgaataaactagtttgacatatttccattgttttgaatatagagtttctctattttttttttttttaatttactatggacatattttattttagtgaagtgatactttgtacaaatatcatttctctaacttttattatcatttataaacgttaaacaacattaacatgaagtaatagtaagaaaatgcatttgtctcaagaaattagaatgtttgagaatcttaggcgtgtattcaattaagacgtttattttatggacaatctttttgtctcgggaatttatttaatttttcctcataatataacgtgacaatgacaatgttatttttgggttccttatatatgtggtcaaaattttttttagttaattattaaaattgactgtaaatgttttttatattctcataaataaaacacgtctgtttgattgagttattttttcttgagaattatattataattattaaaataaatctcacaatttctaactttgcataaatgttaattaagtttcctatctaacaaccaataaaaaaaactggaatttccgaagtcggtaattttcaatttcttgaaaagttaatcggtcggaaatttttgacaaatatatctgtcggtaaagtcttgggaaattttcagtaaaaaaatttcaacggaaaatacacttgtggatcagtaaaggataccatgaaaattttttacggttatatcggtcagaaatatacttgtgggtcattactgacacatttttcgtgtcagtaacttattttcattaatttctgtgctgaatacatcacagacttttctttcctctcaaaaacagaataaaataaaatagacataagtataataaggatatttatggatagtttattcgttcagattcagagaaatgctgaaatagaaacatatcaatgtatactatgaatatttattttattaaaagtatattaatatgttatttcatttcagcccattacatacacataacacctttcagtatgtaattgagtatctttcacgagtatatataaagagagagattccaatatatgcctattttgcgtgaatgtaattgggcacataggaatgaaagactgtagtaaagaatgaaatttgtggaaagagaaaattatagtatgtaacataaaggagcattgagagggtaggaaggagaatttgcttggatttttattcataaagagattcctatcacaagaaaatgaattttcatagttttacattcaacaatgaacggaataacttttatagatataataatggtattattaggagctgttttagttattgctcaacaaagaaaaatttggtaagacaatgtctcaattggattatggtattattaggaactgttttagttattgctcaacaagatattaagaaaaatttgatctattccaaaatgtctcaattggattatatgaaaatagctttagaatattggatcttatcaagtccgaaattaaatattagttacatgtgaattataacttaacattgaaatgaaatatgtttgaaattaattattttatcacttcataataaataacaaatatgagataaaaaaattataattttttttaccctatatttgtgggattacaaaaattatccgtaaaacaaatgttttcttagcttaggattattttttatgacaactaaattttggttgtattgcattaagatttttattgagtaagaccgcttctccatctgtcattattgaattgctgagaagatatatacaatatcttttggtaaaaaactacaggggatcaaaaaattgtacaaggtataatacttttaatgaaagatataagaagatattttattatttagtcattgagtaaaaactttttttaagaaataaaacttttaatgaaagatataataaggacctcttacaatagtgcaaatagcatttcacatttgagtataaaaagtatttcgtcaacttttcctcttcttcaaatcaaatcgtcctctagccaagtagccatacttttttttttatctaaaaaaaattcaaaataagagatctacaataatttattaattatattttaattttatttaaaaatttaaaactaagagagagacacgttgcgtcttcttttttctcccaatagaaataagaataataaacactaaaaacaaaataatattagaaaaaataagaattattttgaataaatatcattttggttattgaaaatgtgagatcacaataaattggtcattaaaaaataaaaaatttaaatttaatattttatgatagattaatcttataaataatttaataataatttaatattaaattaatttttaaaaatataatttatttttaaattattctttaaatattacaagataaaataatttcacaaattcaataataacaatgtgttatactttttatacattcactaaatttaaattttttattttttaagaaccaattttggtctcatccaattttatattattttacagtgacaataactttttttctcaatatagaaactagaaaataaatttattttctcagggacacacaagaaccgtacaggcgctgacattcaaatccctcccatttcccaacccccctaacggctactttcttcattctccgttcccttctcaacccaaaccctactttctcttctcttctccgttctgttctctgcaattgcaaccatgcttccaaaaaatccaatctttcggtgtcgggacactccttccgcacacgctttcagaaaacccagacccacgcgaaagcaaaaatccaagaacaaagagaaccatcctcctcctttcaattccccttgcccccaaaacctcccaaccctaaccctcttaagcgcaagctttccgaccattccgttcccccacctctggttccgccgtcaaggtcaacaaccattccaaattctactttcttcttcttcttttttaactagttaatttataattttatattctaatttctaggttattgtgagaatgaggcctgcatgcgatgacggggaccagggagattccatagttcagaggatttccagtgattccttgtccatcaacggtcagagcttcacatttgattccgttgctcacactaatgctactcaggcatgatacaagtttataattactttattattacatttaactcgttctccatgtctctctcgtgattttgtgatagtaactgggttgctgttttatcctccagttggatatttttgagcttgttggggcgcctcttgtagagaattgcttggctggatttaatagttctgtattcgcatatgggcaggtttctactttcttcccattttgcgttgcattgtgccgttatgttctcttgttactcgtgattgattatgtttatttttgaaaattttggatagactgggagtgggaaaacttataccatgtggggtcctgccaatgctttgtcagatgacaattcagcaagtgatgaacaaggccttgcacctcgtgtttttgaaagactctttgcttgcataaatgaggtagtgttgagttctattctatttgtgattgaatcctttgatggttatatgaactttgttgtgattttcattgttgtgtttcatgcacaggagcaaattaggcattctgacaagcaactcaagtatcagtgccactgctcttttctcgaggttgaattgaatgactgttgataatttctttctatgtccctgtcctgcttgaccttgttatctagtccttttgatgtgtgaacttgttttgcagatatacaacgagcaaatagcagatctattagatccaaatcaaagaaacctacaggtaaaatctattccattatagttttccctcgatcatgcttaaccaggttatactagaactggtcttttgatgcttattcagattagagaagatgtcaaatctggtgtctatgttgaaaatcttacagaggagcaagtgtgtacgaagaaagatgtgactcagcttttgataaaggtgtgcttcatcacacttgtataaacagttgtggtttccatttccctcttctatcactgttggctgttgcagtgttgcctattgcctatttagctattcaaccatttcattatgagtaaactatagaagtcaataaaaatataaaatagattttcttaaaggattaaaataagatccaaaaactatttatcaaggactagtttgtctttatttcttccctcacgctaaatggcaacaaaagtattagaaaaagattagaattatatattactactgcattagagaatcaggttcttaaatatgtggaagttgaagaggttatggcagcatataacatcagcaacaatgcttcatgaacacctagcatgtgttgttttcttaacatttagagtttcacgtgtcagttgtcaaacatccatcaatcaacaggttgaaacatttattttttaatgttctttcaccatagaatgaaaagtaaaaacaacatttaagggtcatatgttgtacatgcctcacttgagtaccccatgtttaaactaaatttgtcatctttgaaattacactgaatgagtacttcattactttttttaacaagtatttttgtaacaaatgtggcagagcttcattttgagcatatatgactcattacataaaaacaaaaatttccattaaggtagaaccagttgatttaatcagtagtaggagaaatgaaatgctgaatttctctcagtctgacttgaatagctctctctcttttcgttttttagacaattgaccattcttatatgcttgtaattatcaagtttttcctttccattctgttagggccatctcttctgtaaatgaatacagcccaatgtaactatctattctagacgaagaagagtaggtagttagtgggtattatttggtctgttagtcagttagaagaaataaacagagagctgtaattgagaaataaattatatatttgtcgagttgcacctgaggcagtgttgctctgtggaggaagaggatttcctttgaggagagtcatcccctgatttcaatttttcaatacagaagagctatattttgtttcctattctctatctccattctttataattttgtttctaaagatctcaagagcctaacacattctaaagatctccaaatttcataattgccatggttttcctttgtccttttctcttgtgtttttactattatatacctttcattatacagggtttgttaaacagaagaattggtgcaaccagtataaattctgaaagttcacgttctcatactgtttttacttgtgtggttgaatctcgatgcaaggtgatgcactcttctcttgtggcttggagatagtttttaataatattagataggaagggcagacattttacaatctttaactagataaattttaggagaaactacatatgcaatattgaaatgtggaacctagcaatgaacttttgcttttcagttcttctgtttttcaaaagaacttctgttggcaagatatttttcagcttcacaatagaattgtaaaaagagaaaagaggtattgaagcgagtccatattttcactttgcagagtactgcagatggtgtaagcagatttagaacaagtaaaataaatcttgttgatctagctgggtcagaacgacaaaaattaacgggtgcagcaggagaccgtttaaaggaagctggcaatattaatagatccctttcacagcttgggtatggtttaaaatgtgtgtatacattgatgtttgatattggaattgaaatacaaattactagcaatcacaaacgaaaaatagcttaaatacaaatacaagttgattttagcttataaagaagctcaatgcattttactttcttatttttttcctataaatacctatggagaattttatccaaacatggcccattttgtggtgatcaaagaagaaaaatttggtggcaaattccaaagctgattatagaagcttggcccaaacttcagctgagattctatggattcggtcattgctcaccaaattgcattgcatttttcagactcctaaaaatcctgtgacaatttgagttcagtggttctctcacaatctgctgcttcactcttgcattaaacaaatggagttagataccttttttgtttgggaaaggttctaagcaagagcctactactccatcatgtcccaactcatgattactgggggtggatgctttcaacgtgcctctctcttcactgcattttcatgttttcagaggcaagatcagagtgtgtgacaagtttatgtaatgtaaccttgagcttaggagagaggggggggggggggggggggggggatgttagttggtgggatacagtgtgttaggtcaatctagctcattgggaatggacagggaccagttttcctttaggtagttaacccagctggaagctacgcgcagcggtttggattcggtaaatgaatgttcgctatcacattagttgcaattgcattgtaatcatataagtacctgtaatctagccattttaaatcagaataaaatattactgaagtttactcgttctaaaaaattctctctctttgcatcttcaatccaaacaatctcccatagatttgtgattcccattcaacattcccctcaagctggtgaatagatactagtcattcccccatgatagatgaaatatgaaatgggcataaaacctagatgtgaaggaaagggaaaaagggaagttgttaggtggcatttattccatggtctgaaaattcctgactgccaaattctaatcatccatgatccaattacttactgaggttgaattgtactgcaggaatttgataaaaattctagctgaagtttctcagacaggaaagctgcgacatataccatatagagactccaggttgacatttttattgcaggagtctcttggcggaaatgcaaaattagctttggtttgtgctatttccccagcacaaaggtagatatcaaccattagtgatttgaacttctggctcttaatgtatgctggattatttctcatggcttaacattgcagttgtaagagagaaacttttagtacattgagatttgcacaatgtgtaaaggctatcaagaataaagcagttgtcaatgaagtaatgcacggtgatgtgaatcaattacgagacgtgatatgccaactcagggtaatatctcttcgaccatgatcaatcatttctttatacctggccagtacatttttttttcaaataacttataactgtaagcaatcaaacaggatgaacttcatcgaattaaagcaaatggttacagtccaagtgatggaagtcgaggtcattcagcagcgttgatcagaagaagtttgaatttgctgaagcctaccctcaatcacccattatcactacctcatgttgatgaggatggtgatgaggagatggagattgatgaggaaggtgttgaggatcatgctgtagttctccacaactcaaatggaggttttgctggtttttcagcccctactggatctattggttctcctagtgctgcaatgaatggtgacagccctgctggcggcatggttaaatgcaaaacatcccccatcctcaaaccccctcctcccagcctttcaccaacaatcagcagcagcaggaaaagtttgaggacctcattaaagcagtctccttctgagaataattttcatggtgaaagtgatttaggcacaaacaccgttaaccagaaatgcttgtctactgctctctccagccagacagctccaaatttcctaactaaaactgaaaatttagcagtaagcatccaccatggtcttgaaattattgatagccaccatcatggtgcatcgttatcgagtctctcattgagacccaaagattccaggctcattattcctgtggaaaaagttgatgtcggagtccagactattcttgatgataatgccgaaaaggaagattatgctatgcttacctgtaataactgtaaaagccgaatgcagcttgatgtcaatgagattgacaatagctcaaatgtgcagctggtacccattgattgcccggagtcaactgataaaccaaagaagcaaattctgaaagtaagtgcaaggatctcagcttcattttctggtatagcttaaattcaatctattacttttcatttctttctattataatgtaggcagtagagaaggttttggcaggatcaataaggagagaaatggcattagaagagttctgtgcgaagcagacttctcatataatgcagctcaattgcttggtaagattctgtttactgacaatcatctgtggtcattgttttgtcttgtattgtgactattttcaatcatatttgtagttgcaaaagtacaggcaagagagggaatgcaatgccacaataacacatacaagagaagataaaatcctacaccttcagagccttattgatggtgttttatccaccaaggagttcatggatgaagagctggtgtccctcacacatgaaaacaaggtagaaataaattattttaaggttttatttttatgattactatctttgatgcttatatttaggacttgcctgctatcaaaattcaacagcatttaaaggagaaccatgagcatcatttagaagttctgaagatgaagatagagttaaaaagagtacaagatgagttacaagagtatcagaatttttaccaatttggggagagggaagtgttgatggaagagatatgtagtttaagaaatcagcttcacttttatgttgactcttcatccacatccgcaataaagcaatatactccattgcaattgacttattcatctgaacctagtttggcagcaaacctaactgccattcctgatttaacagaggctagcactaaggcaaatgcaaatccagaatcaactgaagacagtgccaaagtaaaacttgaacaggaaaaaagtcaatggactgaggcagaaagcaggtggatttctctaactgaaaaactgagagctgaacttgaagctagcaggtcactagctgaaaagaggaagcaggaactagatactgagaggaagtgtgctgaggaactgaatgaaacaatgcaaatggctatagaaggccatgcacgaattttagaacagtatgctgatttagaagagaaacatatccaattgcttgaaaggcatagaaagatccaggatagcattgatgatgtcaaggaagcagcttccagaggaggagtaagaggtgcagactctaaattcataaatgcccttgctgcagaaatttcagcattaaaagcagaaaaagaaaaagaattggaaatcctaagagatgaaaatagaggacttcgagctcaactgaaggatactgctgaagcagtgcaagctgcaggtgaacttcttgtgcgacttaatgaagcagaagaaggtgtcattaccgcacaggtatataaagaatcaatgtgtatattcaaatttcaactgagcaagaatcaatgtgtatttacacataccattttaatccctatacataacatttttaatctctttgagtctctatcgtctaaactcataaggactaaaacagattaaaaaaagtatgtatattcaaatgtgtatttacacataccattttaatccttttagtccctatacataacatttttaatctcttttagtctctatcatctaaactccataggaactagaagagattaaaaggtatctataaggactaaaagagatgatttttaagtatagagattaaaaggtaaagtttgtacaactatagggaccaaatgaataaacctttattcttttatgctgaagtctttcactctcacaaatgaatttctagcaaattttatgtaagagaagcaggtcaattttattttgctacagctgatgcatacatatagtttaacctggtagtggagatgtttttgaaagagctgggtcagctcagttctacttgagctaattctataagatgtattaacttgcagaagcgggccatggatgcagagcatgaagctgcaaaggcctacaaacaaattgataaattgaagaagaaatatgacaaggagattagcacacttaataagctacttgccaaaacacatttgcctaatgaagaaatacgacctactttggatgaccttgtcatgcctacttgtgatgacaccaaggtgccgaacaatgttaatggtcaatttgagttattttgtaacgaagaggatagtgaacttgcaaatttggcagaccaatcatggttctcttcttatgacacatgcaacatatagattaatcttccagtttgtgttcattgttcatatgatttgttcaagaagaaaagccttattccactaggtgttcatatgatgatttgcgtcacaattgtctcttctttacatcaaagcctattttgatttagcctaccggggaacttttgcatttatctgttgcggggaatcaatatccttcagactttgggttgttgacattaacgaatcattttaagagcttgggttctaaaatgaactatgtgaggtatcaataccatttaggacttcgggttataaagaggtacacaaatgaactaagatgataacaattttagtagaaatgtcaaatattgtcagaaatttcaataatttgagctaacgcccacgatatatcttggttatgtttacgaacatttgttttgactcattgtagctcaattttattatgattttattgttaattcattttcttttaacctttcatttgtcaagaaaccacatttccccacatttaaaacgcaaccgagatttgctaatctatgaaagtaaaatgccaatcctcaaaatttgatttacattaagttatacaattgcgtgttcccgagaactttgaagtataaagtgaatcaaccatatatatggtaaaactgaaatacaactccgaccttgacaactttcaaaatttccagatcttcatgaaatctctccatcatccatctcagaatcatccccaactaaaagatcctcgtaatccaaagtaccccgaggctcaatctgcacatgcaagtcccccacttcagaatccctctgatccaaaaccaaaccatcatgatcctccacatcagactcatcatcactgcatacctcaagcttctcttcttcctccctctataacccacaagccccaaaaccttctccttccacagcagcaaggggcatttctcaatgagctcagaaccctcataagcctcagtcataacctcttccccctctcggacacatagaagatcccacagtgcttgagcagaagcctcatcggcttctgaggcatcacaagctcccaacgaaagtgtctgaggtgatcggtgaccaacctcttctcaatagtgaaactaagcagttcatgcataacagcaacagcccttttatatcaaactccaatgatccagccttaagtccacgagcatcagcatagggagacaaataagacatctcctgaaaattctgaatcttttcaccatagtaacgatacaccctctaagagttcgcagggaacttcaaaggaaatggaattgaaagcattcctggggtattggtagtttcactttcggtagtttcagttgtttctgtcaccacctttttctctaactcagtgattgcccaatcagggttccaagatacaagctccaaaaactcaaccccttaaaaagctgaggatacttatgcgcccaatggactctataatccacggcaacccaaaatctcttctgaaatgcgcaatcttctccaagggaagccttttgtccagcgacatcatgagaaacctcgtgacgtgttcggcggctttgtcggcgtgttcttcgatgaccctttgttgttccatcaagttctcggcttttggggtcatgccgcaccagagcacccccttctggtccttgtagagttcgaagaggttgggagttttgcggaggaaatcggagacatgatggggcttggggaggttgatctggcggcggtggtggtcgagggagcgaacgggaatcaccatttcgggatcttgcttgagaagctccattaggtagatgattttggaggctatttaccatttctcggttgtgacttcgaggtcttgaaccctcttcttcttgctccttctgtcttggaccctcttgctgctcactgtggtaacaataacaaacccttgttctccccaatcaccaattagtacccatcaccattaccatcaccatcaccaatccaatctagttctcattctcaatctcatttgccaaggtttgaacaagaaggccatatgttactgacggttgttgcttcctgcattcccagtgttccttactgcacttcccataccattatatttcctaatgtaattagttttacccgttgctgacaagtgaaatgagcccagcactaacattgttgggcctcggcaggtccggagtatgagctttactattcacacctcaatagttacttttggaatgatggagatgctcgtggttggcataccactacatgggaggtggacggtggtatggggttcaagaagttgcatctttacaataagacttttatcatgaagatggcttgggagcttattgcccagccggaggagttgtgggtgtaggtattaagggccaaatataagtgctgatcaaccattatctcggttgttaattgtgggatgcatgattcctaaacttggaaagctattacgtggattgtgggtaatggttcccgggtcaatttctggctagacaattggtttccatcgagtatgttaatagctctggtgggtggaaagttttggagttgtaggacttccttccttactggcctatccaggagattcttgcttatcctacccctctccctgctcatggaaggtttgggggagctactactaatggaagttttactgtgaaatcaacttattcaatctcaaccaattatcacagtattcatggctctaacaggttgcagacgatttggcagtggaaagatcctcatagaatttggactctcatttggttgattgctaataaaggccttaaagactaatgtcagaaggcaacattgtggtatattgatgatcctctgtgccctttatgcaaatctattgttgagactgaattgcacattctgagagattgttctgatgtcaaacctatttgggaagagcttggcagggatttttttcccttctatgcacagcttcttctctatgtctcttgtcgactggttgttggggaacacggcaaaggggcttcacagatggagattaatgtttggtattacggtggcttctctctagtatgccaagaactctcttatttttaagaatcaacagtggaatatgcagggagttactaatagagtgatgttacagaccctgtgtagccattggttggaccacgtacaccaactttataagtggaattccaaagatatgtgagtgaacgtctccctccaaaatttcctgagtttcccatgctcttcatcatagctttcttgttgggtgcggtttccttttctaaaaggagaaagactcaaatattgtaagccaactatgtgtctcatttatcgagttgagaaggtcaaattaaggcatatgaggaagggttaatcaagtaactatgcagcagctttaaggagagagaagagaagagtgaaggtttattattgtttagttgtttgatttactattagcatactttgtgcttttgattaagaacattttattcacagttaaccataatggaactcttagtttagtttatattagtcttaaaccgtacgaactcccgaagtttttatcctttattttgattttcaggttcttttttcccctagtctttcattatacaattctttttaatcatatatttatgggtttatacttacgagtatctttaaaatattgattaagaaatttttaaaaatattcattatgtaaaatataaaaaattatgaaaaacacaatttcacacattcaaatattttttttcttttaatttttaatcaatactctaaaaacatttgttaatatttacctatatttatttagttacacgtcacatttcttgcttgagacaagaaatttatccacaatgattatcattattcccatgatgctgaatacttttctcacctgtaataattatcttcacaatatcatcattttctttcacacttgagtccacaaaacttcctcgtcacattttgaaattgagaaatctcctcaatttttattcacttcaaaattatcgaataaatcttataaaaggagagagagaaaaagagaatcatcgaacaaagcgatatgacaggaataaaaatgtgtcactgcccctactcaattatttattcagatactgtggacagcctgtgaatcacgttggagtatttctagatattttatttttcacggccataatgattaagaagcacatatagatacagaaaaatgcagttaactaaatattatatcttggtgctttcatggcgtgcaacacagtaggatgtttctctttgtttttccaactcattcttttaatccctctagtcactttgggattctcaattgaagaggcaactgtatatgatctccaacttgctttccgtagaaaccaattaacctctaggcaactcgttgagttctaccacaaacaaatacaaacccaaaacccagttctgagaggggtgttggagttaaacccagatgcactagaacaagctgacaaagctgaccatgagagaaaggctaatgcaccagggactcttccagcactgcatggaatacccattttggttaaggacattattgcaaccaaggataagatgaacaccaccgcaggctcttttgcacttcttggctctgtggtgcctagagatgcaggtgtagttaccaggttaagagaagctggggctatcattttaggcaaggccaccctgagtgaatggtcacattataggtcgaatgatgcacccagtggttggaatggcagaggtggacaaggaaaggtgattgatttacttgctttttctgactttaatctgaccttgttcttgcttttcaactcaaatctatctgtctattcttgatgatttgcaaaagtccatagtaaagtaatctattatattattatttgtgttgtgcagaatccatacacaatgggtgatccctgtggatctagtagcggatcagcaatatcagtggccgcaaatttggtggcagtgtcacttggtagtgagactgatgggtctattttatgcccttcaggttctaattcagtagtgggcattaaaccaacagttggcctcactagtagagcaggggtagttccaatctccccattacaggacacagttgggtaagtctatggactatggtaatttcaccattttcttttgaacaaattacactggaatcttttgagctttttccgaaatacatacaatatcatttttttttctcttattaaactaactcctttaatgtttaaaagcattatactcatattctccttatatattacaccaactcccttaatgatttaaatttgaaaacaacactcctataatgaaagttgttataaacattaaacaaagaatagtattttgtgtaattcgaaaaattcttaagaagtattaatgtaatttgctatttctttatatcaaaactatatgcactttgcaagcattattacttttcccgtcaaaatacattttgttgcattaaatgtgtgacttcttgtgggctggtacagaccgatttgcaggactgtatcagatgctgctcttgttcttgaaaccattgcaggaatcgacatcaatgataaggcaacaatcaaagcatcaaagtatctcccaagaggtggctatgctcaatttctaaagaaagatggactgagaggaaagagattaggtgtcgtaagaatattctacggttttggaaatgacacttttatgcatgatactttcgaactgcacctgaaaacattaaggtaatgaaaattactatttgtgtcaagtattaattattgattgcattattcagtatcatacttatatttttcaaactcaggcaaaaaggagcagtgttggttgacaatttggagataaacaacattcaggaaatctttaatgatcaaagtgaaggcattgctctggcatatgaattcaaattatccttgaacgcatacctcagagacttagttacttccccagtgagaagcttggccgatgtgatagccttcaacaagaaacacccaaaattggttagtatgtaacaaagcccctcctatttacttgttgatgattaaaatagatatggtaaaaaaatttgctcaaaatacatcttgttgatgaatttcgtccatcattcaaatatattaaattctataaaggaaggcgaaattcatcaattatcaaatagaaataccaacattatgttctttttaacacgttctctactattatccgaattttatcagactaagactaattttaactgaaaattgatcacttaaatctcatttctgttggatatggctcatctttcgcagtcagatgacaacccttcttgttggcggggtcagcagaaagccaactggtcttttaatcctatttatattccccttgtaaaccgagtgacttgtaacgagtgacggtgaggagattataatacagacaaactggacgtagcctacattggataaaccagggtaaaatactgtgtcatatttctcttccctattctcttttctgtttttagatttgtgtgtgattgtcgatttccaacaatttcactggaatagatataataacattggtatggaaattgcaggagaaacttaaggagtatggccaagatctcatgttgatagctcaaaagacaaatggagttagggaactgaaggaagcagtgttaaacatggcaagattgtcacatattggatttgagaaattaatgataacaaataaacttgacgcggtggtagtacccttttcattctttgttagtatacttgcaaggggaggttatcctggaataactgttccagcgggatatgaaaagggtgcgccatttggaattatctttggaggtttgaaaggctcagaaccaaagctcatcgaaattgcttattcctttgagcaagctactttgatcaggaagcccccaccacttctaaagttaaaggtttaaccgttaaaaaaaaaaattgtcagaattatgatggaattgaatagccaattaagtgtttgtttaatgatggccgagactagttatgagttatatccatctaagaataaatttaagtattgtcatgtccttctatcagaaactctgacaaaaaactataatgtggcaataagattcgaagtgtgtctatttagctatctgagttcattgcagtggggatttttggacttgtattatgcttttaccatgaaataaaataaatcaaaatcctgaagtgctatcaaggctcggtttaataaggaaaaatggtctcttagattccttaaaagtatatacgagaaagagaaaaagaaaaatgtgaccaaaaagaagagaaaaatctctaaaaaaaaagagagagaaaagagaaatataaagatgaaagtaaaaattaaagtatgaaaaaaaatagttttaaacattgaaattgaattgtttaaatatatgagcatataattttttaaattttgttcacgaaagtttatattcaattaaccttcttcaaatatatttatgattaaattatactaattacttttgagtttttgtaaaattattcaaattctttttttaaaacatatacatcattcttccctattttttaaacaattagaagaggttagttaatatataaagaatattggtgtaattttgttaaaaaaattaagagaattattatagtgattgaaaaaacagtaagaatttatataatttcacaaaattttgtcattttcattcatataaatttatattgaaggtttgatacaaccttcataaaacttatttaaatttctatttacaataagatgtgaaaataagatacaaaattatctttcaataaatctatacgaatgactttttatgtatattaacattttaacatttaaaatattaataaatatattattttattttaatatggtatgaaaaaactatattgttataatgcaagtttgagtcatattcaattttataaaactaacttataagaaattattttttagtgattaaaaatgggttgaaaatatttttatacgtataggaataattaaaacatgtgtttgtttaacattttcttatcctaggaatgtataataattactaaaaatatctttattgtgttaaagtttgtttaaaaaatatataattgtgtccaaataggtataaatataaacaacgcacaggaaagttccaacaaataatgccaaaaaaacgtcactacaactcatcacggtccctttaatttgcatcctcacgctttaaaactccagcctcgttgttgccacaaaagtacatgtacacttgatgcaaatcaaatagtaaaaaaaaaaacgtaacttcaagagaatagtcaatttagagttacggtgttaataatataaaaagttagaatacctttttaaaaattattgtgaataacacgcatgaaattgacacaggaaaaaatgggtgaaaatgagaaaaattaaaacacatatataaatggagttgagtagtggatactaaagagaatatatgtatatttttattcactaatggggattttatgttttatgggaataaatattttttatcattaggattaaatattgatggaatgtgagattattatttacccatatacaaaatataggtttaattactttgtggtaccttatacaaaatttttaattaggtccctcaacttatttttcttttaatttggtccttcaacatttttttttcaactggatccctaaacttttatttatttttcaattgaattgtttcatctaattatcgttatgaaaaactaaccacaaatacttaattataggtactgatagtggactaatgcttttagaatgtgttgtaagtacaattaagtcaattgtgtgagttttttttataaagtttcaaccttttgcaaaaccaaataaatataaagaaatatctaggttgaattgacattaaaagatagaaactttgcaaaaaagtctcatagactcaattgtgaatataacacacccaagaagaattgttttcctgtctggagttctaattgagtctttgcggttaatttttcataacaacagtgaaatgagggatccaattgaaaaactaataacccaattaaaagaaaaaaattaggaacctaattaaaaaattggtaaaaatatagcgacttataggttaatttaacctaaaatatatctaagattaattattttattatttcgtaacaaaggggagataattttttccactccaatattctcacgactaaaaaatttagccatgaaacaaacataccctaagtgcttatccatattatatttgggccagttttaagtttaaataagtattttaataaatatttttcaataaacaaattagatttattttttaaaataagtagaaaaattatttttttaagaagaagtagtttagacaaacacaaaaaaaaaataaagatttttactttctaaacttttgtttgactagttaagatctctaaaattttagaaatttcagtttatagtttctcaacaaaagtttaaattcattatttttatttatttattgggattttaaggagtaaagactgaatttttaaaagttatgggactaaaaaaaatagaaaaaagttgaaaaatcttcaccaatcaaactaaattttagagattaaaatcttaataaaaaagattaaagaaccttaaccaaatcaaataaaaatttaaaaataaaaaacgtagttaatccttaaaatatagttattcttatcataatacaaattatgccaaaaaaaacatcaccaaaactcatcatggtccctttaatttgctgcctcatgctttaaaactccagtcttattgttgccgcaaaactacatgtatacttgatgcaaatcaaatagtcaaccaaaaaaccaaaagtaacttcaagaaaatagccaattcagaggttacagtgttaataatataaaaatttagaatacctttttaaaaattattgtgaataatataaatgaaattgaagcacatatatacatgaatgtagcattaagagaatagttggattgtggataataagaaaaataatatttattcctttcgttggaattaaatattaattaaaagtgagattattgtttatcaaaatataaaatatcaacatcaacaacactttaaatctaagttaattgagatcggtgatagatgaacccaataataaataataaaagagacagaaagagaaagagagaggggaaaaaaagttaaaataagaaaaaagagaaaaaagaggtgaaaaaaagaaggaaaataactaaaataagggaataactggaacataaaactactaatggtttaaccctctactaaacttataattttttttcactccgtcctaagacataccgtccaccaatctatatctcactccattaggttttatttaactacctttccccaggtaagtttcggttgatctctaccttttttgtatcaaactcttggtaacaaactcttgttcttacgggagcatccaatgccagtctcataacgtactcaaaccacttcaatatatgttctctcatcttttcacatatcggtacactgatacatttttttgaatattctcatttattattttatccatcttcatatatccacacatccaccttaacatcctcatttttgctatccctatttttgttcatgttgccgatgtgttggtcagcattatgctccatacagcattgccggtctcataacgtactcaaaccacttcaatatatgttctctcatcttttcacataccagtaccactgataccttttttcgaatattctcatttcttattttatccaccttcatatatccacacatccaccttaacatcctcatttttgctatccctattttttgctcatgttgcctatgtgttgaccggcattatgctccatacaacattgccgatcttacaattgttttatagaattttcctttcagcttaaggagaattttgcagtcatacaaaaactccgatacattccaccatttcatccatcatgctctaattctataatttacatgttcatcaatgttaccaccttttttgaacattaatccatgtatcatttatattttgatatattttctaccaaaatataaaatatattcaagataaattgtgttattacttcataacaaatacaagataatttttccccttctatatttccaaaagtaaaaaattgacccataaacaaacatttattaattatttatccatattatatttgggtcaattttaaacttaaaataagtgttttaaaaaaaattaataagcaaattggatctacttattaaaatcagcagaaaaatacttttttcaaacataaatatttaatttagacaaacacattaaaaaaacaaagaaaaatacttattttattaaaataaacttgattgtgatattgtttttaattattttagtaaagtgtcttatgtgatccgttagatatgatctatggctgatattactgcagtagggagctcgccgtagagtattatttgccgtagagaatccgaacgccaccgtgaatgtaaaaaaaaaaaaaaaaaaagtcataataagatgaaaaaaaaaattattatagaaaaagaaaatagttactcctccaatgaccttcatctacatattccataatttgacagatacttattgaattatagatagtagacacgcatcgtactcgaacccagtttcttatgacaattgtcataagataattactgtttaaataaaatataacaactctattgtataataatgggtgaaattaaaattttataaattaaagtcgagttaagatcaactaagatagtattaaattataactataatcccaagttaaaataaaaaatattactaaatctaaaatcgtagatatatatatatatatataaaagactgtagaaattatttaaataaaaaaaaaaccctattgtataataatgtgtgaaattaaggggggctaaatatgtgattttataagatgggaataaattatggcattttatagacatttaagaattaaattagattatttttttagagattaaattattatcaatttatatattcagaaatcaaaataattatttatcctaattttatattcaatttgttgtcacatatatttggtaaatttaacttataatttagctgaaaaaaaaattataagttaggaagtcaaaagttataaattaactgatttaatcattaaaagtgtttgataaaattaacgtataaatatcaaataatgtagagaacctatttaatatgtttaaatatatttttaatttcttacaatttaacttttttggttttttgttattataaattatatttattttatttttcatccttataacatttcagatagtattttattgtccttatatttattttatttttagtcgttacaaattgttttttaaattattaaattttattatataaatagttataaactttaaccatttaaaaaatacatttaagaatgattgtactaaatgattatgtgattaatgtgtggttatgttaagatgacttaagaataaatttttaattcagttgtaataattttaattaattatgttactaatgtatttttttattgacttgataatgttttttaaccgtgacaaaaattaatatttttttttattgcttttgcacttaataagtgcggaagtgatcgtgagtatgaatatatatgtatgtatgcagtgggtaagataatgaggtttaaagcttctacatgtacgaatttgggaataaatattataattattaaaattttctttcaaagacacttttatgattggttaaaatttttaattttggtaaattttagttctcaatttaatataaattaggagaaataatcagaagaaaaatctaacaaaattataattttcaataaattatagcaaaacatagaaagtcttagaaaaaaagtattagagaaaaacattaacatttatcatactataatctcatactggttatcatccttacaaagatttaatgcaaaagggtattataataaatccctttttggatacaattaaatttcttaatatgattttcattctcacaatgaagtgtatcattaatttagagaataatggagtaatttcttaattctctctaggtataacataagcaaagaagttatttgaatataaagataagtttttttatgtgttggtgtgtcttattatctcttttgtttgtgattattaaaacaaattgatttttgttttagatccttaaactttttatattaaatttatgatatattaaaatttttattttaaattttttttgtccattaatgacgtgtaataaatgaacttttatttatttcctttcatttttttttcatgaaataaagagagggttaaaatttgctttcctaaaaaaagagggttaaaatttatttccattaaaattttaatttaaagtaattaacattttgaaattttaaaagttttctaatatagtatatttttaaatacatttatattcttctgtaaaaaaaaacatttatattctgttttgtttcaaagttatttccgccgtcacttttctctaataatatatattggttccccattttgccgttgttcactcctctcttccaagttctgtctctgtatattcaaatccatactatcactttcgcttcggtacttctcttttcattgtcgcacagacacaaatcagcaccaaacgaagcccgacactacgtgaattaagcatggtaagattcagcaaaacccaatcacatcttcaattttcaaaactatttcatctctctgtcttcttttagggttttcctccctttttcatttacgttttgttctgaatgctctttatgatatgtaaatcttttttttttttttttgtgcattttataattgacacagtcgggcagaaaagaaacggttttggaccttgcaaagtttgtagacaaaggcgttcaagttaagcttactggaggcagacaaggttaggttacccaattcccttctcttgtgattttttattttttaaaatggttaatgatttatgtattgattttttaaaatgatggcggaagtatgaaattcgtttcgttttgaattgcaagaactcaattgagagttagctttcataattaaaatgcaaataaactcttctacatgtatattttttgttatgttttgttttgtttgattgcagtgacagggactctgaaagggtatgatcagttgcttaaccttgtcctagatgaagctgtagagtttttaagaggtaactaaacaacgcagagatctagtttttctgtttatcattttaatggtatatgtactgcagtagctctatttgttactttcttattatgttcgtgacttcatgatactgcttttccagccttttcagcgaattttgctacaatctgctaaaatgcaaaaaatttctttcagggctagggggcaaaatatttgagttttcatctatacttttggttgattccttggattatttgctcattatgggtgaagtttttttggtgtgatgatttacgccatgaagctgcttgattatactttaactttacagaattaaatcactatttgggtatttagcaaattagtgaaaactacataaagggacttataccgactgagagtgaaatattgaatgaataacaactaaggagctaaataatgccatttttatcatcatttccactgcttctataattaagggagcgttctgaagggcttgtttaagcttatgaaagtagcttatttatctatctatatgttttttgtatttgtagtttattcaataagcttaactatgatccttatcaaaataagcactttttagcttatttcattaagctctgtaaccaagcctatatgggaattctcattttataagagtttagtgaataaatgcttaatcaagttgtttaccctaatatgccccaagtgcagatttagcactgaacttttagttccaaataacataagcattggagtggaagatcctatgatatttaaatttttttctcactttgattaagcccttgatttactcattttcttaattttctgaatgaattcagcatcattttacttatttttgtttcagcaccgaattcaaaatggaatttccattcagaatttgttcagtatagtgcagaaccgaattattgaacactcttagatgaacttggcatgtcaatacaactatgcatattattgtaccttctatgtgtcaaaagaacggatttaatttcatagttcaaatgtttgtgtgactctacttagtatcagcattatgcttgtttataaactccaccaacaaaatttaacatattagcttattcttaaaaattatctaatatttcatttctgttgtttgaaagtagattttatttgtcccttgtgctgcagatcctgatgatcccctcaaaactaccgatcagaccaggaatcttggcttaattgtaagctctcctcttcaacatcatataaaaactaaaaataattacgtacctcattgctcagaggttcctcgctatgcgaaggtaagagggagagatattgtacgcaaccttacccttgcatatgcaaagagactgtttccgtattcgaacccatgaccaataagtcaccaagacacaactttatcgctgtgtcaagactcgctttcagaaaaactacatatcccattgtccagaggctcatcgctatgcgaaagtaagggggaggaatattgtacgccgccttacccttgcatatgcaaagaggctatttccggattcaaacccatgaccgacaagtcaccaaggcacaactttatcactgtgtcagggtttttcctcctcttcaacatcatatgagtgtcataattgcaccttctggctcataaaaagcttgctttgctgatgtcgtgcttcattgaaattttgcatctttgcttctttggatactagggaagtttaataaatcaacaacatcaacatcaacaacacctttaacccaagttaattggggtcggtggtagatgaacctaatgataaatcgaaaataggacaaaagagagaaacaaagttaaaataaaagaatggtgaaaggagaaaagaagaggaaaagaactaaacaaggaaatgactggaacatagaactactaatggatttaaccctccaccaagcttaatatttattttgtatttgtaagaaaaatatcaagttaattaattagaattacagtccaagtacataggagagatcaattatatactcttgcaaaacattaagaacatgtcatctccttctaaaaaacattaagaacatgtcatctaagtgcattaggagagctacaagaaaaggaatttaaaatatgtttctgtaattttctattaagaattcttatataataaagcaattgactgattctggccatgttaaattgttcatcgagggtgaaaagttgtactttaactctattatcagtttttttgttttggtttatagatgtgtatgctgattgtttaaattttatagaatttaaaatatgcagtgcctctagtaaatgtacttatgataggcccttaacacatgtacaagagcataggaaaatatgatttgcccaatggtagcaaaggcctgctggtttatgagaggaacataataataaccgaaaggggaaatttcagttaggagagagagagagagagaggagggagagggagagggagaggggaaattataactgaatggtgactggcggcatgagtgtgtgggagtgaggagattcaggaatcagtattaaataaggggaaacagaggtgagaggataaatgttggtgagggtctttgagggttggttgcactacaacagtgtcagtcatatttctttccttttcttgagtattctattaccagaggatttttcattttttcctcagctgtagcctgtacggagctttgctccctgatttctcagttgatagtattcagtatattttaatttctacaacctatcactacataaaagcatttcctgcaagaaaagaaaaagttgataattcacatgactataagcacttcatccactagcttttttgaattattttatcattatctttcaacaggaactattttggcttagcaatgaatatttcattatcctgggaacttattttattgcaatgcaggtttgtagaggaactgctgtcatgcttgtgtccccaactgatggtacagatgagatcgccaacccctttatacagccagatgggtcctaagtgtgaagtatttctatcttaaaatctgtatgctagctgatcaatacgtcgtcgcttagctgctgagacattaatgtggagcttctgattaacgttttgtctattgtgtgtaagcttggagattctgacccatttcatgttcttgttctgatgaagtttatttctctgtgatgtgtcttcagctacactttgaggacttaatatttatcatggattacaattgcacataaattagaagctaattctaacttgaccagaatgaaagttcttcatggcactttatatgacacttcccttcctcaccattcttgttaatcaatcttaccacacatacacgcaatctagtctagctgttacaggttagaagagacctagtaatggagaatttggatagcttccacaaagttttagattctaaccttatactgtgtttaaaaaaaagttgagcgaacactaattccaaaggacgggctactctattgcaacttgtacattttcagttctttatctgcttgaagtgtggaaatgtctattactattaggtttggccagaggagaaaatgaataattgagcaaggatgggtttgaaagaaattttctaacttttatccgtaaagatttttttaagtaattataaagatagtgtataaaatacgcatttttaaaaaaaattcaaaatgtctagttgaaagaacaagagaatgaaaattttaatctctaaattatatattttaatttgtaatatttagttataggtaatatactaattaaaaagatgaggattgagatttctttacctatatactctttttggttgggttgaaataccatgaaaatgtagaagtgaggaaatagagtggatagttaaaacttaaaactcatcctggtttggcaccaatgaaatagtaaggaaagaattgtaggtctcatgtacaaaaatttcatccatgaagtaaggaaaaatagctttgaaactgggagaagtgaggagaaatggcataaattagtaatcatgaaatatatcaagcaaattttttttatctttttcttttatcttttttatttcttctttatttttattaaactaaacaactttaaaatttactttatttctgtttttcctattaattctatccgttgtatttcttttcttcctaccagttaaatcctacatgcatttataaaaaatttcttaatttaattacaattcttagatcttagttaggaaagtccactttgctccctactcctaaacacttattaagcaaggagtttggaagcctggtgactggtgcgagttgaaaacggtgaaaccacacggtaccagagaacagaacaacaacagctgcagcagcaggacatcatgtgttggggatgttgactttattgttagtcatatgtggttggttagattccattaagttgcaacctgtgattattttttcaggtcgttttacttacgtgcatgcatgcgtttgttggcgttggaactaatggtattcatgagataaaacttatcaaaagagtataaaactaagctacaatgatccgtttccaacctcttgactattcaatatcttgacaatatataatgtttaggttcaggcttgaagtctcttatagtttgatggagcaacaaaagaaaggaggtgatggagctggagaagcgcaactctgaacttatatattaagatgaaatttttatgcaaaagagttagtacttaacttcataataagggattaaatagaaaaatgtttttaaacccatcttaacccgaaatcatatttgtatgaaaagtatttagtagacaaaaacttaccttgtcagaagtaacatatacctctgcgttccattttccccttggtcaattctttcttcagaaagaaacacgtctttcttcgtttggacattcttatttacaagtgaaaatgacgtatggacagtctcacaaacaccaatgacggccattgattgaggagagtaaaagaattgcatatcatacttgcgtgaaacttgaatgtcaatcgatcagaagctaagctgtttatgacaattataaaaattctaatcttaccactccctagtcttattttattttagaggttttagaattaaaatttgagcaatactattcacgaaccagtacgataagtacttagagaaactaaagtgactatatttactcatacaaaatacatgaataaaactttaatgcttaacactattttttaaaataaatattacttaaaaatttacaaaattgttaaacaggtttgaatagaaatcagctttggtacatatttgacaaaaactattcctactaaatatcatttttcttaagatttttacactctcaatcaacatcctctaaaatatatagtgaaatttaaattaatttattaagtatatacatatatatatatatatatataataaagtacacattaaaaaattattactttaatgtttactttattatttatatgagatataagaattaaattttgtaataattacactatttaatagtgttatttatatatatggtttcatttaaaaaatttatacttgatgtatattagcattatatttattaaattcaattcaataccatatattatatttagtaaatataataattaatactccctatgtcccattaaaattatcgtcctaaatttttttacacacaaaaaaattaataaatatatgtatgagatataagattaatttttgtaataattacactatttaataatgttatttatatatatagtttcatttaaaaatttatacttgatatatattagcattatatttattaaattcaattcaataccatatattgtatttagtaaatataataattaatactctctatgtcccattaaaattaccgtcctaaatttttttatacacaaaaaaaactaataaatatatgagagagttacaattttactatattaacatgctattaatcttctttgttggaaatgatgcaagtcaatgatagttattagaggtataaatgaaaagaataattaatactgttatggttgtcgtgttcagattacgtagacgttatagtttgggtctggacccaattgttatgaataatcatgcaaataacttacccatagaacgtggaggctgacttggtccatactgaactttgagaacgtgctggatgaggccgggaatccaggaagcagttctaatgcccgttacgaggtattttgtttataaatacacagtaattcctggtgaaaggtacacacacacattctatctctctctttcaattacacagagcacacaccccacgtcaattggtgtatctctgtgatctcctgccccaaggtatcaccttccattgatatccttgaagctgcagagttagagtgatcaaacagcaactccatagcacttcggtgttatacatttgtgttctggaaagaaccagaacattggcgccgtctgtggggaacgataaacttcgagtcccacgcttgtcaataatggtaaacacaagaaacagccactccgtaccacattcagagatgccgaacagagagatttgcctaccggagaatcagaatgtggcacggagggaagaaatacatgtgacggaagccgtttccgacgaagcttcctctcccgctcagacagaccaacggaggaccccaccggtgtgaaggatgggccaagaaggggagctcgaaggacagcttgtcagcaatgttctcaattcaatcctaacccgaattgagaacatggagaaaagacaaaatctacagagacaggaagacatccgtggcattacacgccaaatagaagaacgtaatgaggagtggagacgtgccgaaatgcaacgaacggcacaattggagcagcagctgcggatgatagcagaccgggtacaactttcaaatcctgagagggagacgcaggatttgaggacccacttgaaccaaagaagaagtaccgacccggaagaccaaaggtggatagaggagccgcaagatctaaggacacacctaaatcaaagaagagataccgaccccggagatcaaaggaggatagacgagccgcatcagggtcaaaaccgggcacagaaggaggcacgcgatggagtcgacacaaaccagagccgcgacgaaaatccgaacattcgagcaaaacatgacgacaatcccactggtagggcaaacaacgagaggaacccgacgggagaacagaattttcgcgagaaggcaggaccagtgtatcgtcggaaatatagcaggggacagcaaaacaacagtccattcgtggacgacatcgtaaatgctcgatatttggatgactttgatgggtcattcctatcaaagtatgacggaacacaagacccacaagtgcatatcgacgaattcgatctgcagatgtgtgtccggggcattgaggagcccataatatcaaggattttcgttacaacattgacgggcccggcgcagacgtggttccatactctgccgcctagatcaataaagaatttcgaagactttggtcagaaatttttattgaacttcgcgactagtaaaaagcagccgaagtccgagttcaccctgggcaaaatcagacaggcacccagggaaacactgcagagttatttggatagattcaaagaagccgccctgcaggttgatgggctagaagaaagagtccacgtatacttgatatcggccggacttaatggttcgtcaagatttgccaagtccatttacaaagacccggtgaaatctttgatggaatttcgtgcacgcgcaaagaaatacttggagttggaacagatggaggtcgtcaacaactcgggacgaggaaaggagcgtcatgaaaggagaagcccacccccaaaaaataggggatacccggagagtcgagctcggaataatgatccaaaatcccgaccaggaagatacgaaaacaaatatgagaaatacactccattgaacgtatcccgttcacaaatctggaaggaggtcgcactcacagagatgaagaaggttgaacgaccccgcccagttttcaacaagggtggattggataaatcacgattttgtgaattccacaacggacctgggcacaccacagaccaatgttgggatctgcgggatgcaattgagaagttcatccgagaagaaagaacaaacggaaaggagacgaaaatcaacacatcaacgaaggaaagagacctcgggaagataatgacgagttcccggaacccgagtttgaatgtaacgtgatttccgggggaataggcgatggcggggatactgccactcaaaggaaaaaatatctgaaggaagtgctatcggtccaggcacaacctaaattcaaagctcggacaggagagccagaacctccactcttgtatttcacaaagcaagacatggagggggtagtacccagacatgaagacggactggtgatctcagcgacggtgggcaattgccgggtaagaaggatgtatgtagacaatgaaagttccgccgacataattctattgaacgcatttcggaagatgaagttggacgttaaggaattaagaccgtgcaaaacgatgttgatcggcttcaacggcggaaacacgaatgtaatggggtctatccgcttgcggttaaccttgggaacgagagaagcttacaagcctgaggaagtggaattcgtcgtggcagattttccatcccaatataatatgatattggaaagaccaaccatacataagtgggacatcttaatgtccacaaagcaccaaaaactcaagtttgtgggcagcaacaggcaggtggtaaccatatgtggcgatcagaaagaatctcgacaatgttattatgatacggttcgaaaaagtgaacgagaagctaacgacgacattcataattgtgtacgttcagtaaatgtggtggaattggatatgcgagaagccacggatgagtggaggccggaaccagtggagaaagttgagcagattctaattggagaccaggttggtcaggtgactaatattggtggaacattagaacccgaacagagggaggaattgatccaatgtttaaagaaaaatcgtgatgtatttgcatggaaggcgtcagaaataccaggcgtcgatcccgaattctgcagccacagactggcaatgtacccggggtcgaaaccggtggaacagaagaaacgaaaattgggaccagacagagcctaagctttgcaggaccacattaatgagttgctgcaggccggcttcatacgcgaagtacaatacaccacttggctgtcgaatgtcgtaatggttcgcaagccgaatgggaaatggagagtgtgcacagattacacggatttgaacaaaatgtgccccaaggatgcataccttatgccaaacatagaccagctggtggacaattcatccgggtacagaattttgtcgttcatggatgcattttccgggtacaatcagatacccaatgcacccggacgatcaggagaaaacgacgttcataggtgacaaagccaactattgctataacgtcatgccatttgggctcaagaatgcgggggccacataccaaaggatgatgaatagagtattcgagtcacagctcggacgaaatattgaggtctatatagatgacatgatagtcaaaactgcaaaggtggataagcatgtcgaagatcttgaagaaacctttggccgactatgcaagtttaacatccggctcaacccattaaaatgtacctttggggtcggggccagaaagttcttgggtttcatgttaacacacagaggaatagaagctaatccggataagtgccgcactgtcctggatatgcaattcccgaccagcaagaaagaagttcaacaactaacgggtagaatagccgccctcacgcgctttatgccaaagtcagcagagaaggcattgccgttcttcaagatgttgaagaaacaagctgtcatagaatggaactcggaatgtgagaccgcctttactgacatgaagaaatctctggcgtcgcccccagtattgtcaaggccggaagcaggagaaattttagtcatgtacttatcagtaggcgaagaagccgtaagtgcagtactaataagagaggtggagtccacacagaagtcggtatactttgtaagccgagcattgcgcgactccgagtcgcggtatcaaaagttggaaaagctggtcttcgccctgattgtcgccgccaaaaaattgcgtccatattttcagagccataccatagtcatacggacagaccagccaattcgacaaatcttacataagtcagatttggcaggaagattgaccaattgggcagtccagttgtcggaaatttgatttgaaattcgaggctcgccacgcgattaaatctcaagcattggcagatttcatccgagaactcaccccccacgcctcgacaattggagaatggtggaccctatacgtggacggatcctccaacaagaaagggagcggagccggaattataattgagaatccggaaggagtggcaacggaaatttcactgcaattaggttttccaacgtcaaataaccaagccgaatacaaggcattgatcgccgggcttgtacaggcaaaggagcaggaagctaagaacgtgaaagtctacacagactcgcaattagtcgcatctcaaattgaaggccgatatcaagtgaaagggcccttgctggcaaatacttgagccgaataaaagaattgatgtccgaattcggcgaggttgtggttaatcacatccctagagaagaaaatgcccgggccgatattttgtcaaaactggcaagcactaaaaaacctgggaacaatcgaaccgtaattcagcaacagacgttacagccgtcgtgcataatgatgatcaccaccgacaatgattggcggcgtccaatagtaagttatttggagaaggggtgatgtgttgcaaacacatcttagttttaggatagttttaggttatgttttgattaaataattaggatttagattaattttagctagtttattaatattatttcattttatctaatgtcaataccaattatgcatttcagggcttaaaagaggagaataaaggcaagcaaaagaagaaaacaaaatctggagttccacgccactcgcgcggtgttccacgctagtcgcgccagtacctcaaggattaagggtattctcttctgccaagccgcgcgacaagcgccatgtcccacgcgacaagcgccattctttcggccattccacgcgactagcgcgagatcgcgcgcgggtcgcgtgaggttgaaattgtttccttatttaaattatatattttcagatttggtactatattaggattagttgccttaattaaaggattctataaatatatttagtttccttaattaagaagatttgattcagatttgaaacaagaaaataggccttgttaccctaattagatttatctataaataaaggcctctaggaagcatccaaatcacaatctctctaccatctatcaaccccttccatcactctctctttctcatattttcaccattggaagtcaagaatcaaggcaaggtcaccaagaatgtattatttgacagcctttggtttcttgaagcctatggcaggctgaacttgtattgtgggaaggccatgaactgatgtaactcctctgtaacttgaattggtattgattttaatgctgttttgattattttattctactctgtgctattcaatgttttattcttatttggaattggctattctatttaagtattgagggttaggattcgcaatggacacgttggggttctaatttttgacctgtttagaataatagttgttcttcgcctagacatagggatgcatggctacggattttataatatgttctttttcatgcttaacttaatagaattcaccaaggaattgggtttttgaattgggttaaagggttaattcactaaggaattagggattaactaacttaggaaaggcttattctccgaataatcttaacaagatcacatgaaatatattctttgaatacttagtttgacagattcactaagggtttaggtttctcgatcgaattaaagggttaaatcgctggttatgactctagtagttctaggatttacgaatttaggaaagatttatcatgtgtgtaacttacgataataaaccaatcaagtgaaggaggtaggaacaaaggggattgtgcctgaccacaattgtttcttccattggtaacttcttttatatttttactgcatttattttctatttctattcaaacaacaaatcaattcaacaattatatcttattttctgttttattttccaatcatttagaattaatattattgtaaaaattaccccaatccctgtggagacgataactcacttacctactttattacttgttaacgatcggtgcacttgccgtaagtacacaacaaggggacattaccagacgacgagctagaagctcggcgtttgatacgaacatcgaccatgttcacgatcatcgacagggagctgtacagaaaaggactgcacaaccctttgttggtatgtgtggccccggatcgagtaggatatatcctgtctgaaatacatgaaggtattaacgggcaacacatggggggaagagcactgacaaggaaagcacttcgagctggatattactggccgacgatggtacggatgctgccaagcatgtgaggtcatgtgaaaattgtcagatgcacgcttcaagggtattatccccgccggaagaattgcaatccatttcggctccatggccgttttataaatggggtatggaccttttgggtccattcaagctggcggaaggacagatgaagtggctgatagtcgccatagattattataccaaatggattgaggcagcccccttggctacaatcacttcggcccgagtgcaaaattttttcgagaggaatataatctctcgatttggaatccccggagaagtagttactgacaacggcactcagttcacggacaaacaatttcaagagatgatggctagtttccagatacgacaccgttttgcgtcagtagaacaccctcaatccaacggtcaagcggaggccgcaaacaaggcaatcctaaaggctttacggaagcgaatgtacgacgtcgggtcgacctggacggaacaactatattatgtcttatggggatccgaacctctgtccagtcgtcaaccggggaaactccattccggatgacttatggaaatgaagctatgatcccagtcgaagtcggacaacagtcatggcgacggagtcaaatgctacgagacggagaggaagcaaacaacgaagttttggcattggagtcggaacttattgaagaggtccgaataacggcccatgcccgggaattaaaaatgaaacaacagatggcgcacgcttacaataagaaggtggtcccgcgacagtttgaagagaccgatttggtacttcgacgtgctgacatcggaaataaaaacgcccgggacggaaagttagcagccaactgggagggcccataccgggtcattaaaaaattaggcaaaggggcatatatgttggaaacgctacaaggcaaaccagtcaagcgaacatggaatgccgacaaattgaagaaatactacagttaaagtctcgaccttccttttaataggggtatggattcggaaaatgttgcatccgagtccgtatggtccctgttcatcgaaggtacatgaggcagtagaagaaggcaacctcgttattgagggtatgggtccggaatacacatatccgagcccatatggtcctctttcacgatgaagacgttgttaataaatgcgaactcggaagcctaccttctgagcatgtcatcgtatcaaataaattatatcgttgtaatttctaagtgttagtctgatcatattcggacacacatattgttattgtaacaacgaatataaatgcaagtactatgaattaccacgatattgaatcattttatgcggttttgtagtacgatgactgtgaatgatacgctaaacggccccgatcaggccggataatggaagcctcctttagcgtagttgttcacggtcagacaaacgacaagcaataaataaaataaataaatggtcgttggaaccaaaagatgcgcgcacaagatattttatgaatcaagtaaaaagcttgaataatcactaaataaatatttgttccgggcaccaggcccaacaaagaaaagaaatacaaagataaaacaataatgtctgcctccctaatcctttgaaggaacggaatcgggagtcggctgagatggatcgggaatggatgtggggtcggcaacagaagtgacgacaggagcaacggaggttggttcttcggttgtcaaaggttccgacgccactaccgaaggatcttcagctgcaggaggaggaaacagttgaccgtcctcgacataagccaagaaatgcatcccggcagtagtcatccctacccgggggttcaagaaaataatctgctcaagggcgttattgaagccatcctcagcagcatcacgaagggttgctttcatagcagctagccgaccttcgtaatcctggacgcaggcttctttgtcggccttggcagaatcaagggaagaagtcaggagggccaccttctggtcggcagcttcaagggagccttgacaccgcgccaaatctacccgcagggaggcagaaacggcttgggacttaagtaattcctcccgcaaaagcttaagctccgccgccgactgcgtttggagggtagcaagttgagccttaaaggaaacaagttcctcacaggctttgtccttctcctccaaagctttgtccttttccgccaccgcaaacccgtacctgcgacattaacacttagaaatatatacaaagtataagtagagttaaaaatgtcacaaggaagatgcatacttctcccgaacagtggtaagtgctcgaacaagagaagcacagcgaacggcattctcctcgatccggaccagctcggccagttcttcatccaccggggcactcggcttgagcatatatgaagggggtttggtcaaacgaaccaactcttcagtaaccccttttttccatacattattcgacgaacccgcacctcaaggtgctcggagccagcaacgggggtagtacgtgggcggccatccgccacggtaagatccacagtttcgaccaccgaaaccggggtcaaggttgccgaggaggaaggcagtggagcagccggagtagctgacgccgccttttgagcaccttcgtcaaaaaacgccctgtaaggaggcgcaccacgttttttggacggagcgctaagtttgtcagtcgccggcctcttgcctttgcccttcacttcagttggtttggaaatatgggcgatgtcggccttggctttaggaggaggtcgggatcccattccggctacaatcagaaaacatcataattaatacaaatgcagtgataaaccatgagataatgtagtcaccaaagcagaccatttcgacgaccaacgccaatgtagtcggaagttttaggctgaccatgagcgcttataaactcagaaatcacgaagacagaagaggcatccgagtcggaaagatcctcttcgataaatcgatagttggaatgatcctgcttgtaatgatcatccgaccagtacaagggaaaaacccattctacatcggacgactcaggaccggacaagaaaaagggtcgccgatgaggttcggtggcaactttgaagtatttgtccttgaagccacggaaggagtccgaaaagggatcgaagagtttccgtttactctgactacgaaaggaaatccacctttttcggtcagaaggttctttgcccgttctaggggtatgtggagagaaataataaaagaagagaggaacggtgcaggggatccctaaatccgtacaaaataattcaaaagtacgaataaacccccagctatttggatggagctgggaaggagctacccgtagatgatttaaaacttcgatttcaaaagaggaaaaaggaaaggtaatacctatttgtgttatgacatcttgaaaaaagaagaagaagttggggttattaccctcccgttgagcgcaaatgggctcaccgggcaggggagcttgaagggcgaacccatcttgcttccctactgaagtcgacactatactaggaaggtcgaggatagaagaagttcgaagaatttcataagtgacccaagggaacttagacgctaatgctgggggcacatctgaataggattctacagaggcagattcgtccacggtttccgaagtaacacccattatacctacgaaaatgaagaggggaaataaaagttagtaaacatacctggaggcaacgcatcaaattcacaagacactaaggccgaaaccccgtcgacgacagaatgagtatgcgatcctggttgcaaacccttgaaagcaggacgcaaaatagggttatgatgacatgaactaagaatcgaatcggcaatatcgtcggagcctatttgaacataatgaatggcctcggacacacaatccatacaggcatcataatcaacctccattgcttcaaccgaggatgaagatgattcctcatcataagatggagaaaggccaactggagggatagggtgatggcaagagaatcctagagagagacctcgtggactaccagtatcaattttgggcccaagaatcgaagagtccaaagaagataaagttctagaagaggctggacctaaggatgggcccaatgtccttggtttaaggtttacaggaatcggaggaggcaggggaaataaaggggctaaaccgccaaggtcggcggcggtcttttgttttccggaggaggaagaacctccagtatgacggcgaagggggtcactttcgttttcccccgccgaaagtggaaggccaaacaataaccaagcggccctagggccaaactttttccttatctctgcctcctcttcaggggtcattcttagggcaagttaaggaaaatcaaaggagaatcgaagaaaaggagaatgatatgattacaaaacgcgaaggaaaacccataaaccaagaaaaagtcagaaagaaaatatgatgcaaccctaaaaatcctgatgctgacagagtcacggtaatgcaaaaacaccaaatgatacagaaagaaaggagaaagaaggtacctgcggtaatgaggaattaaaggatgattgggagaagaacgaagggggaacttgcagaaaatacgagaggatgcttgaaaggttaatggaagagaagagaggaagtaatatgaggaaataagcagaagtggcaagcacagaaaaaagtaggcacgattacggggttttgaaaataaaatttgaaatgtgatgataacttgcagtaaccaccaggcgcagggaaacgattcagtcaccacaatgaaacgacacataggggtatcatggtaaaagcacgtccaattatgagggcaagggagtaaagttacgacaatggtaatcattaccaggcaaatgaagtgacagatcctttaaagacatttattgccattaagggcaggaaaagtaactgattcgaatcaggaaggtcaatagccgtttcaaatatgttataaacaatctgggtacattactcgtccagggcaaatccgaccacaattattgggatgtggtcaaatgcagttacattcagcagaatccggatacgtgtatccataaaagtctagtcggagatgtttttctatccggacagtcatatgcctccaagagtggacagaacaaagcatagtcatgggaatacgtctccaaaacgatcgaagaattgtatccggatgaacgtagccggataagttactcggagtattgcggacggaggattatccgaatagtattctacccggaagaagccgactaattgtagtcggattaatggttaccctgaaggtagcaaatcacctgatgcatcccggctaccaagtatacttgataaccgggctggggggcaactgttatggttgtcgtgttcagattacgtagacgttatagtttgggcctgggtccaattgttatgaataattgtgcaaataacttacccatagaacgtggaggctgacttggtccatactgaactttgagaacatgctggatgaggccgggaatccaggaagcagttctaatgcccgttacgaggtattctgtttataaatacacagtaattcctggtgaaaggtacacacacacattctatctctctctttcaattacacagagcacacaccccacgtcaattggtgtatctctgtgatctcctgccccaaggtatcaccttccattgatatccttgaagctgcagagttagagtgatcaaacagcaactccatagcacttcggtgttatacatttgtgttctggaaagaaccagaacaaatactatattaaaaattaaaatgataattattttggaaccgaaagaatattatttaagaaaactatagtttcatttataaatttatataataccattgaatgcttaaattaattaatgcaaaattgttccaatttagatggtactagtatttattatctctggttatatatataaaaaataaaagatattttcttggttctaattataaaaatatagatatattttattgctaaattttctttttactcctaatttgttaggtctattaatgatatgaacgaatctctttataaaagctatcacaaaataaaacatatttatttgttgaatttgaaaaataaccatctaatttataaaatttcatgattatttttatcataaaattaaaacttgataaaattaattaattaaattacttttatttatcttgacaaactacgtaattgtttcttatagtatttagcatcagagatagtactattctttttatcaattttggtagtaggaaaaattgaatttgtaacttttttttcttcttgtcttctatttttctctctcttaattttgttaattttatgatactatttatatttgatgggaggaagatattagtagtactgataaagttataaacatataagtaatgtaaatcatagttaagaaaacgtggctgttgcgttgggaacatcatatagatttgtataaaactcattttccggattggcacagaaaaaagggtccggtgtccttgaccagacagacgaagaaactagaaaaatgtgagacgggccccttttcccttacgttgcatcagcatcttgttgttatgggagagcaactgatgtagtaggtaaagtccattgagagagaagagagtaaagtaacggccaaaataataaaaaaaaaaaacatcataatcttcagtttttttttttaacccgaaattatatacttaaatacaagattatcttaattgacagagcgatgcccattcttttctaacactgatccacacacgcagatagatataaaaattattctttccccatccaattacctttttcacaataatatcactgacacagtcaaactccaacaattacattcaacccgttacacttgcattacataggagcaatagctattttagctattgcctctcttctcttccaaacaaccaaaccaaagtactcttttttatcttccctcattaaaagctgcgtaacgttcactgatcccatcttcttccccgaaccttcaatccacatctaacaatacccatttccgcaaaaccaccaaagccaacttcttttctgttttggcccacaccccacatgacatagctaacccatttcaattggggttggttggcaccgtcctaaccttaaccaaagccaacaccttttctctttctccctctggggtttcttttttggaatccctgaactgaatttgcgttgtgaagatggcggcggaaaaggttgttgagatggtggcattggagtctttaggaaaagggttcgatttggccagcgattttcggttgcggttcgcaaagggaattcgtggagagaggttggtggtgcttgatgaacagaacaagagggatattttgattcctggaactggaggtgttaccattgaaggggtttctgagaatattcgttgtgataaaggggatagaatacgcttcaagtctgatgtacttgaattcaaccaggtcccttttctcctcctccttctttatctgttactgtagatgagttaggaggatttcgtttttgaattaagatctgtttgtttgtgttgcatttttggtaaactctgcgtttttctccttgctgcagatgtctgagttgcttaatcagaaatcagcagtgcaagggaaagttccttctggctattttaatgcgctctttgatttgagtggggattggtttcgtgatgctgctgacaccaagtaccttgcttttgatgggtatttcatttcactctactatttgcacctcactgcttctccactcatactgcaagaggaggttaagaagtctgttccggctcagtgggatccggcttcgttgtctaggtaaacactaagctgatacaacaatctggtagatagacagattatggtatctttgttttcctcatgttaaaatagcttcttttagctttataacttcaatttgttggtgtaaaaatagtttcgtttcctggtagatagacagattataatgggattgaatttgatagattcaatttgttgctagctttttgtgcacttatggttatgaccatccctgcaaaatctagtatgtttggtagccatgaactggttgattaaaggatttaatatcttcttaccttcgcatgaagcttgaattaacttttattagttgatgttagtttgtgtgttcatgtttgaatgttttgtgggtgaactgtttgatgcagtaacttattttgacagtttgaatggtgcataattttgggttgataagtatatgatgctaatcaattttgttaggcaggttcatccagacatatggtacacacataatagtgggtatggctgtaggaggtcaagatgtaatctgtgtcaaacaaaaacattcttcaaagattcctcctggtgatctcagaagacatttagaggatcttggagattttttattctcagatgtcagaagcccttctttactacagaggaagacagtagatggaaaacagaaggtatagtgctatcttttgtaactttaaggtatttattatttttctgctgacgcaatggctctattcatgtaggtccctgaggtctttaaccgtgtgatgcaatcaaacacaatgcaattcactagtatttcagaaacatcaagcaaggatgtaagccctgaaagggaaataattttcatttgaaataaataatttttctaggttgtgaatatattgctttatcttggaacagggcctcactattatttgctcaaaaagaggaggagatatgttcaagcacagtcactcaatggttcagacagtgccgtctaaccctgaagcaatcctcttcaagtttgttcctatttcctcacttctgactggaattcctggaagtggatatcttagtcatgcaatcaatctgtatctacgctgtatgttctaatctgattaaacaatgatactataatctactacatttatcctaatccattttatgtctattactatttatatattttcaccatggtgtagataaactccgaaataaaaattagggaagaggaagagttcaagttacacccttcaactttatgtccacagtttattccttaaacataaacaagcaagatggtcaattggcttcccaatgtgtgcataatgctcctcttgatggatgcatccatccaaaatttaacaaagatgtcatatgcctgtcatgcaaccataaaatccagaccaaagatgtttcacatgtgttaggaaacctggggaatcttgtatgtcttttgaactttaaggcataagccgtatgtagtgtgaagttgaagggtgtccactgaattccactcccccccccccccccaaaaaaaaaaaaaaaacaaaaccaatatgttttgggcttttggctcttagattgttcttgtatgttttgcttttctttacatgaagtttccaagccatcgcttcttgcacagaccactgtttaatttctttactgttgaggtgcacaacactccattgatttacttactctctgcagataagccttctcccggagatttacaatactttctggagtttcaaattccaaggcaatgggcacccatgttttgtgagctgcctctcaggcatcagaatagaaagactgcttccccttccctgcaatttagtttcatgggtccaaagcttcatataatctctacacaggtactgttaaccaaactctttgtgtttgagcaagtattgtatgtgttagactttactcttacatttgagtttaatattttccttgagaaagtttttgcttaattagtgtcaggattttcccgttactcacttctgttatgttacaaatttagctggggtaaaaaatttgttattctttaacctgcctaattctttaatcagttactttacctgttagtctgctacccttgagttttcttgtacaccttatttcatatgtattgtcagagaataggaaggagtctgaaataaatggcatcaagttaggattaggattcaggggttgaacaaggtgtgggatgttttcagaccgaaagataactcgttgtgagaaacactgttttattgtccccccccccccccccccccccccaaagagaaatttcattatagattatgaaagaaatactagagacgaggataagatatcctcctaaaagaaatcacaaaataataacaaatgaaaggaattaacaagaaaacccaaatacattgagcaaagaaaagatataatctctttatatgcaataaagaaacccttctaaaattgcacaataaagaaacccttctaaaattgcaccacaaaacaaaaatgaaataggtgacatctaaaagtatccttgaaaatactggcattcttccaatcatagacaccaaactcaaacaaaatctagtattactttaacttaataatcctatctgaatagctaattaggtcaagtactagtcctactagtattagcccaagcctacaagacttgcattcttccaatcatagacaccaaactcaaacaaaatctggtattactttaacttaataatcctatctgaatagctaattaggtaaggtactagtcctactagtattagcccaagcctacaaataataacactagaactatagaacctataggaacatatcaagaaagatattctaagataatctaaatatatcttacatattttcgaacaaattgtcgtgagaaatatgtaaggaaattcttgaaaacactacgaagttttaagcccctaggttatttttgcatgccaattgtgttggatttaactatctatagcattttgtctgcagttatgctatacttacaattttattggttttttttttggtagtaagctgtagtttagggtaaaagaaacattaaagaggatggacaattgtaaagtagttggaccaaaaaatttccctgttatgaactgagtcaactgactattctcaaagctcaagctactagggaaggcacatgaatagtttggttgctgtttgggggagaaaaggattataacctggttcacaaagttgtttagcaagataatgaggtctaagaagatgctacatttaaggaggaacagtattactatttataagaacaagcgagatattactaaatttttctaactaaagagcaattaagcttgtgagtcatactatgaaaccatacataagggtaattgaacaagggtcatagaaagaattctcccagctatagaggtattaagcttatgagcattattatgaaactgtagcaaagggtaattggacaaagattaagacgagatcattttttagtgtatgtttggttaagagataacatagttaactatgcattttctttatttggttaaaagaggaaatggagagaaaaaagagaaaaattgactttaagaaacaatttcaaaattttctcgcgttttgtttagtaaaggagaaaacacatgtaacaatgcttatagtggatcagcagcttcaggaccttgtgtaagcttctgctcacctctaataattttgggatgtgattcttttggacagaactcggaaatacactcaattcgaacaggtcataaaatgtgagcagtgagctcatgtgaccttatgcgagctcctggccacctatgagttatttatctgttttcttcattctatgtgctgcatagctttttagggattttcactgattttattttctcctctcaacgatcttgaattattgatcccttattcttaagttcacacaatattctcttgttaattatggtattttgtacaaaatgtcaggtggtaagtgaacaaaaacctgtggttggcatgcgcatgtacttggagggcaggaaatgtgacagacttgctttacatataaatcatctttcaagcctcccaaataaaatgatcctctcttcaggaacctcaacctcaagtacaccatcgatgtggcgaggatctgatgataatgaatccagtgatcaatttctggaacgaatcagatggaagagattctcaaatgtgtgcacagcagtggttaagcatgaccctaactggttgaataattctggaggtgtttatattgtaacaggtgcacaactccttagcaaagggagctggccaaggaatgtgcttcatctgcggcttctctttgctcatattcccaattgcagtatccggaagtcagagtggactgctgcaccagaggcttcaagaaaatcatcttttctcacaaatttgagcacaacattttcattcacacagcacggtaacactgggcctccaaaacagactccaactgcacttaactctggagtttatccagatggtccacctgtgccagttcgtgccggtaaactacttaaatatgtggagacagctgaggttgtgcgaggcccacatgatgctcctggccattggttggtaacagctgctaagctagtgactgatggtggtaagattggattacaagtgaagtttgcattgttagattattggtgatttcaggttaccgttcattctattcatggtatattggttgtcatgtgttgcttaaaatggtttcgaaaccattgatcacttgtatatattctttctacaggctgtgtacaggacagtatacaaaatgagtggctgttcacatcgggcaatagaaaattaaaatttgacaattctgttaattctggatacatttaaatgttgagtatttaaatcatcatcgtgaataagttatggggaaaatggaaaaaagaaaacacaaattaaaccatatatttgcaaatatataaatggggcgcttgcaaatcttttgtatcaagacactaggatgtgtgtagggaacatatttagtggcttagaaaaattaacgttgactgtataattatacatatatatggtcaagattatgttatactttttttaaatttaatatgggtgatgccaagtcctaggacaactggaaagttgtgtctaggtaattgataggtttgaattctaaaacggttgatgtacatatgcaagcattaaagttgcatataatgatactttctcatttctctagatttcccatacttttgcatagtgaggagtgtaatactctagataaatcacacaagaatgagatctagatgatgtgtaggtataatattgtgcaattgaaaatgatttaaagatattaattgatattatctataaaaacaagatgtatttactttttgataatttatcacctaagaatgtcataactaagtgtacttgatttgaattagttatgatatgaatgatcttttaaaaaaaaatcaaaaagtgtctgagtaaggataaaactcgttaaaaagtcttgtgtttgtaatctatcttgagaccagttaagtgatgtcagagctggttgttgaggtctggcaaatggttacttactgaagagtctgatgaacaaaaatgttaagtgaagtgtcaccgtgtgaaacgttatattatgagagtcgttgataagttgataataagagatgttaagtcttttgatattaagatactttaggtgacacttgatttgagtgaatataatttttttaatattttttgaaaataattttcattttcaaattttaaagatttagaaaacttgaagaaagtattttaaggtaccactgtgttttcactttttcaaaaaatgcgaaaaatgctaatttgttgtttcaattttggacttattttttaaaatattttcaaattttttttaacttttaaataaaggtattgccacttttgttttctattttctttgaaaatgaaaaaaaaaactatcaaaccaaacattatcttaattatttagttaactaaaatactaaattgaccttccattttaattatatggtcaatgttagttcttctcaggcactgatccttcatgtaatatgctaacataagagatgagagcagttaatattagatatccaaacatatatgaatagtgaagattattttcctaaatttgatcttggtcatgttagaatttttatacttaatgatctaatcattttcacaaacaatattagatcaatgcggaatgaaatagaatataaatacctccagccattgctccttgtattgggttgtaatactgcaatgtgaagtgatttcttgagtcttccaaactcttctctcaatttgcactggatggtgtatatgcactttatttgtgagtgagttcagggacactagaaattgaagatatacacctatatatagacctttccatcaaaggtgttttgtgtgtatggttatgatgggaagttaacagcggttaacaaccattgagtagttatgactatccataatgaatagttatgactacccataatgaatggttatgactacccataatgaatggttaaccaattaaggttggttacaaaataaaaccaacattctcccacttggttaacataacccatcatttacataatgagaaataaaatacatgaatcatggcgataggtcctctaatgtatgcgagtattatcttccatgtatcacattgcattatatttctcaattccatataacttaatgaataaacccaacgtttattctaggtccaaactttattgatgtttctcaaattaataactttagatgcgcataatctgaatgagaacatcacaatagagctttatcaaaacaatatcattatgatccttaaatttaaatggtggcatgcccttagttaaaggatcaacaatcattaattcagtgctaatgtgctcaacaaccactgtattatctttagcacattctcttatggctagatacttaatgtcgatgtccttgcttcgaccacaacttttgttattcttagccatagccatattaacagcatctgaatcatcaaagtatttctttaatgacttagaaatggaatccataattctaagcccataaatgaaactccttatccatacaccatgtacggtagcctcaaaacaagaaacgaacttagcctccatagtggaagtagcagtcaaggtctgcttgatacttctccaagagacagctccgctggctagcataaatatatatcctgaagtggattttatcaaatcaatgcaaccagcgtagtctgaatcagagtagccaattacttccaaattgtcagtccgtctatacataagcatataatctttagtcccttgaaagtatctcatcaggtcattcattttgattgtatgatatttggttgtatgatcaaaattagtttctttcgtgctctcatctcttaatacaatgcctatgtgtatagtctgtcaggcttatcacttacgatgaaagggagctaaacagtatattacgtgacttgagcagtaaatttatatcggtgcttttacgtttagtcaattgggacaggtttgcatgcattggctgcgggttgcactagatcaaaagacacagataactgacttgtgtttaaaccataaaatattatcaaaccaactttctttgtgcacaggaatagtgtatctgtagggttaggagtttaggacagtttctgtatatctttaacttgacatttgccacctgaaaatcaatgcattggcaatcattttaaggaaaagaaagaggaggtaaaggatacagtggaaagatggaaaatggtgaccatatctattacatgctcttgctaatgtatagctttcttcatattgttatttttttcaagtaaaaaaaaaaaagtgaaaaatagtactaggagtaatataagtgatgctacctacacaattatatataattatacttgattttacatgcccctaattgattattataattaaatttggatagataattgtgtaatgttacggatcattgtgatattagtagataaaatcaatgaaaaaaaagttataaattgatactgtcattcaataataattttatcataaatgataaatttattaatttttatgataattattttaaaaattatattaacgatcaatgttttacctatctaaacgatcactaacctcaaaatgtattccaatctcctatatttcgtgtattgataagtagcaactgtaattcctgcaagggttgtttcctattgtcataattataatagtaaattatgcaactttacttggaaagaaaggaatctttgatgggatgtccactaattgcgttgggtctaaactttaatgaccaacaagactagtgtacagcaaatgagcagaaaaagttaacaacggaaacaccattggaggactcaattgacaacaaaatggtcaaaaccattgcttttattattttttaaataatttttcgctaaaaatggctacctgtaccataatgaccattgaccaaattgtgatctacaagagaggagcaagtggagacggaataaaaaataaagaggcgggctttcacactttgcaggatagaaaaaaatggcacatgtagaaggtaggacacattggtgtttgttaggacgagtttttaaacttgattttgaatggttttgattatgttaaaattagttttagttaaaattatgttttaaagtaaggtaatacatgtttgaaaatttaatctcaataagaagtctacattaatataaaattctctccgaaaagttgtacttttttttactcctaaccaaacatgttttaaagaacataatttaactacaactaaacataattttcaagtcaagtttggagagaatccaaacatgcctatataggcatgatgcatgcacggtttcacactaaacatttctgtaataggagtgctatgcgaagaggggtatcaacgcatcgtgtaacacttcaagtgctaactaaccttaacgtatgtctcgtttggtcagcgagaatatactcgagttacttgcacctgaattaaagtattttcactatttttttttttttgtcttttgaccaaactcgggtgtgaccactggtaagtaatattaccatcttgcatattaatattataagtgtaaattttgatttccatctatcacctgagattaaaattttgaggataaattatatttttaatttttcaattttaacatttatgattttaatccttaaatttttataatcaatcaaagtcttcaaactttatttacatccaatgattttgatgggacgtttaattttattatcaatttattatgtttttaatttttaaagatttttagtggctacaaattaattgattttggtataaaactaaagatgtaaatattgattgaacaacgtagccgtgaatcatcatgcctcttttacattccaatttgtgatccacattcaaacaaatcaattgcaaccacattatgcatacaaaggagtaaaaatcttatcaaactaaatttatgtcctcattttttctgggtttcattttccagatatgcttcacccctttgtgccctcctctaccccctcaacccagccgcaactcccaccaacaccacgcccacaaactagacggtgaatctctatcttcacaacatttgcttgtaaaccccttctcaccaatccctacatttgcaacactgttttccctttgaattgcgaaaaccacccacgaaatcttactccaaaaagatataatttttgcacttcttatagctacccaattcgcaatatgtcaagcccatcgaatccctggatctccttcgcttggtgtcgctgccaccataggcgcacctgttgcctcgtacaaccactcgaagcttcagggaccctaacctctattattctttatgttttgggattctgttgtgcttaatttcggcactgaaataaaattgattaaaattggattcaacgtgttgttcagtgaaatgaaagaggaaaggttgcaaaaaagaaaaagaaaaattaagttagggtcgctggattgttcttctcggtgatggagaagaagataggttttgaaaaatatattcgaatttgggatattgtaatttttttcttcaaaattttgactaataatcaaaaaatttaaggaccaaaactataaacattcaaaaatttggaaactaaaaatataattttgtcaaattattattcaagaatttaagacaaatgtgctaagagtgaaaatcttggtgccggcaaaactgaaataaattgactttcgatgatcctttcagaataaccttctgcagtatgtttcatagaaagaaaatgaaaacagagagaaaaattcaattgaaagataaatgaaaggatatatatttttaaaatatttgttcttttcttttcaattaataaaagaaaataaattattactatatatttttcctaattttttcttctcatctaaatttattgttctttgcacctcacttataacttaaaattaagatattttatttggatgaaagaaaataatactacaagaaaaaagaatatgaattgaaaattgaatttttgagtttcaaaatttctctctcctttatattatcaattaaactcttaagaggcttagcttggttagctaaataatatatacgaggagaatttgttgtaaatattatgatatttaaggttaattttttctgtaaataaatagataaacaaaaaaagctcttaactctcatcaggctgagaattgatatatgatataaattgtacacaacaaaagtgaaaagtgaaacaaactaacatcaactaccaagaatagagaatgaaaattgaaaagttgattgttcaatcctcgatcttgggttcagtactttttttttagttgaagtcataatctgcagaaactttaacaatacgttttagtccaaagaaggaaaaagagaggggggattttaataaaggtaaggaaactgctttgtttggttcataacgagagacgaaaggaaaaatacgaataatatattgctttagctttatcattaaaaaaaatgatatcagagataaaataatatcacaggacaatttaatatgtactgtttaaaaattataaattacttttcttctcctttaaatctctaatgtaacagaggagacaaaataagggaggttttagtttcttcatttcttctttctttctctacaatttttttaaccaaatacaataaaattttctccttgatttcctaactagcaaacacaatgtaaacaatgctaacaaaatgcgtacaatatttgatttcagaatatagaggtcaatattttttttttgagttagaaataacttacggctttagttctagaattagagttggtggagaataaaatactattaaaactattacttgacaccaaaacaactcaagtaacagatacacgatagtcgacaattttttttggtttacttaaattttaaaataaatgttttaaacaagagttatattgaaatcacacatataatttggacaaatcaaagattaacaaattactgaagaactcagaatatcaaatttaagcccaaaggcagcttcaaaatgtttataaatgataccttttacagtatattaaaattttggttcatggcctcaatcttcttaataaattattttaatggaaattttgcttttcccttcttttatatttttcggatttccaccgttagcaaacagcatgtggtcgtcatatgacaaaagcttctggaccatcaaagaattgatggaccttttggctatttgcttgagaaagcacaaacagtagttgaagatatttgttgatttctgttcctttatccacatggggtccatttccacccccatcccttcacacctcacacccttaacagataataacaattaactctttgaagcatcataggtggaatgagtgcgattttcacgagctagcgtttccttttatgtgaattatagttattagattggagaaaaggaaccatagaatagaaggagaggattaacaccatcatgtagcatgcatgtcaacaattgactatctagattaataaacaaaaagttggattgcaatctcccccagaaagatacatgacaaaggaagaaaatccaccaataaattagttaagattgaatcttagatgggtgtaggccaattcttctgaatttcaaagtggtaactagtatccaaatagcatttgcgatcatcatctacaaactgaaacaaaaaaaaatagttagttcttcctactaaaaaatgcaacaatactaacattttatccgttccaaaataaatatcacgtttgactttttaacgtaatattaattatttttccattaatactcctaataagtatcagattagtttttcaatgtaatgttatattaagataagttttgtaaaattgttatgctcttttatttgtttattaatttttttggatctgtataaaataacctagaaaacaattattttagaacggagggtattacaaacagtgaataaatattgtatgatgtaaattaatattcttaccttggttcttgctgaataggttcccctagcaaacaaccccgaaggggtagtttcttcttccaattcatatgtatatggttcctggcttgggctataagttcccaacatcttttttgtgttgtctactatttcaataaattcatgaaagccacatgtaactaagacaattcgatcaagatacggatgtttaactaatctaaaacataaaaggggttttatgtctcacctctaagcccagttttccaaacaacattggtgtatttgaggccagaaacaatgttgttggagacagtgaaggagaatttcaagcggtattgacttccttccttaagggtgaagatactcttcttagattcagaagtaaatggaattggcagaatgaggtcaggcctccctggacatattatggtgaggctcactatcttcacttctggctccttgttttctgaagtacaatacaagggcttttgcctttaggttatttaggactcaaaaataataaggagctgaaatcaaacttaatgattcaaatatgcttaaaacaagaggtaggattaaaatcatcctagaccaacatttttcatcaaaatttgtcgtctccaaaaaaaggtgattcaagtgagtgaaaaaaagggatatcttgtaaacgaaaaccaggagaatgctgctttatatgaacaaagaaattaaattggatgaagaggacaatcttcaagaagagttttcaatactgatgcactatttatgtcacgtcatctccacttaattaataatcattgatactttgatagagttgttccagaagaaaaacaaaatggaaggaaaacaagtacctccaacagcagacatatcaatacctcccagaagttgctccttccattttctcaaactctcatcatcctttgagaaacaaaagaaaaattgttaaattgttgaatccctttcatcatagaacagttggaaacataacaaacaaatacaaagaatggcagggcagtgaagaaacatttgaaaaaaagaatgttactttatctttctcaagctgttccttgagggaaaactgaggaccaagatccaattccaacttggggtcttcctctgcctctgaatcagttccttcagcatcatcattgtaaggaagctggtctgcttccccaacaaccttgttgcttcctttgtttttgatatcttcctccaaatgagcattgaagggaaaatccttggttgcagacacagcagcagacattgtcaacctcaaaatcacagacacagtggtgtctcaaactctattggtagcacttccaagtggtgccaaaataagacctcttggctattctttgaggataattctatatgcctcttgccaatgaaattgagccttacaagttacaattcagaggtttattatgtgtaagcaattactagtagttgaatttaagataagggaacagtgtgacacggtgaatgtgggcctgaaaacgaaggtaacgaaaaacggttggaataaagttggtagggaaccacaactaaaggtggagaaggtcaatacaacaaataaactcagatctccattatttttatacatcatctacattgtttagtacgacagttttaacttttaaatgttacaagtctttgaccagaaaaagaaagttataagtcaacaaatcaaaattactaattaataattagtgtccacaataagttcattcagttgatttaaattcacttgcgcgttgacaaaggtaaaaataaaaatttactacgattaatgcctcttttaacttgttaagaaagttgattaatttagttaataatattaaatttataaataatttgtattatttttcaaaattactcttataacatttattgtttattgactacaaaaattataaagtaattaaggatatttttgtcaaaaaataattaatgtaataaataatttaaaaggagtcttataaaaaaaataaacaatataaggacaacaatggtatatgaaactaaaaagaatttttatattgtcaaacgattataaattaacatattatatttgtattgatttttagaatagttatcataaaaatcagtaaatcataattttttattgattattagtacaaaaaaatttacaataaaaatacataaaaattaaattcacctatctctatatattttataaaatttcatttatggtaattcacgtgacacttattcaaaattttaaatttttaaatccttctaatttaacatttccttttttattaatattctgattttgcaattatgcctttgttgaattataatattttcaaccttttagttttttaatcttttgaaattaacttttggcttaaatatgatttaaattcctattagtaaattttgtttggagtctctaatatatttttttgacaattttttaataaaataataattttattttaacccttctaatatatctatttataattgaattttattgacaatatcaaagacattatacaatgataaaaaaaaaaaaaacaacggctacatattacctgtctaaaggtacaaagtatgtaatactacgcagtacccaccaaacaagtatagtgatttcccctttttttatgacaatttttcatacatccttatcctagtatactagtatacatgtgctgaatcattccaattgcctcaagcagattgagcttgtagaaaatgtttcactagcaattttgaggaggaaatggtgcccatgacccaagaagaaacccacatgtgatgacagagaggtttaggacaaagagaggccaaaatatttgaccccaacaaatctttatgtagaaagcacatgggaaaatcaaacaaattgcaacacttagtagagaaacagtgaggctgaatacatgctcaaaactgaaagagcaagggatagtataaccaaagcaaaaatgaacccacactgcccctaattatcatttttgtcctgtcactgttaaacttgggaagccttttctccaactgaatagcgaaaggtgcaaattccagggcatatttggttataggcgtcaccacggttgcccacagagcaatctttgttacaaaaagctttggtggcatgctgagggttacctcagaattgacatccgccccaaacatattgccacccatgaaacccaaggtcgtgtaaagtaatgtaactaatgtgaagctccctatagatacctgaattcccaaattgaaaaattagaaaaataataattaataaaaacatctcattaatcttttcattttttaagcataatctcactcgttgattttttttctcatcctattcttaagcaattgatgaacaactatactgtctatgcatacatcatatgaatttaattttgttagtcaatcatagatggtaatataattgatttttttttttaacttttgtactaattactttaaagggttaacaaaaaacaaatacttcaaagaatttaattttcttgcaataagaaattattattaacatgatttttttaaggtaattactataaatgttaaaaaatttaccatacattaaaaaaaaatcaatgaattttaataaacttttactttaaaagtcatataaaaaaagttatttttaaattagttaataatgtaaaaatattcatcaacattaaactcatataatatatattatttaccttggtaaactttgaggggtctttcatggctttatacaatgtgtcatcatagctgaagatgtaaaggccagaaattgaaggaatgttgtggaggtggaggaggggtatcttatgattaacttgaacacgtccaaaaattggagtggatgctactgacacaaaattgacaagggacatgagaatgccaccagttggaaaggaaagatatggaagagagatctctgagccacaaactaggcagagcaatcaacactgcaccaatgatcaggagctatgatttagatagttttgccaattgcagcttcagatgcatccctgagaagattgaattcaagttgtcatgcaatgagatggtgtaggaaacaagggccatgaagatctccatgcagatgaaagttgtagctatgaatcttcctttttgcaccaaatgcatgaccctcaatgtccacgtaacttcttaacttggtgttcttttctagtcatttcccaagtaaatgagaactatatgcacatatcacaccgagtcctataagcaaaaaagcagatgtccaccctccttgtctagagcatatggagttgataattgccccagacctgcaagatattataccatatgttaaataaataaatgtgtgtgtacgaatgcatgtgtgtatatatagggatcgaatagtatattggagtaaacatacaaaacttccaactaattatttacagtgtcagattatatgtgctaaagtatacttaaggtgtttttcctatatatgctgcgattcggttttgacttttcaatactgagcgattacaattaattatgatgtcactagatcctttattattcttaattttcaattagtgggtgattatagaagtttctgttagattaaagaaaaaaaatgataatcttgccatgagcatcattgaaagagttctctcgtgtatataagtagtctgtaggggaatctcatgttacttatcttcacctagtggttatatttgaaatttgaaataagacttatattatatgatgctcaaaggttgactgaaataaatgtaggctttatttgtgattctaaaaatataatatgatttcagtttcatacttccatgcaatttttcaatccttagcaaatgtaatggccaaatggagattgaacatgctaatttattcaataatatgatataattgaaagtaactagctaaaaagactaaaagggcacattcatatatgttcgttcaaatggtacgtaagcaacagtgcaaactttaccatcccgaccacattgatgacagcatgagtgaaagaacaattgacttcagagtcatgctgtgtatctaaattggtgcccccttctgcactctttgtatcctcaattttgttttggtcatacttccattgtttagtttcctccacgcaaaaaatgcaatttgccaggtttgcaccatgcactgactcagcgttatcaacttggttcttgtgctggagacatttctgttgaaggcttaggcttttccgcaaagatttcaacatgttggtcaacatatatactgatatcaagttcccatagtttaggaaaagcaatagcaactcaagcaaggttcactaagatgcttgctgagacttgctaaccaaatggcatgaaaggtgtgtatttatagttgaataaatattctgaaagggtcagcgagatggcttcaagtattggagagaatcttatattctttcacctttttaatttttgcaatgtaatgtttttttttttttttatatcgaaaaatgttagttgcaatgttagttttgttagtagaggtgatcgaatccataactctttttcacttcctttttccattaaccatccaacccagattttgatttgattctgaattggattatcaaattgctagatgcaaagttaattacattagttaaatgtaacaaaaaagagttgcattagttacaggaaaaaatatgatggccactgtgagagattcaaatcagtaatagcggtgatattcgattctaaaatttcaacataaaacactatccaagtttttggcccgaaacaacggtctgacattaaagtgcaatatatatatgaatgattttaatgttataccattttgcctattattaggtgttccacttgcaatatataacgtcataccattttgtggagttatttataccttagtaaacacgatacgatttgaatattaggttccacttggaatatatatggcgtcgtcactgtggctgaggaatgcttggcatgcacaaatttctactcactttattcgcaatgtcggatgttgttttttgttctatctttttgtggggggagtccctggagaagaaaattaatcaatgggagatacaccgcacaaacggcgcctaactgatcttaattataccattgcaagatacttaattgtgtgtttcttgctttgttgacccaactaattacactaaaaaagaaaaagacgactgattgatatagctaaaatttaagcaggtgatagtatgatgttatttctgctcttgcaattagggatgacggagttgggtgtctcgttacgtggacgggtgttcgttatgcggctatgtgaattttttcaatactattccggaatgtttaaaaaaaaattaaatatacttttatctctaataaatatatatatttttatttatttttaatgattttttattttgcgttgagtctctaataaaataatatttttattttttatttttgataatttttttaatctaggataaattaacaaattttatattttctaatagaataatagattttgttttaatcccgactaatgacaaataataataaaaaattatcaagattaaaaataaaattcattaatttattatagactaaaaacaagtgataaaaaaaattattattttattagagactttacataaaataaaaaattattaaaaacaaatataaaaatcgaatatttattagagattaaaaaatagttaagccttaaaaatattttattgtaagattctcttttgaaaacagtttcaaagttaaaactaaaactattcaaatagtatatacaattactctacacaattatactaatcaagatacttcattgtaaaaactaaatttaaatgttaaaacacatcagtattgcaagttcaagcaaaagtcaataaagtagaataattcagttcttattatttagagagagaaaattcaatccttaagtataaacttaagtataaacaaatgttaataaaatatccatataatttttatttttttaaaactagaaaatttaataaataattacaatatttttaacaaatttctatttattatcgtaaatataatataaccaacttatgattttttctattttcaacattaatcactccattatccagcacgcctaaaaaataataaaaaaagtatacgaccaatttagtccccatactttacacttgctcacaattttgtctctgtattatgaaaattatctatttagtccacaaatgtcaaaggccatgacaatttggctaaaccgttaaaatccttgtgtttctgctaacaaacatagcctacatgtctcacattcatccacgtgacaagtacaatgtgtacagtaactttctacctcattttggattaaattatcattttttcttaatgtattgattttcaaattaacaaacataatgaccacatataaatgaactctccttctaaaaaatttccagcaaaacatatatacttactaaaaaattaatctctaacaaatattattaactaacaaactagtccacaaaataactaataatatgcactcagtagtagaatcatccatgaaataatataacatgcacatagtccacaaagctaaaatgagcattcatagaacataaaattgttattcattacacataacatactcaagttcccaagtagtagtaaaatttctaccatgattgtacattaccaagaaaacaaaagacaccaaaacatgccacaatgtcactgacataatagaattttccaaaaatatatccaaaatatgtctaaacacatgtcaatgcaatgttccaaaatatgtctacaacattgtattcgcaagtgaacacccggtagaagtgcaatcgacattgggaaggatgtgcgtcgtgttcgtattctaggtcttgggtggtggggatgacatcgtgttttggtcgcgtggcaaacctctatactctcgcaagtggccattagaggaagcgcaaccggtgcctagaatggtgtgcattgcgacaacaagaagagaggaatgagggatggtttggtgggtggagttgactttcagaaaagaaaacgtccaaaaaatgactttttgtgatgttttacactttttaattttcatgacaatttagtcccatatgttatatatttgctttatcatgtaggctataattgtaaacataaaaagaatgattttaatgaactaaattatcgtgaccactgacatttatagactaaatatgtaatttcataaaaagaaggaaattataagcgaatataaactaaatgaactaaattgcatttacccaaataaaagtaaatagtttcccgccattttgtgccccagggccaaataatttggcgcggattcagaacctgggagggaagcaactcgcacgctcactctagtctacagtcgattgggagtgttgcagagagaagaaagaaagcgatggagatcgttcgtcctcagagtcgcagaaacttgttgtcctcctccaacgaagccgtttctgctcccaccattctcctctatcgctctgctcccccacttgaagtcaggctcgaggatttcgagtccttcgccatcgatcgcctccgaggtctgttttcttcatctctatacttttactgttttccgcttcttccaattccagagatctgtttcaaatttcctctctgttcgtgcctagtgtttcgataatctgctctgcttttaactgtgtccgctgctccacacatatatcctagatttaagaaactagtgtcatgttgaagtgaaagcctgaaatctgcaagcgatttgtttttttattttattttaaatatattaaattagtatgaaatcgtgtgtgtttgcatgtgtttctttaacttccgttgacatcggacatttttcaagttttgtggtctgtttttcatggatattattacttgttgcagttctcaaggggatttctgatggtatgtcgcggggaaaaaaagcggaagaaatggagaatttggtaaaaagctcgatttgacaatattaatttattagttcatgtcttgtggttgacaaaaaagaaataatgctgtgtggtggacttttccatgtgaatcaccccttgtacaggtaaaggacctgtggaaagtgaatatgagacatcaagacgcaactcaggttctgaacaaggatattatatctcattttgttctacgtctggtgtattgcagaacgtaagagctcttatcttctctctcttttgtgcattctcttttactgttgttccatgccattgaaaagaatcctcggttgtgtgactaataatgcctgatcaaaataaatggaagattactacaaattgaataaattggtaatgatgagagtttaagaccattggcaccaattacgtatattgatcatattttatggttgtgtaagtgtattaatcctgaatgatgctttacccagatcaaagaaaggaaaaagacaaattaataagaaaactgttgtaagaaatatttctaaattattccatatatactaaaattacataatatatgcctgtattcccagggaggacttgaggaaatggtttctttccatggaatctgcactctttcgctaccgttttcgtcttctgaatgctgaagctcaggtaaaatctggttactctatattgtttttgcatttgaagttaagtacttattcatcatatactttgtttatgagtgcacagagggcagtcatggaagaatttgaccttccttacagggctgttagcaatgtggaatttgaggtagtcacatcatttgttttattggtttgctctggactcttgaatctgaattttaccatgaagttgatttgtgcaaaactaattttgttctgagttacaaatacctcttagtacctaaagaaatgatgttttggattttcagagcataaaagagaaattgggacaagttgcacgttctatgggtcagccttcacctactggtaggagcacattgctttttctttttgcaatgattatttagcatattggtatgaatcagcagaaatgatttgcatgcaccatgctggaggttgttgaatgaataggaatataactagctgttgctacctaagagcgaaggcgcatctttttttagattttgtttagtatgtaattgtaaatccactagtgagctagcagttgcatgggttaatttctgaagaaagatatctagggaagtttttcaagtggtatatttgcactactattatacaagaaaaaatctacagtttttgaaatttatgcctcattttttttcttcaagttttatttcctggtttttattacttttccaaatctaacgtgcctatgttttgcttggcttcatttacttttttttttgcagctgatgctatcttctacaaggtatgtgttcaatcttttttttcgtacttatttattgtcttgcaagagagatccatgcaccgggtgacatgcagttctactttaaatattaactcggtgactgttttaaatattgaattctaatgattcttccttgttcacaaaaaaggaaaagaaagcagttaactagttaaaaatatttgaatctataaaaaaaactgttaggaaatagtaattaattatcctttggtattttttatttcaaaagcttgtttttgtgtgagagagggagtgataaacagagatgtcttctctcacgacctctagttgtgagagaagacatctctaacattctccctcagtttttgggttgcaacatttgtatattttttcttttatttccatataggtaccgtttgaagaagttccagagcttgttgctggacggaaagtgtttataaatcaaggatatgcatatgttgcaatgaatcaggttgactagtgtaattacttactatttattcttgcaatgaatcgcagagtattggttatagtaaatcttgtttgtgtttcaactttgcctccttcatagattgtttcacttgtagccacactattccgcagtcagctgtcaaaggcacttatccttacaaacaggttttattggtcatttggatctcaataaattttctcacatgcaaaattgatttctttctttaaatgcaatttgggatttaagatgcttagagattcatctaattgttgcagaaaatggacatcttcaattagagagcaagagaaacataggttgactcctgtacgtgtgggttttggtcttgtatatcaatatatcctttctttgttataaaagttgactagctttctatgtagattgtggaagctctgtcctcaagttatctgggtcctgattattctcaggtaattcaaatagtatattctttcatttttatttctgttattaggtatttatttgaggattgacaatgttcattttgattgaaaacctctgcagtcaagagaatatgctgatatatcattaaaggacatagatcaagttgccaagagctcatttcctttgtgcatgcgtcacctatttgataaggttagagattgggaaaaattatgctcatgtgtttcttcctgcttgattcatctgtaatatctttctttttacttatcttttatctttttcatattgagtccttatattgtatttcagttttgtctgacgtcttgatttataccactttttatgcagctgaaagaggataatcatttaaagcatggagggcggatgcaactaggcttctttctgaaggttgcgtttggcttccatctgggcatgataaaaatactctgtagagtctagatgcttataagtttgaggtgttaaatgaggcttgacacttcacatgtggtttatttacacatggtttggagaaaggaaaatgattgtctggaattatcgtgacattcaagttactttttttagtttcaagtaattaacaagatataagtggagaaaattgaaatttgtgttttttatacccataaatttatgataccctgagtctgaaatttatgtcagccttcgacactttgactcatttcgtctgggtaaaatggcacaattaaagaacacgggtttatggttgtatgattatgctgggttagaaataagtcaaagtaatacattttggttcacttttattctgatttatttttgtgattgatgagaaaatcgatgagatgtcttcttcatccgtttacttcttgattactgtttatctattttcctccttttgtcttctttattctcttatcttttgttcttttctcgataatgtaaatagggtgttggcttaaatctggatgatgcacttgcattttggaggtcagagttctctaaaaaggtaagcacacttcttgcacatgatctacgatggaagtattcgaaattatatattttcagctacatgaatagtgaattagaatttcaacagttttagactctgataatttttgcacattatttcataatacttttaaatcattctgaagatgtatacctggtctagacaatgtattccatatctctctagacatctttatatggtctttgaatagattttttataagcttctttcttttaaaaaattacatcaattaattaaatgtaagatctcgttgtaggttggtttggagaagtttgagaaacaatatgcatacaacatacgccataattatggaaaggaagggaagagaactgtaagttttgaatttccccaccgatttatgggatgtttcaaatatatttctgttgctgatttcctttttgaaacacaaactttcaatgtttttgtatgcataatgcatgtatatgatgatgagtttcaacaagtaatgttttgatggatgttacaggattatactccctattcttgtcaaaagattatttcatcaactcctggagctggagatcatcatggttgcccctatcgacatttcaggtcactcttaatactcgtgctatcaaatggatagttttgctttctgtattggagatgtgaaatagataagttattgtcgagtatattttacttgataaatgctttaataaaattataactctgccttttggtgtcacaagtcttgctttctaaagactatgatctgtagtgaaattgtgatgggaaccaggcaaatcctcggttcgcaaaccaggcaagccacccatttggaagatgtacactagcagacagcaataggaaacggcaggagtaactgctgcgtgagagttgtaaatagaaaataattagtaaaaattctttattaggagcatagtggtaataggaaactgcctaatggcagttattcatagaaaataactagtaattagttatatattaagagtataactgatattaaggtctgtaattaggcaagtgtgttattaattgcagtttgtggacacagtattctgtaggagacttttgtctatggcgttgcaagtgcaactatagtattatattttattaatctatatttgattttctctcagattatttgtttctcttgactgtactacaatatttatttatctctctttgctgatgagtaagttatggttttactataaactaaagcacgtaagcatgctacaccttatttgcattctgtttctgctaaatacattttcgggattattattattaataactcaatcattgtaataacaaatttttgtcattgacgaacctaatagtggaatgattcaagagcaatttaaacccctgtattatgcttacaaatttttacttcgtagtttgtaggcagcaaacaagtgcttgaatgatatatttagtaattttatgttgaaaatgataatgcacttaagaaatagtattttcatgtaatatcttgtatctcatgttaaaatgctaattgtttatgggtattagtgtctaggacgttgcactaaatcaatatcagcttagtaataatccccactgcatctattaggagtctccctctgtccgtgtctgtgtgtgtctttgtggatcacttgcataacctatgcactacagctctcttaaataagaaagcattcatattctgtattctctccaaaactctgttctttcttcatccttctctccctctctaaattcaacgtactacactgttttagaaataatgactttcgtatgtctgtactctgttaatgtaatgaatattttagttgtaatttgggcatagcataaagcttggctctattcttggtcatgttctttgatcttgatatgcatgcatagttgtgaggggtagatcgaaccacagggagtaagctgcacatctgacaaagttgaagggggttataatttactaatttttaattattgttggaaatgcttattctgttcggattccttactggacagtattttatttattttgtacggacattgggatatgacatttaattgacgctatttgaatttaatagtgaagagaatctaagagctgctctcagcagaatgggggtaaacagccgagcgatggaagatgtgatggacaaagtgagaaatagacattatcaggtaggtcttagcacaacccgctgaacttcaataatcaattttcaacctttggatttgatatctgattatatggataacgtttgagcagttggcttgcaccttgacatttgaagctcttcatggcatgccgtgtgatgcagggattaaccatccaaatcaatacttcagtgacagtcaaaagatattaaagccaaaggtagccagtttacaaattgtgattcaaaccaaatacttgttaattacagctgatatgatgcaatgtctttgttgaatacatttttttttctctccataatacagtcgacaagtgtaatctgatataagcctactacttgtcgcctgtattgtgattatacatttcttattagtatgaatgtgaaaactgaaaacgatacatcaagttatcaattaatcatgacgacagtgaaagcagtcttgcattaaaatataatacaagaatcataataagctactggcatatcctggatagataataaattgcaaactgcaaagtcccccacctaatcttttcgatgtttaatgaagaatggcaagattatatacacaaaagtagatgtagcaatgcatatagcaatccagatagacacgtgtcctggttggaagacaacttttctcttttattcttgcctttcaacacactaaacctgaactgaaggatatgtttaatatcaaattataacaatttccactattaaaagagggagatagtcaatatcggtggataaatgcaattgttattatccccaagagttctgcaataccccttggttagtcaaagtttctaacggttttggagtatgtaattccaacataccacagtacgtgcaacatataggtggacccttataatacagtaaatagtatcactaacgtgatatttattttttgctgatgctgactttgctgacctgaataccttgtaatctgctctctgcttactcacataacgtgatatttaattatttattcttcatcattattatttttttaatgcagaaggattcttcaacctaagtaatttagttattgcagaagactggtgctggggcctttctcaggttgacttttgagccttctgtcttctttttccacattgttttcagtacctttcttgttctgtttccttctggttgtattcgaagctgaaaaaatatgctacttatttttgtaaatcgaaataatatatgtttgcattcattaaaatatatgttgataaactaacgaacattttgcacattttaaatttcatataggtgtcacacgttggtgcctctagtcatggatttgcagagagagacaatgtggtaaaatcttaaatgtagcttccaaagcagtttggaggcaggagttggaattcgagtcatgtattatcctgaaagtctggttgaaaatacggcacaactagatattctttgtagtatacttttcatcttttagccaaacacttgcatgtaaccctgttaattcaggtaggcgtgaaatgggaagtattgtagcataattatgcgatgaaactgtacagtataaaaatgacactcatgaatcatggtggagtatcggatcctaaggcaatcatttaagccttcccaactcaaatgaggcaggggaacctttcaaggaagataggtgcaattaacttttgatatgggttatatgatgccacaaatattccaacttccggatgttatgtacttataatacccagaagatttaatcatttaatttttttagcccaggtgctggcagtaaaatgttcattctttaatctttttccgtaaaatggttatgaattataaatggttcattctttttccctgagattcatatgcctattacatcttttatatgacttagaataatgagtttaatgattatatattaagcattgtaaactaattttatattaacataattataatttatcgttgaaatgatttttaagatatttattgtaaaataaataaacttattatatatgataattggtattagatgacaatgaattgttttaccctgtttaattcaataaatcaatccggatcccccctttattgagccaacccataacttttcaaatctaacttgaacttcttatggataaaaaaaattaattctttttctgtttcaaggaagaaaaaaaaggataagttttgcttaggtcaaaataagcattaaataattctcttcaaaataaaagaacgaaaacataatatagttctttttaaaaaattgaaaaactcttttttttttaaattttagctgttcataacaaattttaatagcaattatttattcttttcattctcattttcacatgaaaaagagtcctctcatatatatataaaaaagtaaatcaacccatgtgtaatgtgtggtgacgagttaagtgactttaagtctttagcaactctaattatgtaccccagaattttttttttacaagtacacaaaaaaaatcctctaattttgacatgtgaaaaattttgtggattgcaacaaggattgataggtttcacatgttgataagtcaagcaaccatgtaacgcatgtgattcaatatggtgaatcgaggatatagagggaagtcatgtctactattttcgtggctggcaatcaaactatcctccttcagccatgcataaattgcaggtaaaatttatcataattaagaaattttggcaacacgctctaactttgcaatttatctccatccattgatctggcgcatgccatagatgctgtctttgtcaagtacctcaccacctcataaatggatggagaaaagtgcaacagaataatattcatgaaaattccatgtgcatggagcatccattaacaaccccatcatcaaaagcatatgaagcctttattattattattattattattattattattattattattagttaaaaaaacaggcacttcataccttaattatctttttttagttagatgtagttgtaataactgttgtgttgaaaaactaactatttgtcattttagatggtttttaagagtagttaaaggataaattaggaataataaatatgtacacaaaatgagataattgtatttattaataggtatagattattattactactgaaaaacaaacactccgtgtcttaattatctttttttacttatatgtaattataacaactgtactattgaaaagttagtatacaaaaactacttgtaattatggatgattttaaaaattaattgaagagtaaattaaaaataacaaatgtgtatataaaatgagataattgtctttattaataggtatatattattattattattattattattactaattatttttaaacataaatcactaaaataaagtttatctttttcaacaaaatatttttcattcacataattaaaaatcaaactcctaataatatacttaaaaaaattcagctatctgccaacttaagatggttgtttatagggacagtgacaaatctgaagagaaattcttgagtgggtataaactcaactcctcattcttacacataatcaataaacaattataactgaaaaataaaaacaaaaataattaatccaaccgtctatcaggatcaattacaaaagtaacaagtaatgataagattattttaattattactttatttacagaatgccaatttaattttatatactcataaaatcataaaaaaaagtcacctaagacgtttaaagtggcttttgtttaactcactaatggaattttcgatatatgaactctttggttcaaatttcaataattttattgatttttatgatatttattataaagtcatattaaggattatttctaattaattcacagtatttttttttacaatggcatgtctatataaattaaagtaaaaagaatgacttttgtttgattaattttatacaactaatacaagtttaaattgtgcatgtaaatttataaattaaaatccatttaaatatttacatgaacaattaaaataagacaagccgtaatgtcaattttagagtctaaattaaatgacgattatttaaattagtgactaaattttgttttttcgtaagaaaatatcatgattcaaaacgactgataataatatttactaaaaaaggaactaaattgatattttattctattaaattcactcaattaataactattttataaaatcatgaaataaaactgatgtaacagtagttttaatgtttatgatattaaccatccctaatttttttttttcccgcatgagtactctttaggaataaacatcgtacttacgacagtgagtgagagagagaggattacaaaagcttgtatattccaatctatagtctagagttaaatagggttccttgttgtattcgaagatccattgtattgttggtggtagtggtagagtgaggaccataatggagttttggattcacacagcattattgtggcacttttctccgttgcacgccaatttctttatgtgttggggtttgaaccctttgttttctcttagttacaggcaagttgagagtgactttcatataatgcatatgacatacacatacggcttgcatgtgttatgtaataaacctccatacataaataaatgttgtcacctcacatatatcatccctcgctttccataccaattaaatcaccttcttgtctttgtgtattaaatattaatcccaaataaaattataagattaatttggtgattaaaaaaatcaaggaaaaaatcatggattttaatctcttctattaacaaaactaacatattgataattaacatcgatcttttaaaaaaaaatgaaaaatcaacaccaacttagatgatttatgaaaggaattttatgtgaagagaaacgtttgttattgataaaacttactttcaattatcaataggattttctttatcaagttaagtttcaaaacattattttacaatttaaagaaattagtttctgaaaaatcaagaataattttatgaatttaatgatcatgcatgcattgtcatctaatcatgattcattgttaatataacttttaaaataattaatgagttgtaaaagttaataaatttacataagataattgtgattgaatcaatatataactctttttctctaattttatttactcacattaaaaacttaaaagtaaaaagtaagggattttattagtcaattgatcaattaacactgataaatttctgctgctctttcaatatatttttggaagtagccatttagaaatgtggcaatagaagcgcatttattttagtcatcactttcaaccagcttagtgaaaattggaatcactttacggttatggctgcagtagaaagtagacaaattgaaattgtatctgacgtaacatgtgataggctaacaaaactgtaattctttcaaaccagttaactgatatatgttaatttgtaacattgctgatgggtcaatgacattccttgctcttcaataatttctttaattatggtgttaataatttcatccctgaaattgaacaaatttgtttaacgctttaacctcaatgaacacctaaaaatgatcattggcccagtatatttatattctccaactaaggtagtctcaagtttaattaaagtctcatctctctaccaagtgtacttgaatttaatctgctctagagcctcacctacttttgtggcatgccaacaacagagtaattaatttgcaataattaaaggatttgaatccatatccaagtttgataattgaagcacttggatgtgtacctctctcatcagtcatcactagcatgcactatgaaacatgatgtacaagatattttgcattgggcagactttggtgcaggatttatatacaaatcagagcttctaaccatgaaagacctcaagacaaaattggtaaaatttaatcttttatatatgttggggtccgctgttatcaacataataatggagctcattgagtggggctatatgcagtcgcttttcaaactctgcttttctcgtgtgtggtggttggaacttttcaagtacccataactttgtttttccatcgtgaactggtagtacagcatcagtcgtgttcctcctttcacaaagtcctttttattagtttgaataacaacgaggtacaatgatcatgaccaaacaggaatcactgatgaggtattgatattaaaattttcaagttataataacttgtatatatatcccatttgttttatacacacgtacgtgctttttgtttaagtagcttgtacagttgtacttgtataaatttaaagcttatttgagactactactagcatatctttaaaatatttaatgaaaaacttgtaaattatttaggctaattaagattatcatctttttttttccgtaacgtatatataagagataatgtgagtcgcaatcatcttagataatttacagtaattttaacttggacaattatttaaagaattaacaataaaatctggctgtacatgtttttcgatctttatttttttatagatgggttttgtgataactcagtaggaagttcattcaagatgatttggattcaatatagatcatgcatggatatgatggttaattatataaaagatcatgacatgaccattttaaaaagtaatcacatgactatgtgatttaatctcaactcgttatgattttatcacttggataagatttactcatttcattttctcctaatgaaagttttattctcacttgatatgtcccctctcgttattgtgatggtagggtttgtgatgagatgaaaaaccaaaaaaatcatttttaagttaagaaacatgccggagtagccaccatgggtttattttatatatgaaaatcttggaaaaaccttttaaaaggaaaaaaaatctctaaaactaccatgttgttggaacacaaggaatattattagtcaaaacaaattttattacttttaaaacaagagaaaaattaagaaaatatttttttaaacaaagatggccctcttcctcctatcgatctatacctgagtttaacaaattatattcatgttttttgtttgcaaataaaaaaaataagtctttcgcgataatcaaacaagaaatgtatctaaaatgactatcattaaatctttatttttaatagacaagtgttgcttgtctgatggaaatatataagtgatcagatatagactcacttcaagggctataaaaaggaaatgactagaaattaccatatgcttcacctattcaaatttggatgacttagatgatgatgcatgaggcttggagattttacagcagtgcaatcaatagacaatgaagtttgaaaatatatagtaaagcccatttgattcatatcctgggcaaatcgtttatctcataccctgatcctgtatacaaaaaaaagacttattagtaaagattaaaaataatcaagagtgtgaatgagttgattgattgagagtaaattgaaaggaggattgggtactaagacaacaaaatgtaaatatattacagatttatggcttgacccgtgcttgaattgtgaccttagctatatgatgagaaattttgggttgtaataattttgagaaaaaaaaatgagagattgctataccatcaatatgattagaagcaacagaatcccaatatttaggatatgacatatgataagtaagagagacaaatcacagaattaccagtttatgcaaagattactaaaatttacttggttgcttgaattagtcgagatactcatactcaacatatgataagatgttcatcagactcattggcatggatgtgaacttagacacaaatatgaacggaataaataatttgaactaatattcgcatgtccatcagtccatttacatcagtacattattggtagacaaggaatacataggtaaaaaaagaatatcataaatcataaatcataattaatcctacaattgagttaatgagaaaagcctaaatcaccgtcttaattacgataactagaaaactaatattaatgattgtaaaataaataagaaaaaagaaaacatttaggactaataaataattataataaaaactttaaactagaatctaattttttataaaattaagtgtgtttgtccacatgttaattaacacatataaaccaaaaaagtgataaatatgatcgatgtaaaaagaattttttatattaattataattacaaccaatgtaagaaataagatcacccatatacattatttttatattacaacttttatgtaaataattttttatcttatttgtttcttatttttgtgaaaaagtcccttttgattcatacactgtcatcttgcgttagcacaggcgtgtactcaggaatgccatcgagctgatcttaacttttcttttctttttttaaacaaatcatagttaaaactgaaaataataatttcaatcgcaaaggaaaaagaagcagaacgaaagtttgttcgatttagttttagtccaatttttactagtcctcctcctttatcaataggtagcaatccattgtagaacaacttatatatttactcttacaatttttattatatttaaaacgaaagagacggggtttcgtatagaaacacagcacaagttataatgtgagcccacttgctaattacgacgtgacttgtttaaagggaagtgccaaatttggaataaggtccacgtgctattatgttgatgcagatgttgttcgccttaaaatggtagagtttctgacaccccctatgtgctattttgcaatggacccacgcattcaactctatttactcatctacgtctttttcccttacccatccaaccatggtccccaccacatactacaaagttctacctccatctcatttgttcaactttctttgtctttcattcatcatcatttcctatttctttcttcttcttttttaaccataggattctggaattttttattttacatttgattaattttctttcattagaccgattcattttgaagtaaaataatatctttaattatgaatttatatttaaataaaaattaaaccctagttagacattaattaaaaaattcaattatcaaatcccttgtttcaatctcttttcttaacattaattttcctcctatcacttatttttaaacttgaacaaacaaactttaacttgcatgtaatgcccttaattatttgtctgatatttaattatccatttttcttaaaaatatatggtaatttatttttataaaacacatgcacatcataagtgtattttctcatttaattaagggattcaaaatagtttagatcgtggacgagtctagtgcggcatgacctaaattaggctaaaatgcgtgctagtttcgaagaacaaagacgtacgtagttgtcttccctttaatattgtttctaattctatacatgtggtagttgcatagtaattgctaatatatgtattccagatgtgaggatttgatggtctgattcaacataaggacttattgtggcccaacacagaaacaaaagctcttccacttctagcgtccttccctagttgcgacttgcgatccagagaaaaaatttcaaaactaaaaagaagctatagaggtaatggcggttgaaagataaatgtaaaaattagaatatgccttatattgactttatcacattccttgtttgcaccaaagacgcaaagttgtacaagttccatccagagtttattcatgtccgtgtgtggtgatttttcccactatatatacacatataaactacgtatataactatataagtatattcatttcacattatatagtttcaacatcttaaggaggtaactttcgcaaaggaaaatatgatgtcttcgataaataatacgtaaatataatacgtaaagtatgattatacatacgtaaatttgaagtataaaaatggctttattctcatgacttttgtaatgacgttactctagcctataagattgtaaaagtattggaaatgatttgacattgaccatcacagttccttctcttccacgggtggaggacagagtgttaataagtctttgacggttgggtagattggcaaattaaagccacaccacgtgggccactatgactaatgacaagagtgttgaattgacaaggaaagttgtatttacattaattttaacgcataaaaatatgcacagtaaaaaaatattaagataaaagtcataaagcgattgatgtggtttaaaaagccaacaaaataaaattatagtatcagtagtataaattaattgaaaataaaggcacatataaaagcgtattgagggttgatttcgctttatttgaagttagaattaaacaaatcaaattaatcaaactaactgagttacattggttcacacattagataattagtttttgaattttacggatgattagttgttaataattattgatgattattttaaataatttttaatttaattttcattacattatgctaaaaaaattaagaagtcacgtaaattacatttaaaaaaaacatatataaataaaaaaataagaaatcataatatatgtaaaaaaaatcattattacaacaactaaaaatatgatatacaattatataataaaaaattaaagacctaggtatttatcataattctcatgaaaacagttatagttgtaatcatgatgataggtggtgccattgactataatatcggccacgagttgttccctgcttcatggactctatcacgccctaagttcaacgatcttttaagattggtttgatcgaaccttagagttggaagaaatgtgagactctagttgggtggtatggcttggtactagtgtcatagatagatctcttcgtcttcccaccactccttttttccgcatgttcaagcacactcactctaatttagggatttaagggagtctcagttcaatttaagatagagcaacttttttcttttatatactatagtagtgtataaaattaaattcttattgtaaagaataaatatataattgaatatatggctgtttaaaaacttttatactttaaaatattttaattaaattctattaattattgttcatattatatctttcacaatttcattatactttaactagctgaaacatattttattcttgaggttatttaattagacaaatactaactaatgatctaagaacattgattaaaggattcaaagtataatttttttattgaaaagtaaaaaattatgttattcataatctttcgtattttcttataattttataataaatattttttcttttaaatttcttaattatttgactaataacactaattaattagactctttaatttaatagtaaaatacacaaaagaatctatagtactaaagacagtttctcactcgttacagaaaatctttcgctctcactttcaagaaagaaggagaggaaagagaaaaaaacgtgggagtctcgatcatcaaagcagagccagagccatatttgtatgaggctaatatccagttgattggtcaattccatggtccaccagccagtagttcctgttacgttggaccacaccacagttttccccgaacgaacgagcccaagtagtcttgacatatatcttgctccatggcacataataaaatcatagttaattattgttggtgcaccagtgtgctgggtcccatgatgtttccatcttcgattcgatgccccaattcagattgttcatggttcacttcatttccactgttcctcccctcctcaacacaacaacaacattgtaagtggttcatcagtatatatatatatatgcatgtccatatatatatcatatatgtataccacatgggaccttgttcagtgttccagctaattcttaaccttatcgttttaaaaaaaaaaaatctctctctctctgggatgtacgatcaagtgcatgaaatgcaagaatggcccaacccacgttctattttcttgggtagtaaaattcaaagaatgtggagtgttggtcgttggacatatgcttttatttgggggatgaagttgaattaagacatagcactccaatacccatatatatgtggtactattggagatacggtaatggatagttttagaacacagaagaggactggattggaatcaaataattattatggatggagatgatgtgtatatttaacatttcattattttactttgaatccaatgaaagctaacattaagcatccataatcaactcgtcagatttagcgtccagggtagacttaaatacacatacgaaacttccctaccactatcacatatttaggagttaggagatctgtaaaatcgaatcttacccatgtgctgcaaaggagagtgataaggtgccttaacttttgaaaatctatgaatatttgtgtaatattaatcatgccaatatcacatacacaaattgtatgttgtattattgaatattttatctcaaaatctactatcaattgaaatttcgtatcatatttataaattttattttaattcaaattgtttaatattgtactaatatacataaaaaattatgtaatatttacttttagaatataaaaataaaaaaatgtaattacatatttatagttgttcaactttgataaaatttatagaaatagtttagtaatatataattaaaattcaatgattagattgatttataaaataacatcattgtatataaaattttgatggtgcaattaatatagcaaatgtgttttatgtcttattaaaatatatgtttttagttgttatcattaattttattttataaagcagtgttttggtatataaaaaaaagtttcaagttgtttaggagttaaaactaatgataatctatagacacacttatccttaaattcgttgaaatgtggacaataccttgaatatgttgagcaaatgatgcaaaggttggaactatttcaatatatataaaaagtctcatgacgattaggagtcaaggtcttagtttataaacattcttctttgatctattgagatgtattttaaaaactaaattgtaagaaacatgtgagtcaaaatagacaatgccttaaatgtgataagtttaacgatgtagtcgatttcaagttagagccttaacattaaaaagagggtttaggtcacaccataaactatagacacacactccctttagcctccagtggagggttaccattccgctatgttgcccttaatccattatgcattttaaggaaaaaatcatgagacttatgtcaggcaaaacgaataatatatacctctaatacaatgaatttaatgatgtggtagattataagtcaagaatagaggtgaatataaagtaatgatactttgctactggctaattatatcattactcataaaaattaaaatggaaaaataaaaaacatgtattttaatataaaaataaaataataaataaaaaataacaattattttagacaaaaatagtttttaaacctatgagattgaacaatatttattcttggcacattcttccacttataacaaggcataatttatgatatctacacacacaaaaaattcatttatttattaataaataaataactatcaagcattagaactacttttattagtataaccttatctaatggaatgagatttgttgttatataaccttttgtctattgaaaaattaaacaatttgtaattgaagccctataatataatttatcatactagcatttggtgtatttgatagtatataatgttttataccaatgaaattattttatagtattaatagaaacttgaaatatctccaatttaaaatttgtcaaaaataaattatactaaaaaaaataatcacaacacttaacattttatttttaataaatactctagctagttgctaaaatatatttcttttcaattaacttattcattgaagcaaggttagaatctttgttgagagagaatatccacatctagtgtatcagatagtttcgaataaaattgtcagaaaaaatacacgggaaccaaaaataaaacttatcaaaatgagcaatatgaatatccttttaattgaactaaatcatgaataagaatagagtcaaatatgaggactgaagttcggctatatacttaaatataaaacgatttgaatcggtttccgttagatattaacccgttataacatgtttaactactagtgccaaaaacatatttggctaaagttaattatttcttcaagctaaaatagttcttattttaattgattttggtacacaaagaccacacattactttcattgtaagcttctgacaaagcaccgatttggcatatcatgaattgcagccatcatgttggtttccaaaattttccataaaataaggtatcaagaactgcaatccaagaagcgcatgatttggcaggaaaggtaataatatgtctagttgataggggtacgtttttccctcctcatatgaaacagaacatgatctccaacccttttcagaactcttctaaattagttccaagagctaggtcggtattcggtaaatgtcccttcgcaggaatatatggtggaattagtttaaaagcttttaattgttagttccgtaaaataaaacttaatgtggttacggataccaggcatttatttcaaaatttagaaattgaagttaatcataatgaattttttagataaaccattataaactactatggtagaatatgtaaactactaaacttttatgtcattttatcccgtactagtttctctacagcacacatcaacggaagccagcatatatatatatataaacacgcaacacaacactggataagataaattataaatgcatcgcagaagaagggatcgaaatcagagtttagtatatatacattcacttaaagaggaggtgtatgataattaagtaccaaaacaaaaatagaattttgcagtcgtgttgaaattaaatttgcttgttaagttctaataggtcccgcaaactaagtattatctagcagagattttctattttatttcttaaaactgtgataattaattactcatatttaaagatttaatgataaatatgaaaagcataaaattgtacatatattttaccgttcatttaaaatttaaagataataaaagtcataaaaatataattttgttacttacgtttttctaaatgtttatctactttttgttaaataatcattactttatatattattatacttttttagtatatttataatattatatattaaattttccctttaaaaaatatatgttgttatatttttatcctaaaacaatacggatggaagtcaagtggtcccttgttaatgggttagaagtaaagaaaaagattcgtgaatttaaagtatcaaaatattttggaggaatatcttaaactaaaataaatattcactctttcttatttaaaattgaccctacacaaattttaatatgatattaaaaaaaattagtgaaaaattgacccccccccccccccggcccaaaaataaaaaagttaggaaaataaaggcttagtaaatcaaaacaaacttgtaacgttaaaaattcaaggaacaaaaaatgcatttaactaaacaatagaagtagttcaactttttcttttcttttctgaataaccccaagatgttggtaaagcatcgagataatgccaatcactacatgacagacgtgtcagacttgtatttcgatctccattcaaacttaattagaaagaaacaatggcaaaagaacccggaaacttgtatgaaagggttgacaaatgacaataagcttgcatatgaaaaaaaggtatgagttattgagacgttatttgtgaaaagaatctaaatatgttgtttcatgtttaagaaagttaatcttataacttgagtataacttgaaaaagaaaattcatagtttaagcatagttggttttaatgaatcatttataatatgtcatttcctaaaccattttatcttctctttaattttatgtgtttttccaaaaacattatgctaccacattttattatagaaaagagaaaaaaaaaggtatgctgtaaatttatctttactttgtaattatttatctttgacatgataaaaaaattataaatttgagtagctcatctatactctatttcgcctcaacgttaattaaaaaaaaaactaagtttaacctattcgagattagatttttggacaatttttcctcacacccttgaagttttatttatttatttatatcagccaacaaagacaaataatatatatcaactggtaccagaagtaccaacaactaccaagtaaagaacatgcatgacagagtcatagttacacactaagaaaggagcttatacacctcttatcttaattataactatactctgaaaccaaaaatagaagaatataaaacatataactactgtctccctccaaaaaaaacatgatatattctttccctcccaccaagaatctactatatatgtaaacttataataaaaaaatcagcagagtatttccacaccaccaaatcagataataaccagaccctgaaaacagcaattccaatgatccacatacatcagaaatgaagcattttgcaagtgcttagttcgtcccttgtagacatgcgcaccttagttcatcagaaatgatccacatacatcagcaattccaatgatccacatacatcagagtatttttattactattaaattaaagtaaattgaagtagttaatggtgagattactattatcctttttgtgataacgaatgtgttttttattaaaaaaaacaatttatccattttaggttcatccaagcacacatcttgaagtttaaaatttctctcggtatatccttttgttttttgccccacacacaaactttcctcaatttacataataacataacaacatatgtatacccttcccattaacacaaacaccccttaatattttaagcagttatatagataaagaaaactcaaagtaatgtgaaaaagaaaataatactaagtgtattttattgaattttagagggcatgtataatttatcatagatttttttttcttccgaaatttaaatggaggtgcaaaagtaaatttgagaatacagataattttcaattaattcctgactctaaactcaaacttgacctgataacactaactataataatatttgaataacaccttacaaatttaaattagtagtatgatttgattcttttaaacctaccttttaatttctagaaaatattattatatacttttatatagttcgaattaaaatatgtttttattataatatttatttgaaaaaaagtggactgggtaggggcaagtttctttacccacgaataattttgcaagaaaagagagcgggggcgtgtttctcttatctctcctgggacgaaaatatatatccattctccaatctaacgaaaatgagaacaagtttagaattgaatattgatctcgaatagataaattgaaaggcataaaagcaaagtgcactagcgacttctacgcaaattaaaaaacgcatttttttttaaaacgaatgaataaaaaaagtttaatagagatgtattatcagcgtaaaagtttctttatattttaatattagctaattaaaaattattattagtataatttttaaagtgattattattataaatgttagttggtccgcgaaacaaaagttgagtaggaaggagtcaacctaaatgcatctccaatgttctcttattttatgaacattagtgtccagtaagaacgactagtaattcgatgttatattaaactctctcttaagatatttatatagaagaaaatacctccaaaagatgattaatatgcacaaaacaatactcaatcagtggggtgaggttgtacacaatgtgaatggaaaagagagagagaacgagaatgaatgtgtgtatatttttctatgcaaccatctcttatttatattgtacatatctcttggttagttgtagaacgttcccaagaattactgccacgatcccttaatggaccttagcactaggcccaattgcagaataagtaacattagtaaaaaagaattatgtgttttttaatattatttgataatgtaaaaaattaagacatattatttataaaaaaatcataaaaagatttttttagaggagttgcattactcaacaaaggatctacgtactattgaaggggtatgtaaatgaaaagttatagatggacatctagtatgtaatgaacaattagtgagaaaaaaattaaagtaaaaaagtatagattttataggtaatatgatttatagatagatagaaatgtttttttgataggagtttaatttattataacttgtgtcccttctaataataaagttgacataataatgacttttgttttttaattaagttctttagaattcgaatcttgattaatatttaaatttaaaataaataatgttaaaaagaaaatatttatttatatgtgtttactgttttctacaaaaattacaaaaattaattaccacttctaaccaaaattatttcgtaatggtgagaaaaataataatttgttaggtacataaaaatatgaatattcatatatatcatagtgatcgtaaatctattggggaaagaacatacgagctatgagtacgagatgtccagatacacttcttaagcagtatggtatggtcacatgattgtacgaagttacggacccgagattgttcaagtatagatcagcttgtcttcatcttttccttttgggctcacctcttctctttgaggtttcgccaagatatatctaactatcaatagagcggggaaaaaataatacataacagagtaaaataaattaaataaaacaatacttttatagctattttataatataatgaaatgattttttcattctattgtttggcaagttaatgaagtataattagttaccttgtaatatcttcaacgcggatatttacaagttacaatccatttaagcaatcatgttccgttcatactcttataagttaaaagtaacaagctagctgcaagagtaattaagtaggtagacgtgtttgtaaaaaatgcaacgtagaaatgataattgtgtctgagtttttaattttaaaagaatagaattgcgattgaatacaagtaaaaagtaatatatactatacttttatgagggttggatgaaatgagatgaattcatttcatcatttatcattctatttcatttttaaaaaaaatccaaatgatgaattaacttgaaattttatttcgcttcgttctaattaatcatattttcatcaattctaacataatttatgatttcttccatttttctttaaactttctacgatgtaattttgaactaatacggtcttgttaagtagtgtcctgctaattaaggatagtgggtaataaataacaaatacaccatattagagattttaaatcacttagcaaattatgcattaattagactagtttatattaatttttgacataataaatgctatcttttacaagaaaaactttgtacttttatttccttagatgatatatttagactctccttgatagcaatcctaacactattagtacatcattaatattaaactagaggcgtaaatttattcattaaaaattaatggatgtattattagtgctttatgacataacacggagtcactcaattcaacaattttgttaatttaataccctgaaattatatttaataataatacttccattttaccagtaaaatacaattttgttaatcatttagtattatttttagaagccttatgtacagactcaatatcacttgcataaaaaaaaactcaatatcactgtctaaactaaaacaatctaatttcaattgatatgcacatttaacagtattattgagattgagtaattgttaagaaataagttttttttttttttttgtaaaatttaacatttaattaatgtttctactgcatcttatctatttttttatttgttgatttcttaatcattgttctcaaggtaattattagtacaatcattttcttataattatatgtaattacaattactactcatctctttatgtttttagggatactattcatctcttacaaatagttatttagcacattttttttaaaaaaagaacagagtttaagaagataataaaggaaattgttttatgatacgaagaatgtctcacacgaaaagtacgaaaacataaactaacggttgatccatgattgaatccatcccacaatgaaaatatgtttagagaatataataaaatctactaggattgaaggcaatgacatgatactatgtgcataagttgtggcaaccctttacccaagtttaataaattttattttgctgataaaaataattttagtttgcttttaaaatttgatattgttactcacacattaaaatgtacattttaattaagagaaagattagaataaaaagaaaaaaaatagatatagctagtgatgtgatagaaaaaatataaattataaaaatttattataagtatatccttaggtccactttacgtgtagctaggtcgcagaaaatgccttccccacttacaaaacgaaacttttgatttccttaggcgtgtcattgtcatggagttagcagtgtgttaaacacaccagagggtgatagcagggagaaaaggacaggtacaaggggttttgattttggagtttgcattagggcttgataaagatggttttgctctcacattcatacaaataataataatttcacaaatcataatatatataatattccccctttattattatttttattgtaagatcttgatatcgtggctatataaatatatatgcgtgtacaagcatacacgaagcgagcgagccacgaaaatattcatcacagggttttggttcattattccaatttttgtttttcccttttattggatattagagtgagtaagaaagagaagcgagagaaatgggaaggggaagagtggagttgaagagaattgagaacaagatcaacaggcaagtgacctttgcaaaacgaaggaacgggcttttgaagaaagcttacgagctttccgttctttgtgatgccgaggttgctctcatcatcttctccaatagaggaaaactgtacgagttctgcagcagttcaaggtatatgtatattcactaaaatgtaaacaaattacacacacaaaaaaaaaaaccttctttcttgttatcttttttgcttttaaagatcttcaaatctctctctccgttgatttttttttttttttttttgctctttgtttccagacagctggcgtttccccccgcttattttagtttggtttgagaaaacacgagaaagaaagaaaagtggatttatttatttatttatttttcattttccactgttgaggtttttccgtttccgtgaaatgtctcggcgtttttaggaggtttgagggtttctgcaaacgcgttgctgttagatctgcaactggaaacgcgttaaacccgaacagacatacataaaataaattaagcaagagaggatcactgttttattgtatccactctatttttgttctttttttctctgccctcgtttctcttcttctttttgggtgagtcttgagctttctctttctttcccatttttggtgctaaacccagcatttgagattgccgtttttctgctccgtcaaacagatcaggttcaaaagcgtttcccaaaagtaattttggagtctcgggtcaggcctcttttcggtgtaattaggtgttgtgtaaaagaagcatatatatcaattattttgttccatttggaagtttagcacctagcctgctttcggtttcagtcttcaaacatcgctccaacaacgtaactcatctcttattcactgtcaaattaatacgcccgtttttaaagaaaatatttatatgtatctcatccacatctcttggggggggggggggggctagggtttctttttttatttctagatagttttttttcccctcctgcacctctcaccatatatcgatctctgtagtgttctatttttctcccatttaaaatttattttatgttttgccttagcttgcgtgattttctattttggtcaagcccttcatttacttacagacactttggggtttgtttgttttcgatccacaatcatgaccaaaggttctcactgttgagtcaatcgcttgcttgattaatttctccatgttactactgacagaagatttttttttttctttttcatttgaacgtttttcatgatagagacattttgttaaatcagagtggacattttgttaaatcagcatccaattcatgtttttcaatcacctcattattcctatctgcatagacagacgatttcttttaattggtttggcatttcaaataattaattaatttgcgtcttcctaaggttcaattcgtatattttctttgtggaaacaacactctggtcatttcagatctgattattgtaccgaaaattctgttagtaacttggtatgttccgtcctttttcttctgggtttataaggtggcactccatgcaaatgatcttacctcacctacattcaataggacaccagttttcttttctataactgataattgatttgtagttggctccttttgatggcctaatattatcacgtttatcaacgaaaccagtctcatgtctcatcgtcaaatccaatactacccattttgtacaatttattaacattagtaattgggaaattgtatttatataattagtttttacaatttcttttataatatacagactaaatagagatataagaagagaagataacgaaaattgtgagataaaatacttgatttagaagagaaaaaaatatagtattactataaaaaaattgttgtgtaaacaattttatgttgaatggagacaaaaacaaagagattttttcttttctttttattcaaaaatgaaaactttagaaaaaaaacttcaaaattttcttataattttttttcttcagtttaatttttttctcctcacatcttgttttctttctgctcatctaaatagaggattggtcccttaaattctgtcatcggtgaccttctctggtcctggtcaagaaattcagaggttgatgtcatatgatgtttttcgatagtagccctaaaactaaaacgttacttaattgtcataactcataagatcttccaatccagctcgtttaccgattttctgcaactcttatagtttttcctatatttatggagcattcccatccttgcctccaaatgggggtttcttcgtttctaacttaagttgttcctgttctttgcttggaaaaaatgtgtgccctttttcttgttgatgttggacttaaagcaaaattgaagtaaaaagatgtcttaataaatgggataatttgtccttgagcaataatttatatttgtagaatgtagttttactcaatttatcttggatcattttgtaagtactaagtacctgacatctaacttatacaaatatatatttttttctcaaaacgtgcagcatgctcaaaacgctagagagataccagaaatgtaactatggtgcgcctgaggctaatgtgtctacacgggaagccttggtaatggtgaatagtcccatctatcgtatttaaatgcattttttgcccattcaatttgcctaatttgatggctgattttattacctcatccatttctgtttttgttttgcttacaaggggattggggttcctgggctgcaactatttactataattatccttaacgtggggtatagctgttttatattacgtttagcattgtcaatatatgctttgtctcgtggttgatcagaggtttaccttgttgattacataaacaactggcaagtgcagtaaaatcaccttatagttccagcttgaaaaagaatttcatggatataaataaaaatactgaaatcgtaacgtatttttttttttctttagcaaacaaaagttctgctgatttttgttcattgactgatataattgaatttgttatgctgtaaaacgtttaactaataacctaacgcaactacaaattctgaatccagggatttgaaaaaaagtctttttttttttaaaaaataaagcttaatattgtcatgcaaatctactatcataatatacagtataatcaatttagctcattgtcctatttttgaaaaaaaagttcaaaatacaatgtgtttgttttgacttctattcttattttcagttaatacactcttaataattataaaaatattaacttgcgtatatattgttgtttgatataagaggttttgtcaaagcaacaaaagtcaagtgtttcgtttgacttaattcaagtgtgcattaattaatatgcgttactttttaattgcatgtggacaaaagtatcatagagaaacagcacatattggtttaatttcgaagtccctttagtcttttgtatcatggaattcattttttaggcaccctaaactttgttgtagctgtatctgcatctaagacttcatgctcatttaaaattgatcctacagtggaccatagttttggtgatgttgttacaaagatacatgaactttaaggacaacttcatccaaaataaaattaagtcatttgccttcaacttgttttctttgttaggctgtttcaaatacgtttaagattattcatgatcagtataactgctccaaatagtttcccacacacaagaacttttgactgtatgtcttctaggcccgtttagtgcaatggctagaaagtatccagtgtttgaggtgggtatggggaacacagaaattggaagtattttcggatcatcaaattggcatatggagcaccatacacttacctagttttatacaggaaatcaggtttcataacgtacacgaaagactaagaattaatttgattacataaatttgatctagttcctaaatttatgcataaggtgcccatgtccttcataaggacttttaaggcgagcctccaattatagcctaacgaaatactagtaaaacactttgtagcagaccctttattattatttgaattctttttttaagcattatttgaaaattttaaaacttagataatagtgtaaataataaaatcttaatatatatatatatatatatattgtcatttatatctccatatagtagatgacggatgtaattttttgttcttatagtaacttttattgtgtgagcctataattttatttgtgtgtacgatcgtgtgccattagtatcatgtgccaatagtacttccttctctcagttctccgatctaaatgtgatgagccgaatttgtctagttgtttacaaaaaattgtatatcaaggtccattttttgacacaaccctttaagttttgcagaataagcattgctcttatagttttggttctatccagcaaaaaatgtttcatgagccatcgctattttgtaattagaaaatttcataaatatataaatctaaaataattagaataatcaagtttgactttccctttgataagtaaattaatttaagcaataatagagccaaattaggaattgaaaatgctatttgttgcaataagaaatgcaactatgatatataaccgcatgctctggtctgaacgctttgcttatactctagctcactatatactcagtatttgccctttttgtaacaacaaaaaattggcagggattgaagctatgcatgaatttggccatcgataacatatgtgctgaaatgtagctactcgcaatcgaagtagaaaaataaaatttaatttgagggtggatttaatttgccttatgttattaatagtatctaatttacgtgccttattttattattgattgctaattaacgtaatttagtgtgtatgttcatgattgtgttttaaacttgtgttttcatgttttacatattcacgtcatcccgtcattatcatgtttatttatttatgtatcagcataattttatttgttgcaaatatgcttatattattattgtaacaaaaccctatttaacaataacaatcatttgcgacgtcagttgtttaattgaatccattaaatcttttattcttatggttaattttttcctcaactcgtgtgaaagaatcgttccttaatttttgtgtattccatgcatgttttctctctattttctactcaactcaacgacttatcaaactttaacacgttgaaagtttttggtatgcctcaacctagaaaaaagataaacgaagtagaacatggattactaaatgcgttagagtaataccaattaaaaaaaaaaaaaagatgataaagctcagaaaatgaatgctagcatatatgttttataaaagcttttgttattattggctatggcttacacaatattttagtaactataaatatgactaaatttaatttcaattattcttttaattttttattacttttaattctcataaatttatttttttagaagtcgctaaatgtcagcattgagtaatatatgactattcacgttaagttaaagatgattttgagatgacacatattgtaacgtgttaaatatcaataagtaataataatttttttataaaaataaaatttataacgaataaaattagtattattaaaaaattaaaaaaaaaaaactaaatttaactatgtttcaaagactataaaacatattttatccaaccctttgtgatagctgagaggtttgcaagtagaatattgctcgaatagaaatgctgttgtcctgaccaggtcactaaggaaaaacataaaaggaatcgctatatatgttcctttaattatatagttttttcctttaactatatagtttgattttgctaccacgactataggagttaagcagtcaacaggagtacttgaagctgaaggcacgttatgaggccctacaacggtcccagaggtacggatgccctattgggccttctaatatatggctcatattattggttgataatatatagcatccaagtcaatgttgtgttgtatttaacttttaccctctcaggaaccttatgggagaagatcttggtcctttaagcagcaaagagctcgagtctcttgaaaggcagctagattcgtccttgaagcaaataagatcaacaagggtactcaagtttccaacttttctttgccaattaacatatgaaattgtagatctaggaacatattaagagcccaatcttgaaatatccctatgtctatatggtcaagcccattttgagagcgttatttaagtcatgctctgagtaatgtaagaaatggaaatacaagtattgggggcacattattaccattaaaattgaaagggtaaagtaactaacaaggaaattactgttctttaatttctctattgattagtgaagaggagaaactcgttacataattctaaatatagatatatcaatctcaaaatgtaatttctaagtaaaaatgtagtatgtgtatgtaattttgttaatttgtttccttgatttacagacccagttcatgctggatcagctctctgatcttcaacgtaaggtatgtatgaaaacaattttactttcctttgccaccgtttaccatctcatgccatacctccggttgctcaccaatttatacatgtcacttgtgtaggaacacttgctgagtgaagctaacaggtctctcagacaaagggtaagttagaaacttagaattcatcaacctgtatatgtaaatatgcatcatcccacaaagtatataacatatattaatacattttaaaatagaattaagaatcatgcaagaccaaaacattgctataagatacaactgatattgtgatatcgaaaatgatgggtataaatgactttatctgatttgtagcagttggaagggtatcaaataaatcaactccaactgaatcccggagttgaagagatgggatatggcaggcatccagctcatactcatggtgaagccctctttcaacaaatggagtgtgagccaacgttacaaattgggtatgcactcaatgctaattgactcaatcattgatcactttacagttcacaattgttaattactcttctaaactgtatcaaatggtcaattcactagtaaggtagataagtgcatcaatgacaaatttggttcactagtaagggatatgcttaggagtgcatctttgatgtaaatatgattagaatagatgtggggtcatatgagttggttgatttgattagcataactataatggtatttagaattttcattcttggcctaagttttttagatttcaattattttttaataatgatactatttttcaagtgcaggtatcagcctgatccagtatcagtggtgacagcaggcccaagcatgagcaattacatggcaggatggttaccatagttagcgtttcctgcataagatccactgcaccagcacatttgccgttccaattttatttgaaaacgaaaaaaaaaaagaaggaagaaaatggctttgatgtaaggaagatgtaagtgtctaccatgtttgaagtaggaacaaagttaagcaatgttgtttgtgtgtgctaactctttcataaaactgcacttctttgcttcggttactgtttcttcccttttaataagagtattgatagataaattataaacatctacctattttttcatccattccatttttatctgatttctttcttatcactttctcaaaatagaatgcacgttacttgccacttaggagttaggatgatataaatattaatatacgaatgaattacctgctttaatttttattcagcaaactacatgttaatgatctattaacatttctttttctttctattcttctctttttacattgactacttatcataacttatatctatacttatgtggtttaggatccctgcagtttagaaaaaaaaaaactgcacggttctgcagttgcatccaacggatgcttatagcgttaaatatatattttatattataattttatgaaaggaatatttttgtatggataagaatctcatatcccgtacagttctttatgcaactgtagaagatcgtgatccatccttatgcaccgaaggcattgaatttgaatgtttaaaataatttttattagaataataggaatacgaacaagaatactgccagtactagtaataattgtttgcagcacccactttgttggcctgaatggctgaatcacgtgccaatgacctcagtgcatctaatagttattaattaattaattatagtaattgtttcgagttttgacttttgacacgttagctagtttcagccaacttattttttcaaaatggaccttcacttatgtagttatgttatccatctgggttttcattattaaatataaatgaacgaggaagatcatttttggaaacatcaatcattatttaaaacttttttttttggaaatctttaattaaatctgcttttgacataaaataaactaattaaaatggatatttgaaaattaattattaaattaaatgtatttttgacataaataaattgattaaataagtattgaatgcatattttgaaaaattattattaagaaatttaaattattaaaatgatatttatctaaaataaagatttttaattttaatagattgtgtaagataaatttttataatattaattaacacaattattttaaatacaatatctaaaataatttttaattatatgaataattggatgatgatcaaagtataacgttaagttctaaaataaattgatataaagacacattattacattaattaagttttacaaaattatagtacctagcaacacaatgtgggcagcatgtggctttgacttttttgactagtactgttaaatgaaatgagatgattaaaaaatgaaacgaatatcagttaatttaaatcgcagtctggtcatgggacacgtgtcgattaaggaatcagcacgctaagcctatggctatgaggagagatagtaatagaaggagggagatagtaaagagagaaatccgaatagaaaagaaggtagcgagctagggttttggcgcgaagaagaatggggaagaagaaggtggagataaagcgaatcgagaacaaaagcacgcggcagataacattctccaagaggcgcaatggattgatgaagaaagctcgcgagttatcgattctctgcgatgcgaaggtggcgctggtcatcgtctccagcacgggcaagctctacgagctctgtaacggtgacaggtacgcgcaaaccgcacagtaccttttatgatttccgttccgtacaccgtagcctagtatatgtgtccaacttctttggatcacgtcacgtcgcacatgaaattagtttcgttttatgccttttcttttgtaatttgatttgtttgctttgctatgtaattgcttttcgttggttggaaactaaaaatggaaatgaatgattaactaaactagtgcaaactgcaaaagtagtatccattagctagctgagtcgtgtcaaattgtcacggttttcggagccttagatatggataggaactacttgttaaaaggtgggaggataagtttgtggtgtcagctctctgcactgctgcactactggaagttgatttgatataatatccacgtttatgctactagagtttgctagaacacattttttaaatctattttttacttgaagaaaagacttcaaagtgtagataatttatttatttgtgctggaatatatatacagagagagaacatttatgctgaaagatttattgatttgaaaagagattttcaaatgtacgaatattgtttccatgagaataatgccaagaaaaggtattttgttacaatagtaaaaagttatggaccaaattgtttttcacattcgtctcaatcaagctggagcgatatgctaacaaatgttcaatcgctttatttgtctctcactttttaccttttgacagaaaaactttagaatatcttttaataatatattttgagcaccttttgagagaaaaattttagaatatttttcaataatatattttgaacaaagattttgagtttaagatccattgtttaataaatcttctattaaaggaggagtcaaaatttccattatggagaatgaaatcttgtataagatccttgaaaatctatacattttgaaaataaaatatattcttttttactttctctccctaatagctttaggtaggaatcaacagaaagaagaagaaatcaaacataaaaggaaatgaaaaggggaagaagaaacataatatgtaggctgtggcggcaccgaagtaggggcgatggcccttgtcggtgctgagttgcacacgatggcaccaagggaagcgtgacactgtcgagatgtgtgaagaagagaaaagaaaagagggggctcatggtggttggggacaaaggaaggggcgggagtcgtggtggtcaagagcgaaggaagaggaggggcatagtgattgggggcgaagaagggaaaagaatgtggtggtggttgagggtggagaaaacatgaagggaaaggaagaaaagaggaaacgtaaagggggaggaggagaagaggaaagaggaagggattggtcggagagaaaaggaaaaggaggggaaggggagcggggaggcgtagagaaaaaaagaggaagggactgcacgtggattgggaaaaaatgaggatgaagatgaagagaaaaaagattaaaaaatttacaatttaaatttgaacttaaaaaatagatgttgcattaaatgttgcctttaaaaaaaattagtgttgccttttagttagtgggcaaccaatattggtaatttttttaatctattcacaatagactatgtattttttttaattaaatattttgcaacctataaattgaacaaatactgtttatattttgcacaccaattctcctctccttattatcctttatttctcaatatcttatttgcaatctcaatctcttggtttattttcattcttaatagatccaaatcagtatattggcaagtttattgcattttttttgtagaattatcaactttctcatttgaatggaaattctcaaaatcttccctcattttttccctacttgtaaccaacatcatcaatgaatgttatgtaaaataatcaatcttcttccataaaaaattctcaaaatcctcctccattttttccatatttgccacgaccaatgaattttatgcaaaataatcaaatccctttcactgaaagttctcaaagttctcaaatttttctttcaataccataaaacaattctttcgtgttttgtaagcctcccaatattaagaacaaccgaaatggttagaccaatttattgaaaatggctctaaaaggacgaagatttttgcatctgggacatattcatcgtcatctaattcaaaaacatcagtacaagattctgaagctgacacaccgtctccaattgtccgtccaatgggtcaaaaggcaaccaaaacgaagagcaatgggataggagtagaaacatttaccaattctgtggacttaattggtgtggagaaagcaatgaatgaaataaacgttctcaatgtcagactagcaatcttaaggaagaaagaattggaaagagagtattacgacattttaatgaatgacacatttacaaccgaaagtcaactccaagatcgttaggccttttgtaaaataattaggcgtaaactaggtatgtagcattaatttgttaagtagttttaatttgttgagatcattttttaatttgtatttttaggaatcgggtttgatttgtctttttttattattaatttgtaaccgtctttttttttttgaaaactaattgttataaaactagatgttatgaaactagctgtagtcattataaaactagtcatttatataatttaatagtcattataaaactagttgttgcaaaactagtcatttatataatttgctatttaattgttcatgagctacttacgtgtgatgcaacaacaagaaggcaacaacagtcaatacagaaggactagaagagtgattaatcgcaatcgtgaagatggacatctacgattgatgaatgactactcagaaaattcagtatacacaaagactcaatttcgacgtaggtttcaaatgcggtgacaattgttcattcaaattgacaacactattagtaatcacgatgagtattttcaaaggagacttgacgttgtgggtagaataggtctctcatcattgcaaaagtgcactgtagttattcgtatattggcacacggatcacctgtcaattatgtggatgagtacgttagaattgataaatgcattgcaactcaatgcttacaaaaatttgtaagtggtgtcaatgagatatttggacaagagttcttgagaaggcctaacaacaatgacatcaattgcctattgcaaattggagatgcatgaggtttgtaggcatgttaggttctattggttgtatgcattgagagtgaaaaaattgttcagttgcatggcagagccaatatcatagaagtgataatcgcaaatccacaataaaacttgaagttattgcttcacaagacttgtggatttgacgttaatatttggagttgcaatttcaaataatgacatcaatgtattaaatcaatcgcctgtgtttgattatgttttgcaaggtcgaactcttctagtacaatttacaattaatggaactccatataatatgaggtaccatcttgcagatggtattttatgctgattgagccacatttctgaagaccattccaatgccacaaagccttaaaagaaaattatttgcaaaatgtcgcgaagcagcgagaaaggatgtgaacgagcatttggaatgctcaaatctcgactcacaattatatgtgttccatcgtgtgcctggaacatggatacattgaagtatataatgttgatatgcatgatattgcataacataattgttgaagacaaacgagatacattcggtgataatgtcgatgttgattatgaccatgtatagagatgaaaatgggacagattgcctatcaggggtctttggtcaaacctggttaaggcctggcctggtctgacttgtttatcataaaggtcaagctaaagttttttgaaaagtctgttgaaataaaaagaccagatttaaactttaaaaaaagtctgccaagcctatcaggttggcctatttaatatatatatatatatatatatatatatatattaaaacttaaaaataatatatttatttttctaaaaatatttttcttattatgaaggtggatgatcaatcacttcaaaaaatcacattgaagatctcataaaatgattattacttatttaaaaatataagtaagatgttgagacgttttttgtttaaaattatttcgttaactttcctaaattgatttaaagtattttgtaaaattaaatttctattaaaaataggtttttttaataggcttgtaagcttaatcaggcttttaaataggtcagaccaaacctaaaaaagcctatcacatgtaactaggccaaaccaaactttatgtttttaaatcaggtcaaggtcagacctaatcaggcctaatcttatgcatacaaaaggaattcatcaacaactttaaacagacttggaatagcatatttgaaaacattacaattacaacaataataaaatttaatttttcgttagcattaatgtgttgcgttttttattatcaaatttatgtattttgcatttgtttaacatttagtcataaataaaaattaaatttatgctcattttcaatttcttaatatttacaaatttttttcttccatgttttattaattatttattttatttaataaatatttaaataaaatatttaaaagtgaggtccatgtaatatttaaaagttatctaagatcccaaaatgagatttactactaaaagaaaaaatgagaaagattttgagagatcttcaatcctaaatgacgatgtgaaatccattaaaaaagtgatataaaatcctaatttgaaatctctcattaaagataccttaataaaaaatataattaatgaatataagtctataaatggtgataatcaaatcaatatagttaattacttacatctggttatctattttgtattatatatgtatatttatattgctaatgttctttttcttttatgttttacttgatcaatgacagattttgtctcaaacatataactccttttttatatatacaataatcattgtataataatatgaaactctttattattactacctatactatttattcttaagttaaataaaattcttaaatctattaaaaaataatacatatattttgatcgataatataaaataaaaaactgtcattcaatctcaatgtctccttatagtcttactctccatgtgttttcactgtcaaaccgccctggtgattggtttaatatcctaatttactttttgccctacttgttttgttgaagtcggttgttcccttcccaaggtgtagctttgcttcattttttttccttctgccgatttaagggtttggtattttcattatagctaggctactcttccccgttatttcctttcattattcaaaacgattcagagtattcatgagtgtaggcttttactataacgtcgacggttatagattatttggccaatcttttctaacatggaaggtagctctagaaatttcttaaagtagtgatcatggagctatgaaagaaaacttcaatcttataatcgtatgtgtttgagtgaattgacaaatagggtgtctcattttggtagtgaaatagaaaatttggattataaatgggagtttagtacagggtgttttggaaattatgttcatgtacttagaaaatcacatgtatctaggtaataatagttcatgcactagtgaattaattttctctagaaagttccattgcttactataaatatgtggactcactaggtatattatcaagccaagcaaaagttaaaataaaatcaaaaaattatttagtcccaaataattttcctcttatgtattttattttctttgagttttcacctctagaatactaccaacatagaatttacttcccataagttcttagtctctcaattgtaataaacaattttatttgaacatttatacaagttcacgactatcaaggttgacactaacatcaaacttcatttaaggtgtcaacttgtagataccaattattactattaatctaagttagttatcattatagtataattagggtacaactccaactcaatacaaatacttttgttctaattaacagtcatctgcaaattgaggcttacaactgagttttcagcttgttacaattaacacgttgaataacctaaaaaaataaattatcatataaatgattcaacaatcagaaaaaatgtttctaatattgagtgaccacgagcaaagaaacactgtcaaaaagactcccaatgaaaatatcagttaccaacattatagtaagactcaaacatatccaaggttcattaaaaaagcattatcaacgatagcataaaatttgaattaaagagatctagaaatcttgagaaatatgcttaattggaaaatgaaaaattaaatctgacttaaaaatagcgttcatgtatacagtgtgggattttggacaagtataaaaagccttcagatcaactgcatggtcaggtacaggtgtcactttttcataccctgtaccatatccagggacgtggcagaagcgtcaattgataaataaaaaatgtctgaggagagtggcggagacaggaattttattgagagaagatgaacataaaaaaaattataacataaataaaaatatttcaaaaataatacaaatttaatatacaaaaaatttaaaaaaatctattacaaaaattaagattacttcacttaactcttattctacatgttttcatattgttaaaattatctataattgaatatgtattaaaactcaaaacaattttttttaatgtatgtaatcaaagaatcatcaagaaattggtctttgattctatttcgaagtctagtcttgattatctttatagttgagaaagatctttcagtaattattgtagaaaatagaagagtgaatataagtttaatcactctatcaataagaggtaaatgatgaactttcctcttcttgctagccttgaataaatagtagtttattttattttagaagattaacaacaacaataagaaataggaggagaaagaagaaaagaggaaaaaagaaaggaatgaagggataactggaacctttctctttcactaattctagtaccaaatgacacaactttttttactatttctgttctcttgggatttgtatatttttttctcctctgtgtgtttatgtgtccagacctctctcttttatagtgttttttatccctcttcctctttattctttcccttattatttttttttgttttatcatcttcctttccttttttctttttttgttatctctttttctctttttatttttattacattttcttttctttttttatatatttttttctcttttatattttctttcctttttattgttctaatattttattttattttttttattacatttttcttatatttttttctttcccctttcacattttttaatatttttctttttttttctttcattttcattttattttcattttttattaattttttaaaaaatatatattttttatttttaaattttaggggagtgatgacccatcctagtcccttaattccgcccctttctgagtggtttaaatccaacatattttaacttctatttagataataggtgcaattccgaaactttgacccgaggtcatgtatagaaactcagcgatggcatgtggaagagccaaccattttcaaagcttatcaaatcgttttaagtaaaaatacaaaaatgattttatgtatagtacatctttaatatgagttttgttatgaatcaggcctagctaggacccaacccgaatccaagtcccgttcctctaaaatgttgaccctgcaaactctctcggagattaaagtcactttatgttattctaagaacaacgaataatttctctcttcgaatcatgggcctttagcatagagatccagtccatccttactcctttaaatactattggcatctgtgttataattacgcgcatttattactattggtctttgtgtaaagttcttcactaacttggcatcggagtgtgcctttggcctttgcagatactctcaccaccactcatgcagactaggttcaagaagttcagactactaccctcacacttcaaggcaaaaatcatttatcggtctacacctattagtcctagatagagtttggaccaccactgtcaatacttcgaatagaacaagtctttaatttaataccatttcttgaatcaattactcctaaagcttattagtgtgtttgttttatggttttttcgtagaaatcttactttcacaaaggattactggtcaatgaatccgatgtgagttgattcacaccctaagttgtttaggtaaaaatatgtgtcacatgtctctaataccatcatgaactaattatcccacgaatttaaactattagatgaaagcgtaacatagctttgtcagacatgagactacacttaagcatcttaccttgttctaaaatattgcttagaagaatgggagcaacaaatttaaattacatctctagagagaatagtcatatatgatctaacattatattatgttatataacccaaaacttagcttaagatgacgttttatatctaacaatattcaaggaagccctaaacattgagaaaatctcattcaaagtcgttggcacaaatgtgtgtctaaatgaatttattttaagtaatactttttaattttttatataactttctgatagaacttcaaatatatatatatatatatatatatatatatatatataatttccctaacatgttagacagctgcggtttggttcctaaacatttattgaagctgctatttgggtgtaatttaatgactgtttctaaatcaaattggtgcaacgattactcatgtcttgtaagattaaatcatttaggtattattcaagtccgatctttattagattttacttacctcttagttaaattttggattagtcaaaatccctttctcctgatgaattggagggttaagaaaaaaacatttgcaactctaagtcacattttttaggtagttactgtaatactcctaattgtcgacttcacaacaactcacatatcatgacacttcacacagtaacactttgctcaacattcttgttagtcagaactttctaaccttctgatgctattttttttagacctcgagaatctgtttcggttgatgtcaaaatcaatgactgtcccacaaaccaacataaaactttttaggatactttgtcctcactcacacattttaggtcaaccatctcataactactacaaaccaagatgcttaattgttgagttattaagttataggctagtgaaaaatagatggatcttgttgatatatgtaatatcaattaatttatttaaatcattgttaattatacaatcgcacacatgtacaaaacctccatattcctctcattatggtgtgatttgatcgagatattatagttatgaggtagaaagatatgatccaatagatgatcttctgagtttcaagcctataaatagaccttatacttaacttcaaaaggagaatcaatttaaaaacaagtttatttaatcctgcatttatttattgcttttccttacaatttttcttgattgcttctatttattattttgtttataaaccttcacttatagctttcaacctttacttttcaacccaaacctctcttcagcaattggttttccagttggtaagagagcattgaatttagctttgatagataaccactgtccaataatttcaagaacactcatgtgttgtttacgaagattgagtccacaactcataacaagtatgaaaattggtgtagacgttgtgaaggtaagaatcaatagactgcaatataaagtacacagtaaagcagtatttttctcctaattttctcctcagtatttttcttcaacccttgtccaattcaccacttctcaactaccttggaccatgaaacatagttggaggagcccaataacttcttaattgcaatgacgggtagaagtgaaggtagaaaaaaggcccagacttgacccagaaacttaatcttttaattaagttgacctccaataaatccaacttatacaacactaaggttataagttgctgattaaatttaggtcctctggaattcagatgtaactgcaccgtcctgcagttgtaatccgacggtccaagcttatatgaaattgatatatatatatatatatatatatatataaactattatatcgcatatatgttaaattaataaaattattttaacagcttagagcctcagatcctctacattgttttttaagtgtagaattataggttaacggttaacctatagatacaacttcagaaaaaacaagaattgttccttgtcaaagctagttagaacatagccaacacgaaagagagacaaatgcaaagtaggaaagaagctacaaatctttggtacttaattggccgcagaagttgagatagattagattgtgattggaggatgatatcactacaataagatggtgaaattgaaagaatcaaataagaaagatcattgagtacatacgatatgatagatatgtacattctgtaaaaaaaaaaaaaaaaaaaaacagatgtatatatttgatgcaaacttaacacatatttattctaccatattaattaggttaagcaataataaaactaatacaagtcctgtccattaaaactactaacataacaccaatatgattaaccctaatgttctttttaatacttctactaaacattcattttatgtttatgaggttgttttagttaatatgaactaaaacccatgcctgaaaggaccaggtgtatagtctccctaggtaaacaattgctaaagcttatcatagactgcaatgagatgggatgacctcccctccccttaaatttattattttcattcatcccatttttgtacgcacactaatattaattttttaactactagtgtgtttaaatacctcctagaaccaattttgaccctcaaaatcatggtggaaaattgaaaaagttgaagcaactatttgttgctttggctttaacttgattttagaattgatattgacataattgaaagttaatccaaacgcagaaacatatccctggctagaaaaaagacctgttaagctacttgcacccaagcctatcaaatatcatgcgtttgttgttgtttagttatttcaatattagaatgaaaaatccgtgaatttaatgttctcagtttggccgaggttgtgcagcgatattgggatcatttaggagcaagcggtactgacacaaaggtacggaacttttcatgtatgctagatatattgcacttctcatacaagacatgatagagtaagaaaatctaaccgtagctgccataagaacatcttgaaagttatcactgtaaacatatataagagctgaactgtctcgtaacagttgcaaggtaacaaggatgaagagagcacttaatattgtcaaggtatcatatagatagtgtggctaacatgggaactaaaacaataagtaggagaatttcaatatgaaagctaggggtgtcgatattatatttcttaatgttacaataaaggtaaagttctcaatacagcaaaacttgcatattcaagttttgttgcttttatctcaggttctctctctctctcgctcgctttcacttcaaatgaaaatatgctttattatgcttagcttcgccaagcttgtatttttaatttctttttgtctaaaaaatgacagagcaaaagaaagtgatacataaaatattgttgttttaggggaattatttgaagcaaattatgaaaaatgttgaactgacgcttggaaaaacatatcacaaccgagattattgatattataattattatttggtagcagggactccgctttgaaattgcagatatctggtctggtgcagcgttttctcaagtggtgcaaaggtgattctttgcattcttctttctgcaacgttaaggtatgaacgaatcactgatctaattaaatttcattgcaggcattttggtgtttctgaacttgagcatctgagtgtgactgaccttatggaactagagaaagtggttcgttctgatctttcgcgaatcagatcagcaaaggttaaacactctattcagtgaacgaatttcaatttattaagtgtaaactatacatcactcagctttggcaatgaaaaaaaaaaaaaaagctattgttctaagaatgtcatgcaagcatatcttctttatcctctgggtttcttaaaacgaataaagcactttagatagcaaatatcatttgagttttgaacattgcatcaatgaaaaaaaatcctgtagggatatttaccggagggaggattgattaaaatttctatgaaactttcttggaactctaccagataatttaagcttatacttttagtacaagtttatagcatttatattatatggcctagtaattagacagtgtacacttgtcaagtcccgaaggcagttagtagtgattcattacttttctttgtcaccggtgcacagataatttctattattttcttatacgtttgaatgcaagatacttcaatcacccccgagttctttctaagttttattctaccgtcttaattagatcaggacaagaagtgtatgcattaagagacattattcactttattgttgaggcttctcttaacaataaaacaagctagcccccatttcaccggacaaaaacgctgaatatagatgaaagagaagaaattgtttatttattcaatattatgggttataatatgtgtatttatatatatatatatataaataaatcaaaagataaactaaaatatataaaaataaataaattacaagataaattaaaagataattttttctctcttaaatgtcaattgtattaatactttccctcaaattggtaaatgtataccaatcatatccaacttgccaataagtttctaaaatcttgttaaaggaagccccttggtgaacacgtctatgaattggagtctcatttgttgtgactaaagattgttgtccattttttcttcgatgaagtacttatcaatttctgtgttctttgttctgtaatgctagcttgaattatgggccatactaataactgaattgttaccacaaaacagccttataagtccttcctattgtactttgagaggtcatcaagaataatcttcatccattacctctcacatatatattgtgttggaaatataaggtgaattagatggttaagaaaattaacatttgattttatctactaataaaactaacatttgaaaataataggaatacttacaataaacaagagggggtgaattgattaaaatgttagtattttaaaattaattcaaattagagtttagaatctttatcactttcaaaaataagaaatatttttactcaatcaaataactcagtccctaaaaatcaattgttcaaaacagaacttgttggacaatgaatatgaatcaaagaatcaatgaacaagatgagtaatagagatagagaaacaaaaacacatgcaatttatactggttcacttcacaacagaagctacatccaatttcttttaattcacactgaattagagtttcactattataaatttttgttcttacaaacttttacaaaacctccctttaccaacactagataaagaatagaaatctaaaactctattagacttctaaagaggaagaaccagataacactactttgttctttagctagagaaccattctctagacccaagcaaaaagaacccacttacaatagtcaattacaacagaaattcaaaacgaatttacaaacaaagattaaggagagagacaacctgatgatctaatgaatataatgcacataagttactaagtcaggttgaatagcaaacaaaatcagaacatgtttttccttaaccttgaaaagtttcttgctcaagaatcattcaaagacccatgaatgttttgaatgaagcaaaaagtaatagaacctagaaaatcactttgaaagacttagaaggcttgtgtatactcagaaatacgaaatggtcaagttagaaaacaagtcaagccttcaaatttatttataacagattttgtaactaactctaatcgattaaatgcgccagataatcgattaaaacgcttatgtaatcgattaaattatcacttaattgattaaaatgttcaagaagatttctgggtttcaacaacgagcaaaataatcgattaaatcgagctgtaatcgattaaggcaaaaagttcagtttcacaaaatgaactgtgtaatcgattacaagttttgataatcgattaagtcagaaaattaggattttcaaaatgaactatgtaatcgattacagatgatggtaatcgattattccaggcaaacttaaaatttgttttcaactatgtaatcgattacactatgtcagtaatcgattaaaacatttaacaaagcagttcagtttcactcaaaggccaaataatcgattaatccgataagtaatcgattaagttattcatgaagtttttccagattgaatcaggaacaaaataatcgattatactatcaagtaattgattaaaacagtaaaaaatcatttttccaaaaatcttttaatcagattgaatccttaaccaaaaagataaaaactttgatgttttaatgaaaaccatttaagcttgttaatggatgaatgaatataatgcaagaatcaacatattatctttctcttatacttgattcatttacaaaacttcaagacacttcaagcatgttgaaagcttaaaacacatttttaaatcaaagtctttcactcttcatgatgctttcccctatatccaataacatttacctatataagaaaaaacatatattgtgtgtcataacttgaaattttgtttatgtactaaattgagtaactacattttgtttcttgctcctccctgttactagtttcctcctagaaacatgcagtatccagacgaggaccttttatttacaactaactcgtcatagtctgcatctatataacctctatggataatgtatgaacgtacttttttcttgaacaacaatccttttcttgaatattgaaggattctatcaacttcctgcaggtgcctttcacagggatcatgcataaattggatgaccacattaataacattagcaatgatcctatctggagataaggctaaaagtcttttttacagcttttttacttgataaaaaattctacatttccaatagataagttttcaaaaatatttatagcttgtatccaaacagactcattatctggtctaatgtaggataaataaattagcttccccatcaatctttggtattgggacttttctactactagactttcttcacttccaatcttgtggttttgctcaattgatacatcagtgtatttccacctacatcccgctgccttcttatcttttggtttgtcaactatctcctaggttgagtttctttcgaatgtccttatctctctattcatggcttgaacccactcatatttcagagcttcttggactgaagtaagagttttgattgcatcaattgttgcaataaaactctgatacgatgcagagagatggtcagtacaaacaaactgagaaataggatacctggtaaacgatcttttttccttttctcaaagcaatgcacatgtcatcagtaatactttcaaggatacgcacctcaagctcagacaattgaacttaacattagattgtcatattttgtaccattgtcaaaccgaaactcttaataggctttcaaaattaaattttatcaagacgaaagaaatcgacaaactttagatttacttttcataagaaatgtccatgtcacacaagtacaatcattaatgaatgtaatcataatgaacaaggtgaaaaggtgcaagacttttattgttattaggaagaaatgttgcacgatggtgttttcaaaacacccgactgactcttttataaacaaatgagtaaataaagactcggcattctaaatggtggatgtccaagacacttgtggggaagccagattttggcagatgttcaagtctcgaaatttgcctattggcttgaagactacacctttttgttggtaccaccatcaaccttcatgtgttgcaagaagtataactcaccctactctttagcaagtccaatcatcctccccatgccaagttcttgaaataagtgaaaacgaaaaaaggttactacaaaattcaaatcttgagtacgctgatgtatggagataacattattagccaggatggatgacattgtgcagggatagggatgggtggagttagatgttgccaaatccaacaataggaagttgatctcactttgtaatgcgttatggattgacccccaccccccctccccaatacaatattggggtgatattgcaaatctatatcgtgatttattctatataattgatgtaaccctatttgttctaatcaataatagaaacaactgctctagtcccgaggacatacttggtgatcctggttaaatcttgtgtccatgtttatctatttagaattctggttatttttattaacaggagacctataatttgtatcctagactagagtcaaggaaataatcttcaagccaggttgtggatttatagaatcagtttttgccggggtcttaccaactctagcggcaaactttgctcgggcatgcaatagctttatatgacagtttaagctgtgaggtgagtaggtttcttagcaaggtatcaaaccctatttcaactaactagttgtcaagttttcaactgttgtactgcattcttcatccttgaatgaaagttgagagtatttaacttgtcctataatttcaactctgatggctccaaataccggaggggactacttcatcctaagcttaattcttcccaggccgcttcgcctgcacttttacctaacttcttcccaaacagatattagacctcccccttcttaacaaaaacattcttttttttacagaataaggtgagcttattatttatctttacttcaaggcaaaaaggctttgctctagtgtcgtgcttgagatatatatcaaaataaattctggtatttttaactgcttaattttgttattttctctgttcaaatcactatcatttagaaccaattattctgggcgtgaaatgtttatactatgaagatcccttccattctagtgatggtgttgtatatcatcctgtttgcgtatgagattactagtatcgccattctgttgcaagctcaatttgcggtatttacgtttgcctaagttctttttgttgttaagtgttaactaaaggtctattttagaaaactcattctctcttgaactaccgaagtttatctgatgaagatttccctgtgacttttgactcatggcaattgcggccagagcaacaaattttaaaatttcaattgacgatgcagttgtcctcattagctccacctttttacatttaagactgttctaatgcagaagttttttatgcagatgcgattgatgatggaatctgtagtgaatcttaagaaaaaggtatgcagttggtaagagtttctcgattttgtatgtttgataaccacttatatggatggatcaccactccccaccctcccctgctttaatctgaactataaacttaaggataagttaagttgttaggttgactagttggatagaactaatcatcattcatcatactagcaaattatgtccaggacacgtttaatatcaaggtgctatgcacaacgcctcaaattttagatgtagaataattcaaattcctcatattgagtatggcaattaaaatttattcacattaaagtatgaatatatatatatatatatatatatatattgagtttcagggcgccctatatccatacaaactgatggtactaacacacaccagagtaccagacacgacactaaagttccaagatattcataatcacatatagatatttgcaatttcaggatcaaaaaagatactttgcaatttgtatcattaacatgccactttattagagacaaattataattagaaatattctaaacaatataccggataatgtgaagaaccgtgtttatttatttccacacattcgtctgcattacataattggactgtttcctttttgtctgaatatcaaacaaggtcgattaagaatgataaacagtggatcaaagttcaattatggtttgttaacctttttttctttcttttttaacactttttgctgcttcaaacaggaacatatcttgagaaatgaaaatgagcttttgaagaaacaggtaaaaatgtatacaaagtcatgcacttcaagttatctgtcaatactatcattctatgtggtgaacacactttttttaactcgattcttgaactcggtataaataaatagaaaggcaatattaattaaggctgaatacaacctaaaaatttatgcatttaaatgacactcataagaccactatgattggcctagaggtagaggttgggatagatatgcaaaaacttagatttgatcctcattattgtcattatacaccaaaaaaccctggaggaatcttatacattctgttgtaacaaaaaaagcatacggaattttagactaaaatttatattaaatactttttactcagggactctaatttagtttgttgaacatgatgcataaattgttgtaatttttggtatttatcttcgattatctacgaataaaaaaaatgttaaatcctttctaaaacttatttaagtcgttatcttatgctaatttaaactagttatcggaccagttggtgagcccattcgagctgcaatttatagattataacagcgaacatactctttatcccaataaaactattatagacattctaatttctatcaataatagtttttcacctgttgcagattgaggcactgaaaaaagatgatgacttgaataacgtggtgacacggtatattgaatatgatcaaacagatcgggtgacgcataatctgctccctggtttgtaaatgcagctgaaagccaccactgtggatattttgcaattgtgtgcttaatacatgcatagggaactatgccatggtttagctacttgccttctgttatttctattctggttgaaacatggagcatctagagaagctcttaaacataatgtgttgccatggggaagtttgcttcagctactagtctgtgcctaattaaattataataagtgacattatataccatatgctttaatttccggcataataagttatatatatatatatatatcctaaaaaataaggctctttccgcgataatattgatatggtattataagtctcataaagctaagatatgggaacagttcacggtgaaagtaagggatggtattataatattaattcaatctgttctggaggttattagacgatataacgggacaagaagaatatcatatcaaatgtcaattaagttaagcaatgccaaagtcaacagtttagtcaatttcctgtaatgtacgttaccaacactccaacagcaatgaaagtaacatgatcttgacggtgataatatattcagaaaggaataataacaaatattaaaaattggacagcactttgagctgctaccaccaccattttctatttaggacacaataaattttgtgcgtatcagcgaaccagttccccgcatactccaattatgaattatgtagcaataataattaatcatgtgcaactgaattatgaaactcgcatagtaaaatcaaagtagcatatggatcggggtcacatctgcccggaattagataggcatcatggtatgttaagaataatttgattattaacaatttaatattatctcaaataacatgcatactaaaatttagcaaatgaagtgctatttttagttaaataattttactaattttttgtttaaataatttaatcccactcccataagtatatttccttcaaacttaattataaacaaccaaaaaaggttcaatggactcaaatataataaaatttaattatttttatcatattttaatgttattgttctaaaactacccttcaattaattgagcttttatttttaataatttatttttattcttaatatcaaatttagggtgcttttaaaaaaatgtgatttaactaaattttataatttgtttaaaaattaaatttcttagtaaaaaattagttaattttgtttaatcggctcctgagaaattaatatctcaccgcaagtgttaagaatattttctaatattacttttaaacattctattaattaaaaattataatagtgagagagaaattcattaaatgtgaatttatttttataatttttaataaatttaactaagaaaatgtaaacataaaataaaaatgaaaaccggtgataggatatatgccaataattaatgtattaaataatgcccagcaacaaacaaaaaagttgatattaaaaaatccatgaggtcccacacaatttattatttcccagcttgtgtgccctacctccaaggcgtgataagcatggtggcagttgggttttgatgctaagtatttatgaaaactatcattggtagagcatttattcattaaaaaagttcccgtttaaataaagtaagtatttgtaagagtttattatggtttataaaaacaaattgaaagttctaaaaatattttataattaagtcaataaaattatttgtaatatttttacaattaagattaaattagtaatatgttttatttaagttatgtattttatttgtatttaatgttccttttattagtttttcattattaatattaaaagtataataatattcatattttattactttcaaataaattatagcaaagaatatatttaaattgatcaaaatatatatgtgacatgcaaaggtatgagtgcttgaattttactcacataaatatataaaaatatatatgtgcggacaagcttactgattatgcttatacagagaggatagacttggtgattcttgagcattacccttcattgttgaacgatgctagagaaatttgttttcctcctctagttgctttatagtttttctttgggcatttttttcccgtatatattaaaaaaaaaagaaagatataagtgcttaaattttactcacatgagtatatgggttgcaaaacaaatttgacttatcgttaacctactttcttataaggattgagacagagatatcaattcattagcctgtttttacccaacaaaaaaaaaattggcttttaactaagcaggaactagttcattggcccaataattttttaataagaaaacaaaaagaatagtgtagagttttggatttgtacttaattttattatggaaagaatagtattatatttaggaagcaatactgatttatgaatcatttttatttataattattcttcagttctcctttttatttatttgtcagactaaactggttaacttacccttagtcatgatttgtgtgaactaataataggatgggccaaaacgggtaaaactgacccattcaaccgtcgttagttgaaaataaaatataattacaatagtagccctctattatcttcctaattggtcgtgcgacgtgtaccacttcatttatgtcaacttggatgattcaaccacatcacatcccatccctcaaaaccaaaatcctaacgtcacgcaacactttttctcttcaacgcaacccatcttctctcatttatcactttctcttttcttcaacttttctattctgcttctgcgtctttaatcttacgcaaaacgacaacgtgtcattacttgcaacgcgactccccaaatgcaaacataattcatttccatctttctttctgcaaatacttccatttccttatttccttagaacgacaacacgtttaatttccatctccctccgttttatcctattgctcttcgtttaaattctccctattattattattgctacatcttttccttctttccctgatacaaagacaccatgagaggacaggaagatcaacaatctagggttttctgcgagctctcggctctggtcttcaaccttctccggtcaccgccgatcgttccggagccgccggcgaggcgttctccggcgggggcgcagattactccggcgggtttcgcgtcgctactactagggatttcggtggcgctgatgctgtgtggatcggtgactttcttcatcgggttcatgctgatgccgtgggttctcggattggttatggtgttttatgtcgctggcgtcgtttcctctctctccgttctggggcgttctattctctgttacgctacgccacgtaaggatctccctggtaagaaacccaaaaaattaaaactttgagatgttgcttaattatttgttgcagaaatttaggttttgttttttaatctaccattgttagaatctgaagaaaattgaagatggatattgtccagatttgatggtgtgtgtattggggataagttacgtgtttttggcaatcattgtgtttatctatctgatctcttgtttgtgttgtgggacccaaaaggaagtttctctgttgtttattgtctttttccttttctacccctccaatattcatccacttttaccaaatatttagaggaagggagatctttgagaaatatttggatagataaaaattgttaaaaattgttgctttttgctctattttttaactatagttggtaatgaaatttgaacctaacatctagtatagactactcaggtccatttctagggtagtgtttggaagacttgcgtgttagattaacttgttttgaagaaataattgttatattttaatcttgttgaaagaattttttaaaagaaaaactgttatcttgctgaaaatttgagacaaatgatcctaaacatgacctatatgcacgtaaaaagtgcattaaaaacgattcacgagcttatcaattaataaacctcttttgcccatcacatctcttcacaagcttatcatatgtctgtttggtttcctgtatatgcacctgctacatgcattgagatttgctgaaattttgagataattagtttaaaagctagtaaggaatttttgggataatttttgttgcatagatatatgcacctgcaagccataagatatttaaacttaaacttattaagccacatctatcggggaattggcaaaacccatatcacagatagataggctgcaattcagtatgatgtaggtgctgaatttgctattacccttttttaacaggatgttagcaggctagttgtttgaaaaataatgttctttgtggttgttttgctcagtcattattgatggttgtagttttctttttgaaacagattttcatactattaagaatttcatacttcattataaagtttggtcaaaattctattgggagctactagtatagtgaaaattttgagaataagatagattatgactatcttggtgtatggcctttgatgaatccaaaaaataaaatgtgaaattctttttcaattaagggttggatctgcaagattggttttgttttagaagtataaaatacaaaatttgcacccgcttcccgctggttttgtatattcctgttgagaaatgattgaagccgggtatattaatgttgcttgaggctggctaagttagcaaattctacctttttttaggctaaattggcaaattctaccattgcttggctttgatacataatccatataaactacaggtaatagcctccaattcgaaaagcaaattacattttagtcttttgtagaaatattatatttgtgtggtgtacaatatcttgtaactaaatttcgatattagccagtttggagttcccatttctgctgtttattttgacttaaccgcaaagcttatgtctttgattatctcattctttttggttggatcacgagcctaagaacttcattacaatttcttgctgtttcagagtggaaaattatatgaaaagataaataatcgaattgaccagtactatactggttttgtgcctgcctgctcatgctgcccatagaacaatgaagattactgaacttctctcactagaagcaggagtcatgaatatcaggcttttgtggatatggcttctctttttattacaattagccagcaccaagaattgaggacttgttcccagctactgtcttttgatgtcaattattgtatttatttttatatatcttttgtaaaatttgaattatataggcttctgattttccttttttttttatttgccatttccaaacatggtatatgactatatatactataaaatgaaagggaaaatatgatctgatgactcacgagaccacggttctcttattggtaattatatatataaactgaggacagagttatgcctcgcttgagttgaactaaggctaaactaatttttgcttgttttagaattccattcccatattatttatttggctgcctataaatcaagtggaaccttagttagggtgaatataagttttggaaagaaatgtaaatggggaaaatctgcagtttttattaatagaattgcttcaaataaaatattttcaagttgggaaaaaatttcaaattcagtacttgaatgtacagttatcaatagtggcgttattgcgcgcaatactgaaatagcggtgcggtgcggtgcggcagtcgatcaacatagactgcaccacaatagagcaaatgagaaagtggcgatagctgccactatcgcgggtgggtgtggcagaaaaagcgggtgtggtgcggtgtgttgaggaagcacgggctagacgaaagtcagctgctgccattttgctattggtcaagcctcataaaaggtaaaacaaaagcatcaggtgtcagtgcacttctgtactcgtgtcgtgctgtttgtttgtttttttattggtgccactattaaaatttaaaaataaaaatgtaaatattggcttgtaagtagtgattataaaaattctccaagcttcctttctcctcccgtaattattagtactagtaaataagtctaatataaaaactctcctttttttaagacataaactctcctttataatacttgataaacacatagactagcttaagcaagtacacgcagataggcatggcaacggggcgggttgggggccccgcccccgaaaaccggtggggctaaaaaaaatgatcccgtccttgcccccgaacacttaaaaattactattaaaaaattaattttaaacaacaatcataacataaaatttgatcgcgctaagtctcaaatgcatgtaattacaataaaatttcaacattagatgttcattgctggaaaataaaattagttatactcctaattcttgaataaaactaagtctttatcccaaggtattccacatatataaaagtatttttataaataattaaatatagcatggcgggggcggggcggttatcagcattatcaaaatcgtccctgcccccgaattcaacaggcagggaaaaatcgaacccgaacccgaacccgaaaccggtcaactcgatttttttccgttgacatcggggcgggttcggacggatgcccacgggtgcgggtcaagttgccatgcctacaggcagaaactctcctctcctctttcaaagcattcaactctcctaagctagttagttttacattatattttattttatcaattttatattatatttttattttatcaataaatttttttctatttgttttttattatataaagtatattcatatatttgttttttcttccggtctatttattacttttttcttctagtctaattattttttgtttttttattgttcattaatttattattggactattttatttttttacttataattttctatattatctgcattatgcaaatgtttgatatttatgtcatttttttgggggggattatgttgtttataatttatatatataattcagatttcagaataatgtttacttatatactttgctatagcgatgtagcgctatccgctatagcgctatagcattttttaagggtgattggtacgcgccactatccgatattaataagtatgcttgaatgcaaggtccctgttgccagatactgtgattcttaaatatgaccttctggatgaggaaagaaagtgaaggacagaaggaatcgaaagaagaagaatcaaagatataatggaaagaaatttacattgtttagataaagaaaatgaaaagaaaataagaggggaaatatttctttgtttgatcgaattgaaaagcaaaattggagaaaaatgaataattatatatagttttacacatgatgggacgaaggaaatgaggtgaaagttcactgtgttttacatgttgtatttttggcgttgtcccttgcatagtagcatagaatgttatgttagacccacacggttttaatcagtcactaccttttttgtgtccatcaaacaacagaaaatgatatcgtctcaccaaaatggttcgttcaataccctttcttcccaaaatttgcctaaacaagcatagctagggactagttgattcccccctcctaccacgactccattcttttactcaagggtatcattggagattatctttttcggtgtgtgatataaaagataattaaaataaacttttcctcttaattttttttcatacacgtgattaaaattcaaactctaatcaacatgttaaccgtttcatacttcgtttataggaatctgttagcatcaaaactttagcattccgttacaagtaaacctctaaatgcctaactttcatagaacaattcgagacagccaaaagaaaacacaaacaagacgcaactaaggaattgatcctaactcttatccaatattgtacctagctctttaattttttttaataccgcgacatcttacattacatcctacccctcctatacacacaagcatacgaccatacgcatgcagagacaaagtataaaagtgtgttactaccagtcctccacgatataactataagatgttgtttttacccttgtctctaaaactttgaagattcatatattcttctacataaatgagcaaagagaagcacatcacacagatcaatattccatgagagagaaatgaaagaagaaattaattaagtcatccatccttgatcacatcttaaaagttacattacaacaaaataatttaaaccagaataaaaaagaacaaaaagaaaaacaccaaccgtagagaataaaacaacatatagcggtacatcattgctatgggatgattgattatccagagtaaatatgcacaccaatggcaagtagaaagatggtgatgagtccaaagaagatgatggtgtggactaagatagataagccactagtttgcatgttcccaaatgccaccaccttgcccttagcaggaagctgaaacagcaaccctgggcttaaaagcacaaacaacactactgatatcaccactggaccccaatctgatgccatcacaccctgcagaaattactacttgttttacaacaaatatagtaactagttttagatagtgatcactacttcacagatgtcccagttttcaatgaattaaatgctgtgtgatgatcatctataagctaagcttattaaataggaaattgaaaaatgattctgatctgggtctgaggcaattgcatgactgaggaaagtggagcaaagaagcaaggtataattgacaaccaaaaaattagcatcaactatgccttgtaggttgatgcaatctagagcataacttgtcagcgcatcttgaatctcgcattacttttcgttaaggagaagttttctagagagattctttatacaactacgatattctactatccaatactttcgattttttttccatcacatacgtcattcttttaatctctttttttcaatcgcctgtcgcatttctcgtattattgctaatagagtgtataaccgcaaaaagatatggaacaatttttttccttgttaatatgttgatcaaatttgttgtttgcttttttatcagattttattttagttaaaagttaacaattaaaaagaaagtagtatatattgttacttggaagattatctttttttaaaaaattgttaaaaatgagagagaaaagagataataaatttgatttttttttatgtgtattttttggtttaggattacaaatatattctagtaaaggcaaattctattcaacatccatatcagttatcaaggtaggataggaatagttctcgcgatgaatttttttatatatacataggaaaagaaacgaacaaagcaaaagacctattagttcttgtttcaactgtcattcgttttgtatgagattcttcaatgggaaatattaacaaaatattttttatttgtttcaataccacaaatgtcattgtgaatccaactaatatatataataaaaaatgtctgtaaaattttatccaataacaaaatatattaaaaagcatgtcgaataatgtatttccaatgttttcctcgtagatttataagtaaataattaaatttgttatgaaagtatgatcctgtgataaattagtatttaaaagatgaaatatacaatttaatcattaaatgtgcaaagtacgataaataagttcgattcttaaatttgtaagactattttatgattaagttataatattcaataatcaatttgataataaattgtattttttaagaatctattttgatattaaattgtaaagttctcggataaatttatcattaaattatatggaaactaatttacgtattattaatcaggaaaatatcactccaaattgttttttactgcggaggaagggaggagagtctgataaaagtttttctaagtagtattggtatcctccgctggttggttgggctccagtgccataaattaagcttccaacttcgactgtgttatgaatattgttcatgattaacggagctggtaaattgggctgtgtgtcttgtctgaaccttcttaaccacagtgtcaaatttaatagaccggcccaactcgtatttttccaggggttcttaaattaatgcctgagcctacctttatatcggattagagagctacatttactttaattataaataaataaaatcaaaaaatacatataaattttaagaaggaaatttgctaacctacacatttttatttttttatgattgcgttaacaaactataatattttttggttataatttgttgacacattcatattaagaaataagagtgtctacattcataattttcacaaatatttattaaagtatatatctttattttttagtatttataccattatgtattttaaaatatttttctaattatagtttattaaaaaactgagactaaaaaacgtgtatattaataaaaccttttaagaaatatatataaattcatatacctaatttaactgcactaagatcatacttggacgaagtgaaaaatattatcggtaaatagaattacatcttgtttgtttgttgatatctcaaaaatattctgtcataatcagcacaattaaatcaactctcatataagctccagacgattcattcatttgaaaatttatgcaagaggtttaatattcagggtttacagattcacaattattcaaggggagaataaaataaactgtgtcacgagtggttggttattcacttattctgcaaagtgccgcaccttttattcttttcccgcgttacaccaaatcaaatcaagcctcgagttgaattgaacaaatgccgtaaattaatccgaaattaacatattctacgtcaactgaaacgcatacatacatgaagatgcaaagcttatacaggtttgaattttcagttcagatatctaaaatgcaattgagtataaaatcaagtactggcattcattcagaggaaaactgaatacaggcacaacatctgaccaagctcggtgtcaagaacaagaaaaaaaaaaatacaatcacatgatgaaagccccgttgttatttcaacacgcaataagaacgggaataacaaagcagaacagaacagaaacatgactgaattgaataatcccaacaaaaatgaaaaagaaaaatgatttccccaccattgatgaggttgaaagtgaactatccgaggtacaagtgaatcctaacagccagcaagaagacacatatgagagcaaagtagaggagggagtgaatgagtatggcagcaccacttgtttgaaagttcccaaactccaccacccttgacctccctggtacctgaaacagcaaccctggtgttaagagcacgaacagcaccaacgacacaaacactggaccccaatccgacatgttttccagctagtactactctactgttaaggctgtataccctgtgtttgtgtctgtgttgtgttaattagagtgaagcacactcacagaatgctaactaagcttgtgttgtgggggattcatggatggacgttgcatataaatgcaatcaatgttggaaatgattgtggggggacaaagatggtgtgagaggagtttttggggtttaagttactgtggattcactgctatcgtgcatgtgattgtatatgctttgatattggacttggatttggattaaggataacttgcttcccatgctaattacaattgggtgcttcaccttccgccgattatgtggttctgaagcaaggaattagaggccactattatatatggttttgggattttaatattcagttcggacgtgtcctacaaaatcagggctaattggtttcatagttatactagttaggatccctaatctaagacttgaaaaaccattaaataaatttagtgattggatggtatttgatcatatatgtgaacgttaacttgtgtcttgttaatttaattagttcaactaagtatttttcttttataatttcagccaagtaatgctgcgaattagttaattgaatgcaagaggattctgtagtgtgctttttacatacaattatttacatttattgtgaaaccattttatgttattgtggattttaagttaattataaagtgaggtaaagaaaaagttataaagtaaaacttacaatgaatgataatttatctttaatgttactgtttgaattacgtttgttgctatagttataataatgaaaattttcatattatttaagtaattacaatttgaagaatgttatgcatttaaaaaaaattacaatttggttcaaatttaaggggtgaaaaagtttcaaaaattgtgacaattaaaaggagggtaaatcttcgaaaaaatatttttaaaaaatactataaatggaaaaggaaaaaattaaaaattaactcatcccaaatagaggaaactaaaacttaaaatcctcctcgaaaatactgctacaaatagaagaggattttcaacctccacaaacaaagaaggtttaaaccttcacaacacaatcatcacaaatagaagagttttaaaacaggttacaggaatcctaaaattgtcataaattgacttctggctaatgtaattacagcaattgtcaaaattctcacatacaagggtgagagtaaaacgggttaagagatgtttatttttgttcttatccaacttaaaatttgttcagatcatttacttaaactcaaatctaactcgaccaaaacttgataaattaaagagaagatcagattgacctgacttattattatcgtaatatatatgaatcttaacaatttgtatagttgaatctcaaaataaaaaatatataatatatcaatcttaatatatagctgaatctaagaatgaaaaaaaggaagaaaaaaaacccttaaattaagatatattttacaatatacattttaaaataaataataattttataaatataacatcatgttatacaaaatgttatccatttaataaaaaatattaataatatatatttgtttaaaaaatattaaaaaaaataagacattaagatcaggttaagatggcctgaagcttaatccgaactcatccctaaaatataacagatctaatttttaaaattcaaacctgtacaaatcaactttaggttaagccgagttagaggacaattgggattttgcacgccccgaatcccatatcaatttgaggacgtaaaattgccccaaaataataaatttcttatagtgttatattttgtgcttttaagtaaacaataatattactaatttactatatctatcctacaatttacattatgcttgtgggaagaaaactcgactttgatctcgacccaattacccagttaaagtaagagcaattactcatggaaagcttcttatatcaagagttgcattttagtttattaatagagatggaaaaaaatatgctcgaaggtaaatttaaaattaaaattaatttaagtaaacattttaattacacttaacgaatttaaataaatttatttaaattaattctatttagttttaaaacaatcaggtcttaatcagagatatattaatgctcaagactcaagttgttaatgatacttaaatactattttcataatgaatatttatttatttctattaaatttataatagcaaataaaatactaccatactctgaaaaataacatcccatatgcacaacatatgtaaaacgtttggaataatttattcccacgatggaaagaatttaaaacaaatggacaagtatgtatgactttatcttccccaaagattatccagttttcttatctaagttcaccaattaacatggctttgaatcaaacacgtgtactccatacacacactttctctctcgttcgtgtcatcagggacctgaaattcacctcttgttccccaagtatttcgtgaggaaatgacattaattgattaaatgccacatgcttcttgaaccataccctctcaaattaatttaattcacacacttatgttgcaattttctcgtgaaataatcataacttctcatctgtttcagcttttcaaaataactgaaaagaatttaaaatatgattaaaatgataagttattttaaatattttctcataaatctgctagcatttctcaaacatgtaccatatataacaaataaaatgagattaatgaataacatacgttgaaattgtttgttttgaaatgttgatgaagtcaatgtcttttttatttatttattgaaagtcaatatatcaactcaaacgcctaatacttctaataagttttcacctacctgaaattaatcctgaacttcaaccctcgttcacacagtacaaacttgtcttttgtgtttaataatgatgaccaggtcttcctttatgatgatatcattgctaatcaggttgcccaagagatattcaacccactcacctcattcacaatttcacactacattttatatttcacattttatttttttattaataattaatttcacctaactacatgtagtatatgtataccactaaaaaatatactgtaacaaaaatgtgaatttctagaaggaagtattttccttttgctcacattttatattttacattttgtttttttattgatattataattaattggacctaaatacatgtagtatatgtatactactaaaaaagatactgtaagaaaaattgtgaatttctggaaggaattattttccttttgttcacatttgaatcgcaatagtagtgatgaacaactgtttgggtatgtttcagtactctttttcattatttagaaaatttaagtcacagattcatattcattcaggaataaaatattatcattatcgcttggaaaaaaataatgatatacaaattattttttatttaaatactctattaatatcttttctttttttctttttatcaaatcataaatttatcataatataacttttttcttttttttactctttttaagtattagatagtaatgtgtaccaattatcaaacatttgcctttgggaaataacttttcactaccaaaaaaaaaaaaaaacatttctgttcgttttacagttttgtaccaaaaagaaaaagtcacgtttacagttgaatcattagtttgtggcgaaatttacgcgcgcaataattatatgagcggcattttttttcttttttttcccgatattcatgagcgtcattttctaaatttataatgaaagtttaatttcaatgtattatccacgttaaatatttttatattaattaaatttttaattatggcatgctatattattaaaatatgcatgacgaaacttttgatttattgatcatccactcaattagtgaatgtgttcgccttgcatatctcgcttttttttatgcagtacttgcatatcgcttaaaaacaccttggctcatttatacattaaatattttattaaggtaaaaaatgaaaatatttaaaataaagacaattataatcgaagagtagaactatttataatattttgttaatctctatagtctaatcacacttttaattgcgtaatcaaatatttatttcgtcttttgatatttctttaaatatttaagagggtagttagcaaagttaacaaaaaagtaaattgtgtataatactactacacatttattaaattataaaaggactaccagattgtgattaccgcttagaaaaatcacacttgctccaacttgcaaagtcttttttttaatcactttaatgtaaagtctttaatattctaaaattaaattaaagaggtgagaaaagcaagacatagtagtagcaatctaatagtaatatctcttggtcttggtcttggtcggggtccccaacttgtgttaataaaaaaaaaaaaagttgtttaataaaagcacgtttcgctataaccttaaccttaatcacaacctcaaatcaactctatgctaagcttcaactaacgccaactgcgtctgtttcagctttctgcttttgcaacttcctttctccgatccattattcttcggaaccaactcgcaccgtagcgaatctagcagcctctgcggctccaacaatgctctgtgtccggttctactacttgtagcttttattcctcggattcaacaccatgacacctggtaaacgtgtctttactttttcttaatgattaatgatgttatcattatgtcttgggtgtattattggaaaattgggatgtttaatgttttgttgcgatgtatagtgaagtgaattgagtttgacttggtttcattgagtagttgaagtgaaccacatcacttgcgactttgggtgtgtgcattctgtttagttttctgaggttggtgctttcaatagggaccatgtgagttttggaatttgtttggaatcggtgaaaatcaaacactcgcactgacagtaaagcacttttagtatattctctgtagcatgctttttgcaatttgatttaatttactcaattattttgctgcccctaacacattttgcttccaaatgatatggaatattggaataattcattggtgccgtacagagaagaaaaaaaattaagttgttagttacgttgtgcagttcttgttaaagcataaaaatgtccccagcttatctagttcttctgctataagaaggaagaaaagaaaaaaatgatgatgatgatgggaagggttctaaatcttttgacttatttatgttgtggttttaggttacgaatacgatattaatgatctgcatcaagaggctcaagccagatggttgaagcctgcagaagtgatgtacattttacagaatcatgaaaagttccagttcacccaagagcccccgcaacagccaaccagtaagatctgtgttccctttatccaattgattttagaaataaaaataaatgacagattttgtcattgtttcttcagaattgaccataaaatgctgattgttaacattatcaattgatcttcttaacaggtggatctctgtttctgtttaacaaaagagtcctgcgtttcttccgtaaagatggtcataactggcgtaagaaaagagatggaagaactgtgggagaagcacatgaaaggctgaaggtgtgttagtagtgtctatactgttgtgtttattagttgtccatgaaaaaggaaaatttgttatcaagtgtctaaaggggtatcagttgtagaaatgcagttcataaattaatatttaagagggggaaaattgttgactctcctgaactgttagaaaaaatatattcatatctttgatagatgtctcaaacttggtgaatggtgacagatggtattattaaaaatagttaaaaatccttattggaagtttcattgaagtctttcacgatgcttttgaaataatgaatgatttgcctatcaactgacctttatatacattagatataacttatttctgtttagtgattcttttttagcatgttatcaaaacattattcacttattgttgccatatttatgagtgtaggccaacatttgtctttgtgatggtattctgtatactgatttcttcaatttaaatgattgtactaatctgcatgactaggttggaaatgttgaagccttaaattgttactatgcacacggagagcagaaccctactttccagaggcggagctattggatgttggatccgtgagtaaattttaactattagctaactgtatatccttcatattattaagcttatcactacatgttgtatcctttaaaacaaacatgcaattttcggtaaaaagccatcctagaggctaactaaattttaagtgaattgcaaagattagtttatcctagactttgaaacagaatcagccttcgatgtacataactatttgtgtgatatgcttatatatatgttatcgtaatagtcattcattatcactcatactattgtttcatggcagggcatatgagcatattgttcttgtgcattataggaacacaagtgaggtgagtctccgatacatgatatcagataaacataataatagtacttgtagtttgtgcatagtgtccctccagaaaattttggggaatccttttgtgcaagattgctcactgtctgaacatgttttggattagttgttttacagacatcctgcctgtttactattcacttgtgaaactcaaataatttggttcattttcctgttccatgaaatttcaaacattttctgtattctttcatatttactttttgtagatggcttgtgcaattgtccattagctgttaagatttcttgtttaagtttggtgtactgattcttttattcaccattataattactactgtgttgtaactccctctctccccctcccctctctcattttctattttcaaacttcatttataaatgtacatgtatgcttccaaagtcatttaataatgaattttagtatgcactgatagtgtaaaggatttttacattgcattccaaattgtagattgtcatgtatggtaacattgttgacttgtaataatttctaattgcatgaatattagaccctttaataattattgtgcaacacaattcaactatgaattaaagtcattccccatgcattctcttaacttcttgaaacttttctattccctatgtttatgaacatctctttatgctcttctaccaagcagaaattacctacagagatgcctacacctcacctcccatatagttaattctctatgataaggacaattggtataagaaaaagtcagtgattattccaaagattgtaatgtcctgttgcttttatgcactagttatttcatttgatggctttgtgcctcaaataaagatatacttaaattttcttaaggccttcaataaaaaattgaaatcttcttaagaatcatatttggtatcttgggtggaattattaaattatattgttttattctctgtgtgcatagtaacattgttgtgcagcccatctttgagttttgcattaatgcactcactctcatgttatagggaaagctcagttctggagctggggcacaattatcaccaagttcctcttctgcatatactcagagtcctagcccatattctactcagaatccagtgtcaacatccatacttggcgattcgtatgaacctaatcagagtttctccagtccagggtctacagaagttacgtctgatatattcgtactgaacaataaaatgggtcacatggatgggacagatacagaatcaggaacctcgcctgaactcgaggttactcaagctttgcgccgattggaggtgcagttaagtttgaatgaggacaactttgaagatattgtttcctttggcagtgagcctgaaactgcacatgattcaaaccctcagcacgatcaaagggtgatcagcaatcaagaacaatctgcagctttctctggacctgatgatcaaggactattttatgatggatataatgaaacgcaaggtaaattaaataaacttgatctgttgagaacgcatggcttaagtcagtgaaatatctgagtgcttaatctatcgtgtgtttaacatgttcacttttacagatatctgtcttctacttatctaaatgtgcttgcagcatcttacacctgcacagctagttttctgtaatttgttgatggaaattcatagcatacctgtttagattaagttggtcacaactattatagccatcttcttgtttggtgtatttgtttaatttttctcactgaaacataattccctaattgttatatgctggttgcgttgtgtgaattattagaatttgggtttgagactaattcaaccccaaaagctagctcattaggtggtagttgtccccccacttttattcattattttagtcaatgttggacttgggtttttctcaatatgaatcttaagagaaatatgcgattcttattataagccaagtaaccaggaaaaaaaatggttctaaacaacttactcacggctaggtttctttgtatttgacattaccccagtagactttataaaaacatatcaaaatgtggaacttgctgttaaggtttgagtggaaaattccatatgttacataataaatgaagtgttttgcttcgtttatatggttgataaggaaaataaaacaaatgttctagtcttgataaattgcatgtggctgacaggttagcacttgactaacctttaataataacaagaaaatttgaagtttgagagaaaaggttgtgatattattttaaaagatgccatgaagaatataacacaacatacttacaggatggtgatagccaacctgaataaggatccaaattaaacaaggaaaatactaaatttaaggaaaaattcaaggaaaatactaaaacagtctcgaagtatacttatacaatggatttcgggctcaaaatcacgctcaagaaggtaaatcccggttgcaacaacaagaggctcgaaaggaagtttctgtttatatcatatgggccctgtaactccaactagataaaaaatggtggttttgcctttgcttgaagtttttccttgtaaattagttattatctgttcaaaaccttttttttaactttatatttttaatttcaagtgaaattcagccctttatagtttgttttgtcctcttcattatggaaaatcaaatgggaatagaggaaggtaaaagatgctaaaagtgtttgttgttataggtgatggtggtgaattttatcaggaattaatagaccatggttaccctgatggaaatgaaaaggctttatggacagaggtgctggaatcatgtaagtcctcatctgcagtcaagttaccacagaaaaatgtatacatgccaattgaaaatgtaagtattgcttcgacatatttaataaaatttatatcattttgcaattttatgttttctcagatgttgaaataattttcttcatgtgtttctgcaatacttaaaatgtttgattcttaaagcaggaaatttcagtatcttctgcaagaagtgtaccagtttccaaccaggaaaacagtcagtggctcaacttcaacagtaatcattctgaaaactgtatgatttactttcacctggttaacttacaacatttttggcatattttggtgtttcttcaacttctgattcccctcccatgttagcagctgttttctcacaacctcaaggtgttgatgaagtcaaatttcctgcctattcttctatggtggaaacacaagtaattaattctgactactatgaaacattgtttgaccaaagccaaattggagcacctccagatgcaaattcaagcttgactgttgcacaaaaacagaaatttacaattaagacaatctccccagaatggggttttgccactgagactaccaaggtttgtgcctttaaagcccaacaccttgcataccctatgcaatgatttatttctctttgcataactggtatcttgtggacaatgaaagtgctcattcctttgattcataactattggtgcttataccttacctaggttcctgaagagctttaaaatttattcttaactttgttgaaaatcttgaaatctatatgaaattcttgtggtagtggtggtatgaagcaattatatataaagctcagtctatttataataattaggttagggaaatgttgctcaagcttatgtctttggacatttaagacttaacaagttggggcataaattttgtctcttttttttttttcctttcatctttcttatcttaaaaaatgatgtttagtgttgattttgtccaaatttgattcctaaagctccatatgcataggtcattgttgttgggtcttttctctgtcatccctcggattctgcatgggcttgtatgtttggtgatgttgaagttcctgttgagataattcaagatggtgtaatctcttgtgaagctccatcccaccttcctggaaaggttactctgtgcattacttctggaaaccgggagtcctgcagtgaggtcagagagtttgaatatcgtgataagaccaatagttgcactcgatgtactcaatcagaaacagaagccactagaagtccagaagagctgttattacttgttagattagagcaaatgcttctttctgcatcaacaataaagaatgacaacatagaatctggaattcctctcataaaacagaaagctgatgatgactcttggagccatattatagaggctcttctagttggcagtggaacgtcaactggtactgttgattggcttcttgaagagcttctaaaggataagcttcaacagtggctttcttgcagatctcaggaaaaagatgaagagacaggctgctctttgtccaagaaagagcaagggattattcacatggttgctgggttaggttttgagtgggccttgaaccctattctcacttgtggagtcaatataaatttccgtgacatcaatgggtggactgcccttcattgggctgcacgttttggaaggtaatagagaactctagagagcttgctactatgtttactgatttatttagttttggtgaatgatgttaatattgctatataaggcttataggtaatgaagataaggaaagcatacatacttgacagacaaaatgtgcttggtaaaatatgtatgcaatttttttttttcatttggagaagggaatgcagaagcaaggaaagataaaatggagaaggaaaggagaataaactatctgatctcttattataggtatagagcactaaaatgcaaggaaaaagataagtgtttcagatttttaagtctgaaagttaaatttctggagatgcagactgcaggatagatgtaagaaaaactgaaaaggatgtgttcggttaaaatgatatcaaatacactgtgttttcaaaatctgaaattattaaaatccctgtaggttaagttaattggctttcgggaatgcctagtctgtaagtcaaaagtagaaattgatgacaacactgagggtataataaccacatgtagcatgattgcttaatcattcaaagcaaatgccgagttgctgacttttatttctaaaaaaaaaaactaaaagactacgtaccccatggctcagaaactcctcactatgcgaaggtaaagggaagggatattgtacccagccttacccttgcatatgcaaagagactattttcagattcaaatccatgaccatcaccaaggcacaattttactgttgtgtcagggctcgccccctgctgacttttatttctaattaaaagaaattggttcatccagtcatctgctggaactgatgatcgtatcaagaaagttgtcttgtttcttcagaaaccattttataattatctgttccattttaaagtattttggatgttattttcctgaagctttgttattccatatagggaaaaaatggttgcttcacttatagcttctggagcatctgctggagctgtgacagatccaaatgcacaagatccaacgggtaaaactgctgcatctattgcagccaacagtgggcacaagggactggcagggtatctttcagagatagctgtaacaagccatctgtcatcgcttacactggaagagagtgaattatctaaaagtaatgctgagcttcaggcagatatgactgttaacagtgtctccaaggaaaatcttactgccagtgaggatcaggcatcactcaaagataccttggctgctatcagaaatgcaactcaggcagctgcgcggatacaatctgcttttcgctcacattcttttagaaaacgaagagcaagagaagcagcttctagtgcaggtggcattggtaccatttcagagatttctgctatgtcaaaacttgcctttcggaactcacgtgaatataattcagctgcttcagctgctttatcgattcagaagaaatatcgaggttggaaaggtcgcaaagatttcttagcgttgcgccaaaaagtagtgaagatacaggtaatagatgttaactttatagtttgactagaacaaaatgaattccaagagctacatagatgttattcttaatttatatataactagcacttaaagatactctgaaagtgaataaatttgttttttaaaccaaaaaacagctggttataggcaagctacacatgcacgtgcatactttgatcttcaacggcattattatcaaccttggttatttctaatttatttgggcaggctcatgtgaggggctaccaggttaggaagcattacaaggtaatatgggcagttggaatcttggacaaggttgtcctacgatggaggagaaaaggagctggtttacgaggtttccgacaagagatggacatcaacgaaaatgaagatgaagatgaagatattctcaaggtgttccgaaaacagaaagttgatgtagaaattaaagaggctgtttcaagggtgctgtccatggtcaactcaccagatgctcgtgagcaatatcatcgcatgcttgagaaatatcgtcaagctaaggtaaataaattagtctaaaagccgaagagtaaagtgtttgcattttattaagcagagcaaccaatatctctttagcatgtgttagtttgccactagttgaataatttaaacattgtttagcatgaggcttcgatggggcattccgtgctcaatcaaaaataaagacaaaatagtaaccatacagagctataaaccatttttaccttttagaatgcaattgctttgtgctgttaatgcataacttgtcaattcccttgcaggctgaacttgcgggtacgagtgaggaggcatcattatcaacttctgtaggagatgacttatttattgatgatttttatccatttccctaggagcaacgctagccttggtagtcttcattattttgaatgatcagtttgtggcacaaccatttcgatggtctttgtatctagatgtctagaacaagctgacttattagtttgaaacagtctagattgtatagtgaaaataacgatgaacattgttactttgtaaaatatgaaatggtcttgaatgcaggtggggtggggtttcgaattgaatggattaagtttctttagcatctccttgcgtgcactcttgatatcttcgcaaattttatatagcttatggctgctaccttctttacaactgtacaaggtatctgaaaatgtagcatcattgaatgaaatgttggaatgaggttagcttcagggttgtttgagtttcgaataaaaatttgctattagggttgtttgaggttcgaataacaaattgttattattgttactttagtgagatttaatcacacatttagtttttataattgcacaaattttaccttctaattcttatatttaacaattattcattttagttcctatacatatcattttaatctcttttgtacttaagcatactgactcggttcattttagactgtttgataaaactaatttataagctagctgataacttgtaaattaactaatttaattaaaagtattggataagactagctatataagttaattgataattgtcaaatgacataaaagaatatatatatatatatatatataatatttaaattttatttttaataacttatcctcctaaaaaggaaataactttttaaatgcacgagtttgtatgagtaggagaaaggaatgaatctttatttagagggaattttacttgcatttgtgttttttctcacattgcattcgatattcctatttttttatacattacttttatctcattctattaacgtcattaattaacgttaattgaaatatttgagcagtatttttttttcctcaaattgtacctgatactcatcccttgaatatgactctgacggacgtgtcaaggacctctacgacgctagtatccaggaaaccagacgcaatactgatgatggccgaagctacgacggaggacaaggagatgatagaggtggatatggtgattgcggcgacaactatggtggtagcagtggctacgataatggtgatttctttgacgagagtggatgcgttcgaacgtcatattgatggacgaagacgactatgagaagaaagagatatgctgcagtgaaagaggaaggaggaggaaaagaagttggtggtggtaagtgaagatgtattgttgaagaatatgagagtttgtaaaacccaaaatgtatgattttgaaaaagatgagaatatttttagacataaattttcattaaaagtcacatgactaacatgtatctattttctgttaaattattaaacagtgattaggaaaaagaagattcatttaagagattttttataggatgcaaaaaagaagaggtatcaaataacaatttggaaaaaacacaaaagatagcaagtataatttactcttatttatatcaatcacctgtaacactctacattaatatatttttcaatacataaaccaatagcccccattttaatttttaaccacaatttattataaaacaataacatctacagtaatatcttttccaagcctagtcatactgatcttaggcgaagaaaacaatccttcgttcagcaccaaatagaaaggaaaaaaattaagacaagaagcataaactaatttgtagaggtaaactggatcatgatgcttggattcaatatcgcggatcacaaaaatattgaagtttttaaactccaacactcggtaatctttcaacaatttatccttgaaggtgagtttttaaccagtcacaacagaaaattctaaacacaacaggcacaattaagcgttcaacacaaccaaccaaaaataactcattttcaatttcaaatgtgcaatctgaaacagctagcaataggcaaacttcatctatggcctttcaggtcatatgtcttcatgcatagttcaaacggaatatgtcattcaacacataatagcttccctgaggcgttggtatcaaatggaacatctgaaaaaagagtggacaaaattagtgatggacagaaattagagaaacagtaacatgagaagacaatagagcaagaaaataagatgaagtgcccaccaaaaacaatatttctgcatatacaggaaaaatataatgtacaatttaccagtataagagcacatgtaaacatgtgtagtaagggttaacaaaaatatgccaaggaggtaagactgtaaataaaattccacttccatttaggcaccatcatttgagtgaaatgacaggatttggacaacccatcatttccattcagagtcaggaatttagatcctctatcatgaggcaatcacttctaagttcaaggtaaaatgagtacatcgtaaaaattaaccttactataaagaacaaacaaaaaaatgaaaatttgaattattaatgcaatcacatgaagtactttatcttctctgtaatgaaacccaacttcatctattaccacaaatttaattattttctttaattacaaagaagacctaagatgattaatagaaacccaattcaatcacaattcatttgatagatggatacccaaccatcccatccatacagataagttattcaatccatctatgttttttcaaaaaaattaagctccttaaatttattaagagataaatagaacaaaataatttactggaaactcagtagtcacaataaaaaaaaatggttgaattaaatataaagagagaactagttctcaacgaagaggatcactgcaattttgcatgcctcctactggtagtgatcatagcttaacttccacataaactccttgatgttaacatctgtgactaactgcaaagtcctagctgtttgttcaggtaatgatcattgattttaatttttttagggaaacaattttggtaaagagagacttggcgctgcaccttgacatgatacccatatcataatctcacctgcttacatagaggtcagagttgaatgcactcagcttatagagattgaaaattcattaaaattcctagtgtaattcttgtgaaattccattgggaccttgtgagaagaacaggaagatttgagtcaaatttgaataaaaaactgttttgaaggacccaacaggtcaccaaattgaactcagattcaggtcactaggccaggtcgcaatttggaagaggggaattatgaataacctaccaaagcactgataaagaaaaccgcaataactttgctagcaaattgatatcaatgaaaaagacaagaacagtggttggtaagagcacatgaggaagaaggttgagatcaagaagcatgttgaaagcatccaaaatttgagagcttaaagaaggacttcccctagttaatagtgtggttgagggcacaatgaaacgtaaagaaaccaagttgcctttggatatccaacagatatgctgtagtacaatccatgacaatccaaaaaacaactttgatccaatcaatacagtccattgaaattattatgataaaaggttggataattattttgccactcactctctactctaaacaagccttgactctgcagctaccctagattcccaatcacaaactggccattctctccaatcaattgccaattcatttgaaaaccttcgtaattcctccttctctccgtgatagattccagattccaacgtcaatagcattaataacaatcgaaaaccccataacacttaaaaatttaggttttccagaggaacaaatcgacacgttaatcaatcaaacacacgagcaaaatcagcatccaaattcaaaagcaataagcacagaaatgtcaatcgcgttgaaaccagcatgcgcgtcaacgtcaaagaccgccgtcacagcgaaacacaggattaggcagatcgaaacgtgaatcgagtaattatcacggatcggagtgcgaataaaaccctaacagagagagggagagtacctggctgaacttgagagtgtgctgttcgccggcgagctggaggttgccgctgacaaagacaagcatgccggcgttgacgccggagggctggcagtcgacggtggagatggagtggtggcactgctggaaagggagggaagtgagcttagcgacgatgctggaagcgccctggatcttctgcccttcgaaggtcagcatggaaccctcctgatacagattcgctaaaccgttccggttggtgtcgaaggtgctgtagtagtgctccacgaatgcctttgccaacgcgtctggatccatctctattctctattctctcttctctccctctcccaatctctctctatctccgcgcacacacacacaccctctctatatactacacttctacaccctcgcgtatcttttaggtaccaacagtcaaatttccaaaatataaatactatcgtaattaggtctttgttcccccttaaacaccaagttatattcgcaaattttgattcttttaatctgattatgaaattaatcttaataaatgaccgaattttattctagatttttaataaagtttttctttgttttgagttcgatatattaaaatctttattttgaatttcctttattaattaaatgataatatatcatcttataaattaatattttcaacattattaatattaaatagtgatttattagatctcacacaaattttatttacaaataaaatatttagtcaataatgtaaatcaatcatttttttctgcatcttaagttatatttactaaattttgcctaaattaaatcacaaagtaaaaataatcaaaatataaaaatgttcgtcgacagcagggttcgaacctgcgcgggcgaagcccaacagatttcaagtctgtctccttaaccactcggacatatcgactcagatgtgaattttagtcatacattttttgattacaaaaaatttctttgcaaatcatataaatattaacaaattaattatatttttatccctttattatgatcaatatgtgaattttattgcttaatgattttcatttgaattttttctgttgatatttaaattattatagttaagtacttcaattactttttctatatttaactttaaatatttatttcctattcaattgattagagatttagtgtagctttaagatcgaaaatagtctaaaaggttcaaaatttttaaaaaaatattattagtgaaattaaaaaaaaagtgaggttgagattaaaaaatagatttttctaattcaagatgaaatacaattttttagttgatgaattgtggaaaagaaaagtgaaaaccctatttaaagagactatttgtgtacatatgctaactgcatttcctctaaacaaaagattctattgtaattgtatgaaaacacacaacaaattaataatcatatccgttagatttgcattgaaaatcacatttgtaataaccaaattgaatctaaccttaatacaaatagacagaatatagtgtaataagttcaaattatagagattttagtttcagatgggttgagggttagttacatttatttctacttctcagacaagttaaattcttctgtccttttgctatttacattcgtttgaaacggatacacagtaacacaaatatgcttttaatagtactatatatgtgtgtgttaaaatcccttgtgatggataagaacctaataatgtgtaaaactaagattccctattgaaagataagtgtatgggatgttatttgtctgcctaaataacggccgtgaagcttcaacgacatgattttgtatttctagttttgaatttcagcatattcaagaattaatatatcgttaacgctgatgcatttccttttcatttctgttgtagtgtgttggaacaaagttcccttcatcattgattcattgtgccctgtgtacaatgttgacgtcacatgttgctccaggtaataaacatgcatatccacaccaataagtatttactaaaccggtggaaaaatttattgtgaaattgacggaactagtgagccccacatatgatatctgaaatgtgtaagtcttgtacacccaacaatcaagtgcccttataattattatccaattattgctacacctgctatggcttggcatcaccttttaaacaagcaaattgctcaaattgtgaatgaatgttgtaggtctggtaaccattaccaatgttgataaggccatcagggtaaggaaggtcacgttcactatctaaacgaaccatcaggttagtgtatgtttggtaaaatgatgagttaaactcactataattttttaaagtaataaatagttacttttatattgatctcatcatgatattctactatcaaatcaaacacattttaattcattaggaaatgaataaatacaaagttgaattaaatatgattgatttagtggaatttcttaaacatagaaacctgtttcttagttagaatacacggtatacaatgaccaattaatgatatttatacaaaggatgcaacttttactatgtgttttacgttgtcacagtctcctgctacgaggaggaaaagcatctgacttgatgcatgcatctatgttaattattgtagaatcaagtgtctggaactcacattgatttgggggaaaaagtcaatgtaaatatcagttctgttgcagtgaaacgtactcaagttacttccaggagatgtgacggacttgtattttccaattagtattagtttatcgattttcgaactcatgaaagagccatatctatgcattggcagcatggcattgcatgctgttttaaaagaacctgtattgagaatgttgcatccattgtgtagatgttgcaacttccaacgtacgttgacacttcgttttattttagcctagtgtttttctagtcaattctcatttgtactttaaagagttatacagttcaacgtttttagttttttcaattttattgaatcattttcagacttttaatttttgtttttattattttagcaatgatttattttatgttccctttgatttttttaactttcctatggcctgttaaaaaaaaactccaaatgaagcttaaaaaacaaatataacagttgatactttttgtctcttttgtgtaagtagagggttatattatgtcttactataaaagtgagaaaattcggggtgacaagttaaaactctgcacccacggttcatgtcctataacttgatcaattgatctgactcaagtaaactttattttaatttgatttgattttctttagaatcttttttcttaatttttctatttttattttattttttagtcatatccaaaagttgatatactaggcaaaagcatgtatcaggaataagtttattttaggcaaaagcatgtatcaggaataattttatattagtatatttgagactagaattcagatcctccttcatgaattgaagaacaagacgggtctgttactaatttagacgaagaaccatacaacaattttgtagagcataaagtcctgtctatcaaaatgtgacggacaaataaaatgttaaaaacattacttaacctgttatacccagtgataccttgttagtgcacgttaaaatcaacctaggtaactcctgacatcaaaatttggcaacttcggtttttttgaaaaaatactgttgagataataaaaaataaaaaggaataatttcatgagatgtgcaaggcaagagcaatgagtcaaaggaaatccagaaattggaaatgtacaaatcggccaaaaaaatggtggatcactcaaaccctagagtataatatatcagttacatgtttccaaaccgaattccagcactgttaagaaccaaaggaagcaagcttggtgtgatacatcaatcaccatctttattgtgagtcatatacaaagattgatggtggactagcttccttcctcccctttgatgccaagaagctaattttcttcctttcacctgaattcgcccttgtgatacatgcatcaatacacataaaatgtagcgtccctaggctagatcactataagttgtattattacatacacaaggatgaaactccagaacctgtattataatacaccctagtcttctaatcagcctcaatcatttcggatgagaagagaggctgactttacatggaagaagaattaatatgggttttggtatccttaacaaccaattacaactcaattgcaaccaatcaaacttggctcctatgtacactccctgccacaaaaacaatgttttaaaccggggaccttcaaacacagcataaaagacaacaaaataggtcaaaaaggtagaatgaaccatttctgaacttctacaatattgtccccctttgttccattttctttttcctttcagatgagatagataacattcttcagtctctagtgaacaacccccaaactttgaggtggtgaaatactaaaacatgcattggctgttaaatagggaacttactctcaggagacttctgaacctatttacccacttcagagtgtcctggagtacaaacagctatgcttccatgatcagtttatctggtttagatcagcactgtattttattttcaagatgactggaaaaaccgtgagacttctctatacagctgttcagcttcaaagggttttgaaacatatccatccatgccccactttaggcattcctcgtgtgtagcatgtatcacatctgcagtcatggctaaaatgggtacatgccagtttgtaatattctcaaagtcatccatagatacttctctgttcacactatcttccaactccctaactcgttttgtagcttcaaatctgttggaaaagaattgttatttgcaaaatcgtaacacatgttaattcatgatttagaaataaaaagtagataaacaaattcttcaaataatttttttaattagaattttcaaatgaattgactccacttatgggctcatagctggttccaaaggctggacaaaggaagaggtttgtattagtcccttgcaatcaacataaaacttgttcaaagcccaaacgtggatcattaacgacggattgtgtgccaacgctaggtcattacccgaaaatagccaaagtgtttatcactaaatgcatactttttgcaaatgatataacttaaatcaaggaatcaagggaaaaagttaactataaagtttagttttggagacaaacattagattcagtgggagtaaaacaatatatgcattgccattttagcaagaaataagaaaaaaattgacttggaagtaaaaattggaatgtcatcccacaagtttttaagtttaaatatctagaattaatattataaaattatgggaaattaatgaaaatgccaaacacaagatacaagccaggcaattaaaatggagaaaacattggaggttatttacaactaaaaagtactcaccaagtcatattttatggtagtgaatgttgagtgttgaaagaacatcaagagaaaaaagtgggagtagcaaaaatgagtatgtgaagatggatgtgtgactacacaagaaagtacaagatacagaatgattgtatactaggagatattggtataacacctatcaagaacatgacaaaaaatcgactaagatggcttggacacatgtaaaaaaggtcattaaaggcacaatgacgagagtacattgcatggtttttagccttgtgaaaaggataggagaccaaaaggacattaaaggaaattattgaaagagattttatggtaaataacatcccttagaatttagtttttatcaaagctcaatggcatcatttgatccatgtattcaacctcaatgagacaaagccattgttgttgtagaattgtcaaatgaattatatttatagtattgctgtagcaagttagactccaaacaccttgtgtgcttaatataccctgaggaagccgaaggcatacccagataaggataagtagagttggtattgagttcatggaagactaagaatacaaagtttgtttcacaaatctttgcagtgcaaaaagttttcctttgatgtaaactgttcagtaaaatattttcaattattctgttagatcaataaaagaattaaaaactgttttctatgtttgtagaaattccaaatattactccaaaatgataaattatcagattctgaaagaaagtactccaggtgcatacatacccatccatttctggcatttgaatatccatgaaacaggcatcaaactgatggggtggcttcaaggaagagatggcatcttttccacagctaacacaaaccacatctgctccatactttttcaatgcaccagctgctactgcacggttcacactattgtcgtctacaattagaattttcctgccacgaagaagatggcgaagagacaaactttgaagctctctatgaggagctcccttgttttggacacccatggctcgttgtagtgaggcagcaagcatactcgctctcagaggtttggtgatgacagtaggattatgaacacccaagtttacactagctttaaaagaactactagaattaacaagaatgaacagctttggaggaaccccctggtccattctccttgagttattgacaaagtgagatgacaagactaaatctctatcccaaacctcctgctcaatcaaaaccatattaataactatattcccattgcttatgattgacaaaccttgatttaaatctgaaaccatctcaacatgaatgccaagccgttggatgtgatatctagacacttttgctctaacagatcttgggtcaataattaatgcagtcatcccctcgaattctgaagatgcagactgaggttggttgttgatttgctgaattttgcactcatttgaactgcagtgtccattggtgaatacagcagtaaaagtgaatgtggatccagtcttgggtatgctcacaaatccaatttccccattcatgaggcccaccaaacacttgctaatgcttaggccaatgcctgttcctccatgctttcgggagatggatggacctacctgcatgaatggggtgtagatgagtggctgagattcaagaggaataccttcacctgtatcttcaacagatacaatcaaattgacaagatcattggagggggttgaaaaggaaccaagaggtccctcttgactgaaagccttgaatccttcccagctccggcgactatcagcaacaggggagccactcaaggtattttctgagttggattctttgtcaacctctattgaatggacaacctcctcaacaagatggattgtgacaaaaatatgtcctttgtccgtgaactgccaaacaattacagaatcagttttaataatattttcaagaaatacacatcaattttgctctattagtagtcatgcttggctagaacagtaaaaaactaaaaactacgtaccccattacccagaggctcctcgctatgcgaaggtaaggggaggagggggggatattgtagcagtcttacccttgcatatacaaagagactgtttccggattcgaacccataaccaacaagtcatcaaggcacaactttaccgatgtgccaggatagtaaatagaatatttttttcatgagactatgatgaccgtagcatgcctataaggcaaggatgtaggacaagggaacttctctaagtaacttatatgaaggatatcagactaaataacttgaattatacataatgttcttctctctaccataaacttaccttaatggagttacccatgagattagtaattatttgtcgaaatcttcctggatcacctattagtagttcaggaacctgatctgacacataaactgccaactgcagttcccaaaaaatattatgaaaagccattaactatagttagactatgcacattttgaaaattccatcatgataaaaaggcacagtagacgagagatatattacctctactccttttccttgagacttctcagaaaatagcgacaatacatcatccaaaattgcccgtatgtcaaagagcacagcctcaagctctagcttaccaaattcaatcttagcctgatccaaaacctcatttataagtgacaccagagcttttccactttcctgtgctgtcctgacatattcctgttgggtaacatctagatctgtgtccataagcatatgcaacatccctgaaaatccaatttagagcagggtcatggctgaagaagctcttcttttttgtggaatgtatatagttaaaaattaaaaattggataatcgactaaaccatagacagaagacaactcacctaaaacaccattcattggtgttctgatttcatgggaaacagtagcaagaaactgtggttacaatggataaagcccacatgatcagtatgagttaagcaaaaacaagttcaaaaaataaataaaataaaataaaataaaagttacatacctgggattttgcaacatcagccgcctcagcttgttttttaagttccatctccttacgataatcatcttctacttcggcaattcgattcacagtggcatggaaaatatgtccaacaaggagtgcaataacaaggataccaattgaagtagttattgctacccatggccatggtggcttcttcttgaacctgcattaccatcaagcttaattttcatgaatacttcaagtcttttgacaatttgtacattttaattgtaatatatattaaaataaaaatagttagattcaatggccctaaaaaagtatgacaactccagataaaacaactctagactaggtattgctagcagcaaaaccactaaatcatgaagtattaagtcatatcctccacctatttcaaggtggcacactgttattcttacaaactacactgagcattaaggaggacggagatattagatttcttctgtagcattactcttacctgcagtgcatctcatgcttcctaaaagggtctccaaagttaagagtgctgatgtgaaagaaaacatcccctgattcatttgagccatacatggcaattggatgagtatgatttgtagtatcatacacattaacaattacactttgcttgctagcaagttgctgaagtaatttctccactaatgactcaacatcaaagactccccctagatacctgcccagcaagcagtagtgaagacataaaatttgctactctctttaactgtgttcataatttctttttctttttaccatcagttttattgaatttaaaagtagatttgtaacttccaaaacttctaattatcacagggaagaaccaataattgttcatccttctacattaatagagttcataatattctctccaaaaatttgaatgcatcaattaattatttagtagactagttacttcaaagctttagatgaccaaaagggaataagctaaattatatgaatgataaaaatcataaaaaattaccaaaaaaattaatgaatgacagatgcaaaaaaaatcaaaaatttaggcacacccgtcggttgcttgaatcctttcatttggggttgcatttgatggaagatctctcttgtagacagcaaatgtcaggataacccctagcctatttgttttgagcagcctgaagggtgccgttaaaacccctttgccagattctcttgcacgcagcacattttcacggtcttcctgttgatgaacaagtgaataactgtgacaatcataattccaaataaattgccatagatttcagatatcaaacaagaacaacgtgtctcaattcaggtttgtgatattcacaaaattagagtctattcacgtgtactattctccatcaggagcagtcccatcaggacaagcaagagaaaggaagcacaagggtacaaaaacaacaaaatggtagcatagatagttttttcttcataaatattctcccaaaacaaattaatgaccactaaaagaccagtcaaaaccatactaccaggaataaagagcttagaatggatgaattaaaattatgatcaagacatcaaagtttattgtatagcattttcacaattttcataattaataatatatggctcagactagctccacaaataaaattttgcaagtatcagaaacctacctttccagaaagcacattaacagaaatcacatgtgcaattgtatcttgtgcaaagatgacaggagcatattcttcctgaacgggggatggctccaatgcctctggggcatagtcgtccttatgaactgggttctgctctagagtatccatcctcttgatagtccaaccttgctgcttttcaaattgttccctttcagaatggagcacccttaccgcatacgcaacaccacctgtaagaggcctctcaaaagctgttctttctgtgtactttgcaaaagttttctgcaagttttggaagttagattaatttgtagagatgagactaaagattgaaggatagaagaaagtgggatcttttctatccaacaagaaggtggggaaacaaggaaatcaggtcatgctcaagttcagtaaccttgttagcaaaacatataatactaaaatccgaataaattttccacgagaggggggggaataatgctattagacactaaaattaatgacaatgaaacaactcagaaacctatgtgtacagaaattaaggtaacataaacaaagactaaaagcaaaaggtgaggaattaggtcctgatttgcaataacaaagtaaagactagtacctgatcgatggctgaggggctcttagcatggtgaaaggtggagatcagaatggacatggcttggatatggttcatactgacattaaactgatcctgcagcatcctagccctttcatcacacatgcttgcaagagtttctttcctcttctcagtaccttgcaagctcatgtagcagaagatccacaaagatactatgaaccaacccacgacccatgtcagcaaaatcttcctccataacgctctcttaactttcttagagccaatatactggtagtactgttggtggattttgcaaccctgccctgatatcttctcccaccattttttgtgccacatcttgccagcaccaccaccaccacccatcatcttggtttccataattccactgctaataaaccagttaaggtaaacgacagacacaacccagcaacatagcaccaaaagtagatgccccacttttagaccaaacccaactacatggagcaaactcatccacaacagtaaccaacacaagttaaaaagaaacagttcaaacaggttgtgggtgtcaactctagctgattccaggtaggcttgtgtgtgtgtgagagagagagagagagagacagagacagagacagaggcagagagagagaggagaggagagaaccgctgtcaaatccacagaatccccacaaggctaacacacacctattcactaaaagatttgttttttaggcttgtggttgaagaaaattcaagattttgatgaacaacaccaccaccaacacaaacccaattcctaaaaacaagtaggttgaaggggaaggaaaaataaaaaagacatctttattaaaaataataataagagatgtgaccttgataagatgctgtcttatccaccccaatagcttaaaattcagaaatgcaaaatgaacactgaaactagaggcagataagaaaaattcaaataccctttaaagaataaaagaatcacaagattctgggtttctaattctaaacagaaattgatactccttattatcttgtcagctagcagcagctaccaaccaaggcgcagaacaaaaaggaagggccaaaactaaacctacaaaagattcgattttcactatcactctgcaaagaagctctactagctcgcacttcatggccctagaaccaaacaagaacaacacaagcacgtgagtgtgttcgagagatttttatttttatttcttagaagttagctgcacactgtaaagaaaaggtcacttaaacatggagaatgaagctgacaagagctttaaagcaatgagttgttgttcatcgagctcaggtagtaggagaatttggcaaagcaaagatgataagaataatacggtagcatagcacaaatgtttttaaaatatattattataggccattatctctttccaaactatccactcaaaaaacaatacttgtcaaaagaatatagcaataaacattaatatattttaacaagcttattataaaaaataaatttattattgtatattttgaacacaagtgtaataacaataataacaaaatagagggcagaaaaggcatagtcccactgagcagaaatcacagccttttataacttttgtttgctttgtgttcacatccctatccgtccatgccagtagacaacttcttcacgctaagtcgttaactctgcgtgcgtgtgtttgtttagctgtacttttgtgttggcaaaagtgcccctgcatggaaccaaaatttcaagaagaaggcgtaagcttcttttgctcacaatggcatttgataccccgtagtactttatcaaaattgccatgggagggaggacccagagtcaaaagacgtaggtatatagatagatagaggcaccacgcatgattagaacctctcgaggtgttatttccttcttctttccccctcgaatctgtctactgtttagtttatagttttagtttagttgcacctagccacatatctaactttacgctgaattcagacactatactataagaacatcactgtttaccactctcctctgccaatatttaattgatccaacacaagaatgggaacattgtgagagaatttaggtcatttgtcactttacccattagaacttgttctctctcttttcttttttctcccctttcctaatattgtagtgtcctagttttaactttttgagcattccatatgtaagggtatttattaggcccccaaatatggctttaacgtgtattcagatccaaaaaaaaaaattaaaaaaaggtttgtttattgtaaaaattaaaactaaaaacctgatttatgtaataattgaatgaaataaggcagggaatctccaactacgataatgttattcgatatataaaataaaagtggtcttcatagtaactatttaagaaattgaacaaaaacaaaattttataagtatttggggagcatcaaagaatgcaaagtggtaatttagatggaaagagaaagacaagaatagaagacacttaatcaaagagaaagagagtggccataaaatgattaggtcatcactactcacttctttttttgtgtcctctaaaattaaaagttctttctaagaggatatccagtgtaaactcacaaaatctgtattttgtaccaatcacaactttcttgccctattccaaatgaatgttgtcatataagaaatatttattagaacatttattaagaaattaaaaatattaaaatgtgtaaaattatattgtttattgttttttatttgttcttaatttttaatttttaattttttaactggtttcttgaagccatcgattaaccatactcatcataataatcataaaataaaatttccgcttagtattgtctgtcaggcttgtgttaaagattaaatcattcatataagtactccaatattgttaaaatatcgtgtgaagaaatcattcatataagtactccaatattcatataagtactccaatattgtttaaaatatcgtgtgaagaagggggtggttaataaccagatgattcatggctcgcaagtatctcttggaagttactttttgcaatatccaatcaatgaatttaaaaataaagtaaatagtagtagtattcaaatattaaataatattcgttattatagtttggtcagtttaatcgatgaattaaattattctatttaattaattatagatgcatataaatagttagttcttctatttaatttatatataaacaattttagtacctagcttgtttattgtatcatttagtaaagagcagctcgagttctcatgttttgcgtggtttgatgacttattaaatgcttattgaaataaatattaaaaacaacacatcatcagagctttctcagcatgatgtagacaaaggttcaacttcaaaactaattttatatgttaaatactataccaattccgcgtacaaaaatcaatcaatcgacataaataagctaaacaattaaaaaaaataacttctattatatattttgaatttctcttaaaaagtgagatactgaataaatatactattgtataaaagctacgtaagctttttagtttttaatgaagtttgttctttctcttaaacaaaatttgtgtatgtattttacaagtgaggaaatgtttacacattccgcaatatgttgattatattcaacttgacattattatatagactagtgagtaaaattaggttgtatgatatatttagtaatgaaaataatattcttgtaacttaatctcttttttatatgatttatcattataaacatcaagaactttgaattagatcaatttctcctcaacaaatatatcaatgattcaacctcacctcagcttattttatagcgtctaagaaaatataatagatgtaaaagagatagtagaaactaacaaatatctattaacatgtcatcagtcaaagtgataataaacttgaattctttaaacaattaggtcttcaaattttgtagctgaaaaaaaaaacttgattgagactttaaaggaaatacctcaataaagataattaatcaaattttttgataaatattaatcatcaacaaaattgaaagataatttacactaatatcataatgataaaaaaaactaacaaatatctaatgcactgtcaaagtttataaatgcatttaaaatgttaaaacatgtttatatatagtaaacaataatcacatctttctatttatggatgtcaaaacagatttaactcgatacatcaactacataactcgtctaaaggattggattgaaattttcaatccatcatctttttttatttgttaaagtgaaattacatttaacacttacatttttttatgataatctcttaaatatttatttgatttactaattttataacatttatcttttttaaattacatttgattatgaaatttgtaagttttttaagataaataaaataattaaataatttattttatttgaaaaaataaattggcgagtgaactcaacccacaatccgtcacagatgaattacgttaaaactttcaccctaaaaaaacaacgggttcagcccaatcccaacccttttttagttgagttaacccgttttacacctgtatttccacttctcatagtactcaaaaatgctttttacgttagataaacacataattgaataaaataatgaaaggcggaatttggaccagaattgttattgtttaaatagttcataaatttatataaattattttcttgcctcagatataatattttgtaagaaatagctggtacggaaactataaaacgagtactttgaccaagtgaattgtacatgatcatatacatatagatggattaaaataaaagtacagtccccgataaaattgttatacctcattcgtatgagcagataatgaaggcaaaaaaacttgttataattatgaataatgattgaattataatttttctttatctcaagaaaaaataatgaatgtaaaagtcatttaattacaaattgttatacttcatattcgtaggagtattatgtatatcgaattttttaatttcaatattatttgtcttaaaagttatataatatttttttattaattgattgtataattttttacaattaaaaaaatctgtaaaaaaagaaaaaaaatgaaaataatctctactagttcattcgtggtactgccctcaagtaacatgacataaattgtttaatgtgtgtttggatgagtgttaaaattgattttgaatgaaactaattttaaaattgattttaaaatgacgtgatttatgtttaaatatttttgttattataaaatttagttaggagtaaaatttaatacaaatttttggatctaatcgaaactatttaaattaagttacttcaacttataactttttttggatttttttaacataaaattaaacatgtaaaaagtatatcataaatcaattttgaatttataatcaatttttgtaacatgatattaaacacacattcattgaatgtgcaacgtgacgttgtttttaaacatgggcattcccatttccccaacaggatcttcttttgtgtatattaattaataattaaatatacatacgtgtaccggtgtacatgtcaagtgcaatgggacaggtaaagggattaaaaataccccgtgataaataaacataaattaacaaacatctttaattaaatcttgttattatcaaaataggacctatagatacatctgatggaagtgacttggattcttgaacacgcgatcttgagctcaacttgtgaaaaatatcatcattttaatatctgtttatgtttaagaaattaatctgtcacttatgaaatgagataaatactctaaaaaattcaaagaaaaataatcagaaaattcataagaagacacgcaacctaccatgacgaattatgatccagttggaattatatcgtacaatgacagtaaagaaaatggtaataaaatatcattaatgtaataaaacatgattaaattaattactaacgaagaataataactaaaacatgcataatcaatatcaaataatgtagggtcacctgaaccatgcaggtgttaaattggaggcaatgcccctttaaattctcaagaatagaaatttttttataataataaaataaagtaaaataaaaaaatagtttaaacgtttgtataagagaaaaaaatgaaaaacatagaaaaaataataaaaaaagatgaaaaataagaaaggatgaaaaataagaaaagagtgagtgtgaatatgtatgtttgtaacttttatgaatgcagtgactacatttttacttttgagcaccaattacattctaattttgttaattttttatcttttaaattatacatttttacacttttgttataataatttgtttctttaattttcttcaaaaaaaaaatttcggaagcaccgcctcctaatctccaccactattacccccttatttttttttttctggatccggcctgaacaatatgcgtaatccttgtttgtgcgccacgagaagtggaaggcaatttggcaatgcctcaatgctattaatagcgattggaattaaacaaattctgaagaaactggcgactctaaattatactatacagtattacagtaagttaataatgtttaacatttcatgtatttttgttttttctgtagaatacttgtagtaaataattttttttatcattttaattataagattaacttatcataaatgtaagctaaccatgcatggtttgggcacttttgaggaaaaatagacaccactatttttgcatcaaatagcaaaacttgtccaatcacctctacccacaacaatatcccacttatcaaaagttcaaaacataagcatctccagccaataaccactttctatcgtcaccagttttccttttctattaactttatcaggtgcgtacacaaggcacccatcttggtcaactgaagcaaacaacttcaagcacctatcttgcttgaggccttgagcaaaggaaattaaacacattaaataattgaatagaaaaaaaatattggtctcgaattttttaatcttccaacttacagaacagtctattaacccacgagctaggtaagttagacatgaaccttacaaaaaactatcctattctaatttatttaaatgtacatcaatgtggattgaactaatccatttattcaactaatatataaggatggagtacggcggccactaaaccaaacaaactacatgtcaatcccatgaggacaaagagggttaaaacaattaatattagcatgacaagcaacctaggtataaaattaaagttattttgtttctccctccatctttattttcgtcacatatgtcttgtgcgatgataacttttaatattgtaattaacttattaaccatatcatactaatggtacaaattattgtttggaacagtgtttaaaaaatagtatgacgtgttcacaagtgggactggattagttgaatgttggttttaaacatttttaaaaaggacgtgttgatgtttatgcttccaagacccgcatgatgatgagtagggacatgcagggtgctaatttggaagaggcaaggtgagatcaaattaagtaagaaaccacttcaacgtgctttatctcagaaaggtgccaccaagttttttgaaaaccatatgatatatcacaaaaagtttaaagcatcaacaataaaatattattcacatatctcaaaataaaaatattattcacattctgtataaataaaattatataaacttgtatggtcggttttttttaatttttttttacataaagtcctaaatcttcaaattatcttatttgtaatgtatttttattgaagaaatgtttacgaagccttttcttttaggtaaaatggaaagcaaaatgtttctgcaagccagagaagattcttcgttgcaatcattgttgcctaatgcctctagtaaaagatagtaaataatcaaatattccataaaactaaggggtaaactaagaagaagcatgagtggtatactgtatatgcaatatagttttattattggtacttatttggtttagtttgttttgaaaaagtaattacttattttttacactttttggagagagtttaaagaagaagaaaaataacatgttttaatctaaaccaaatcaaacatgtgcttaatgtgaatgaaagactatagtggtaattgacaagtcagaattaaaacttgttgtgagtgtcaaaagtagaaagcataaacaattaccaagtggtatatagttttattttttggggtccgatgcggggtagttaaataaatcgaacaagttttttgtttttttgcttgtttttagacaatgacctgcttccattaacagaacaacagccgacctgccgggatatttgaagagctccaactttccttcttgaattttttttttctttttaccaccacgtaggtgtgatgaattattttcttaatgattattttttattagagatttttgcctgatatttttggtaaaattattctcataattacatttatttcatttaaaacattcaaacttaaaatcttatttgaaaatcatcaaacacatacatcaactagcttgagattgttccaatttaacctaaagttgaattcaaatcttaaatatgcaattgtcttaaaaactcgaagaacaaattttgtcattcttaatagtcttatccaacttaaacataattatcttccatagaaaatacctataatctaaaaaaataaaatcttatttaaaaaatttgaatcaaattctatttgaaccaacataatattaatacatttcttattaaattactagtataattattttatatcataaattaattagattttttaatataatttttaaaataattattttaaaaacaacaagtttattactagtataatttattattagatgacaaaacaaaatattcttatattataaatgagtgtgtatatttttttccaacatgatgtcgtacttttttaaagttaataacaagcaggcttataaaattgagtacagtctagtaagcccaaaactccaccaaatgtcttaaaaaaatatgggcttgagatatccctctagtaagcactactgtggcctgaattggtttcgtggcatttattctagcctaggaaatccttattcaacgcgactttgcggccttgttcaccaaaatatttcatataagtttttttttttttttttttttggttttagtgtcaccataattaagacattaggttttccaatgatattttaaggtattccaacaagttttaatccgttgaaccaattatgggactcatcaataggacttaatcacacttaaaactcattatccatttccaaaaatgtatgctctcatatcaaattcagatcttttcccatagattgaacatatgttacccactaaattctatggtcattgggtaaggtttctgatttttgataaaggagagatttgatataaaaaaaatataaatgaataaaagagtgagaaaattgtatataccttgatgttcattttgaggccatgtaatatttcatatttgatgcatggatgaattaatgttttaattttactttgttctcatcaagggatcatagtacaaagtattttacaattgatgaagaatagaaagattgataatcatgtgagataggttgccactcaatttggtgactgacatagatcaatttgaacattaggcatttatgatcatagaagattttttactagttaaacaaagaaatcggtgaatggagaggataaaggtcgagttgataaaaggcatctttatgtttgggttgttcgtagaagaatttttttgttttccagtttaaaagatgtaaaacgaaaaaaggcttaatattacttttaaaaaataataaattaatattttagataagtgatgattaaatgggtaacatgtgttttttgttaactgaaatagtaaaacaaataaataatcaagttttcttagttatttgtgtaaaaatattatatagcttacgtaaattaaattgtgtatttacttctatattataaattagtattttactttgtatattatacaggatcattgttcatttttatataattaaaagaaaatatattgaaaatagtacatggttaagaatatcctaattgtctatatcattcaatctttcttatttttaaattaaaatttgatatatattttttaaaatgtaaataatttaaaaattatagtataatttaaattattcattataaatctaaaatataatttatgtatttaaatttcaagctattaatttattataatataataatttatatattaaaaatatttattatacaaaataaacatttatcatttgagtttaatttaaattatcaaatgtactatcaagttaacgtaatcctgaacatacctaaatgatgtgaaaatgttccacaatttttttaaatcaagttatacaacaatggtttgctgatgcttatcatttccctttctgatagtaacaaaacaccgttctaaggtaaattacgtacgtaaacttcttctgttcattttaggtgaatcaattattataatttcgtaaaaaaaatgattaacctaacacgcctaattggagccatctcgaagacttgttcacgcagtgtattaaagctgttcgaataaccttacgccgcgtgtcccagtgacatggcattggccaatcggtaagaagccgtgacgctattatcggggatccactaaattaattgtagttgaacaaaaataggtttgttaaatataaaataaatactaatagtaaaagggagaaacaacgagaaaccgtgtttcactcggatcacgcattcacaaataaggttgaagagggcattgccggaagaagataaataccgtctttcattttccggcgatctctggtttcttccatcaccgttttccggcgatccctattccttaacagaaatggtaattcactcattcattctctaacgccactgcttcgttgactttcacactctcgttttttatctacagtttctctttctccgtcttgtttttgtgttgccgactttggtttttattttttatttttcttatccgtgatatctgatttgtcgtgtttgaaattttcgagaatgacattagaatttgatttggtttagaattggaattcactctattgcttaaatctctttggatttctgcaattagaatcaggatgttgtgaaaattaggtcaaatactcaaattattaattgattcctgataataatgttgttgacgtaggggttttgttgttatagttatttatacgtcgaattaacttctgaattttatggttattagttctgattgtgaaatgtttcgttagcttatggatcggatctggtgccatccaaatccaattgtgccgtccctgtgttatgctatgcaactcttgttgattggttttgtttgtttgatttttgcaatgctaattgaaattgaaatgtggaaattgtggttttgtgtagacgacatcaaggcgccttgcggacaggaaggtggagaagtttgagaagaacatcaccaaaagaggatttgtgccagacacaaccactaaaaagggaaaagactaccctgttggcccagtgctgctcggtttcttcgtctttgttgtcattggatcatgtaagagaaacatttctacatcatcttattcgtttcttttggtggcaaaatgttttctactattttgttttcattttcaattataaaaaacatgtgacttcatgtgattcatgtaacgaatctcatctagtgtagtcagataaggctttgatgttgttgttttaattacaaaaacgccacattgtttttggtttattttctatttttaaaactttgtagaagaaccagtaaaattaacttttttttattgttttttgtgtttaagtgtttgataaacaaacttttgtaaatacaaaacacggtcagatttttttgtaactgaaaaggaaaacataatataaaaacataatcgttttctcaaactaaatgaccgtgatgtttgtctctattcctgtcgtaggtttaaacatttgttgttgactgtatatatttaagcatactcgaaaagtcggatgccaataaatgtttgcaacttatcaactatatcatttcagaagaaaataagcaagcaagcaatcgttacattgcttcttatgtgatatgtcttgtattccataaagtgttggtggttaacaacaacatccatacgcctttatagctaaagcacgtgaatagctaatttatggttgaaacccggaattgaagaggaaatattttctgatggcctctgccaaaaaaaatatgaaaataatttggattgcaatactcgttgaatcaaaatggtggggtcttgcattcataacaaaaatacttttgcttgtttatttatgtgtatgcgggtgtctaaaggattttagtagagctggtagggaagggtatgctttagtggaattcgatccaggttaagcaatccctggaagaaattggtgtcgcttgagctaaaggtgatatatgtgctaaggagtgtgttagattgtatttacctttcttccaccatttgcattttcatagccggtgctttctagttccattgacttatgtgttctcttttcatggacagctctcttccagataatcaggacagcaacgagtggaggcatggcttaaatggagctttattttggattgtgtcatcatctctttcttagcctcctcgtagaaaatgctaatacttctccacatgtactgtacttgtacaagacccggttcctgttcatgttttgatgaacttttaaggatttttaattaaaaatataacttttgtttgtcttgtctttaattctaccaattacttacgttggggtgaatattataatgcatgcaaaaagccaaagctgcccatggtgagaagcgaggactaaagaggttttgaaccacaaagactgttttattaatccccagtgtcatgactcatgacaggagttctccgattgagtgatgaattataatgtggttcaacatttagagtaaaataaataatataaatttaattcaccttagagaagtcaatttgaaagggtttcaactttcaaaagataatgtgaaatgaaaaactccatgattcctttgagagctatccgttgtcctgcagactttgaaacgggagtttccatacagtctgacgcagttatcccaaagcactaaagattatttactttataatacaaacagaatacttgtcatcaactcaatttgaattaaaaaaaaaatgtaaaccacttaaagcattataaactttatgaaatgttgcatcccctaatgctaagttaaagattgagtttttcttttttttttcatcataaaccacttataaactcaaaataaatgtttaactttgctccatataaggtttgtttttttttataagaaatatttttttatttatatgtatcatttttctttattataccctcaaaagatagcttttgtattttcgagccagaacaagttggcaacctgaaacgttgaaagaaatcactcttcttcatcttttatgttttgacaagcgaaacaaagttactgtatcgaaatctctattctgcggtcaaacgcaaaatactgtatagtggttggttcttcactgtctcaaaatagaaacaacaatcataagccgtaaaataataatgaccttcacttgaagggtactacattgagtagttgggaggagccatcaaaattgaaatcccagcttctttcccgtgtgacgctgtaagcaacctgagaaaagccacagtttgcacttagcagacagcagtctcaacagctcaaatgtggaagaacacaccttttgaagtcacaaatatctttagaaacatgatgttatatatatatgtaatgcaggactgcaagagcaacaaggattcagcatgaggcagccaagtgacaccagactgcaaggccaggttgagaacgttttaggttctttatatgcctctcccctgattcacaaggcttcaattctagttggtagagccaaccccagtttggaccttccagcttgaaaacatgaatgatactagctggaattaaaccttcacaactttcatatacagggaaaagtcttgaaagcaagtgatcaaggtgcatgtttcagagcatgaaaaatacatgaagtactacaaacccatatcattttccatctgctttgttaaccagcaatgaacattattattcctacatcagcatcaattaccagcaaattgcaaagaacctcatgttttgagggaaatattctcaggtcattgctgtattatacaagctacatcaggccattgcagtgaggcatggataaaatgcagtaccatgtgctatccattgccgttttcttccatgtggcaccagacaccaaggaaccttcacccattccctacttgctatgttgtaagtaaccaatcgattcatttgtcttgatctcaaggataacatgagcaagcctttgtttcccaagcaagtcattctaacgtgcttcccgtaaaagtccaagcaccagacgtttggcattctgtcaacctccttccacaagaaagtcatcttctgcagctcccatatgcatatacatgtggctgcattctttgtgagcagccccacaagcaatagccggccatcacactcggccagcatgtggtcagtcagatgcaatggcgctgggattatgtactgtgtccaaaccccagtttccatatcatacaaaacaatccctttgggatctgaatgcaagaagtacagggtgctgtcaatagaaacagcgtgtgacctaaaattgagtgacagtggcagcttaatatctgaatccatgttttctggatggctccaagactttgttactgagtcataaatttcataatctccatcacaacccaccaataggatcttgtagccagcaccagttgagttcccatttactgtcattcctatcgcagcacgagacccaaccctaactgattgagctggtaactcctttaaggattgagtcaatgggttacaaacatagaaattttgatgataaatgtcaagaaaacaaactagaccccctgcagaagccactggtaaaactatcaactctgcgggcagtgttgatatagtgggatggtaccacttcttcatagaagggtcatacatggctccagaatttgcatgttcatgagttatagtgtaaaaccatgggtttgcttgtgggacttgagcacaatgcagagaaaaactttgagaagtcagcaaggaattccattgctggcatacagagcggaagcggaaaaatgtggcaatgggaagtcgtgcaatcacaggctcaaatagatcctcaggcaaatttttccaaatttgttgttccatagcttcatccctggaggaccttccagatgattttccacggctcctatctcttcgagacttcttagatggatgctttagaggttccatcatcctggaacttccagactttccagctgccattacaaggccacagaagtcatctacggagtaatcatcaatgtcaaagaaagtcaatctgcgaaaaggatgttcaaatatattcatatacttcatttaatttagtagtactgtagtagaacaaagatgcataaaaagaccagcacaattcattggaaaaaagctcaaaatcagaccataatattaatgcacaaattgatattttattccaaaataagactgaccctactgcatatttcaaggatcaagaggatatacagttatatcatcaaattgaatacatcagtaatccaaggtgctaagttgataagaaagcttttcctttgtataacactaggacaaagacaaaatgcacaaaatccagaccatatgttgtttatccaataatggtagtcacacagttagaacagacacttaaagcataaatgttcaaatatgaatatataagatgagatagtaaaaccaacaatttagggtgtgtttgggagtgaggttttggagggaaaaggaaggatgggcaattttttaaaaaaataaattaagagagttatataaaatgtataaaaataaatcaaagatcaggacgttaaattaatgttaatttgtcattttatttcatttattttcaaaaactatcaaataagtgaatgttttttaagaaatgaaaattttgctttccttacctttccctccaaaacccaactcccaatcatacccttagaagtaagggatttttagtagccagtaaatgaggaaataataaatggccatgtcagactgtaatctttgcaaggattgcttctagccaaatttgacaatttgatgttaagcccattaaagcactgttcctatctcttgtcgtgcaaaagaaaccgtattttatacaaaaggaccaaggtgatccatcccttcttaacaagcattcttcagaaagcttacgatcaagtattatcaacattttacaccgtgattaagatacaggcatgcacaccctgacagctttgagagtggacctagtgatgataacttgcctgtgttgttaaagcaaagaaattgcctctaacctcaatagaaaatggttgtattgttcttacttgcgtgtttctcaacatgtttctaaatcatcatatttttttaatctgtgtctgaatcaaatccacctcttttctttttttatgccaaaatttgatgtaaacctactcaaactaccctgagaacaatgagacttcccaagttcagaacacaagcaacaatgtgcaaaaatcatcaaattgtaccagttaactttctctatgacaaaaagaacaaaatcaagcacatgggaaaccaagggccaagtcatcttcgtaagtttcacaatttatgctctaattacagataatgaatcatgtaacaacacacacacacaaaacaagacaaccaacagaaaatctaacatctaggttatgttttcaggaagcatgttgttaatgattgcacatttcagagcagaaacaaactaactaaccaaccaaccaaccaactggttaacaaaaataggatcaaccttgttatggtttatgaacaaatgaggttcacaaaaacataaaagaaaacaaaaagtaaagtgtagagagaaaaacagcatcctgagtccaaacaaaacaggtggagaataaaaaacatttttttaggaaaaaaaatgcattggaagtaaatctaggagaaaggaggggacctggggatttgatgagagactggagggtgaagggtaaaaggaggagaaagagagtgagagaaatggtgaaggtgagtgatgagcatggcaagcccttcttcttcttccatgcccccaacccaactcaattctcctttgtgtaaaaacctctctctctctctctctccttgtttacccgctcttcattttccacgttgcctaccacacaggacggacttttactcacccacccgtgcgccactttttttctttttagcattgatatgaaatatttatcaagtttataaaaaatctgaataattgttcattttaatgaaatcttctccttctaattactttttttttaatttacagctcaaatctgcttaaaaatattaaatataataacaattggactaacaatttattttccttgcgacactttaactacattttggttacaaattgcatattgttaaaaagttaaaaagatttttttcctttcaccatttattcttttgaaaggactttttttcatttataagtataaagtataagtacaaatctcttatgtattgtttaatttatctatgttatttaatctgagatttttatttatttattttaacacttgacattcttaaaaaatgcacactattttttttatgcacaggcagataaggtcgaggatcaagtacacactattttttagagtttaattgttatcaatataaattttcttcttttatcatgtgacttttaaaataattagaatgaaatttaaactttttttaaaaaaggtgatattttataattagttgatggtgtaaagaatttttactttcttgaaatatcaaataaattattttttaacctcttcattaaaacgtccctagaccataaaaaaatattcgcattaattactgcttaccaacagccattaattttacattgacattgcaaaagccaaaaggggaggagtgagaagtgtgagatatgataatgcaatgtgttatgttatgtgtccttgagagtttttgtggtacaaagcgtggtgcatccccagtggctcctttcttgcacgcacacgggatgattagtctgaatgcgaatgatgattttgttaggtttacggaaaaggccctccaaagctaatcgatgccattttccactcatttctcataagtggcatgcaatgagtgacattgtggcaaggagttgttgtaattatggtttcccagctttcactcgtttctttaataactattcatcccactttaattttggaaaaataattgattttcagatgataccaaaatcctactattagtgtgatctttttgatttcttggttaaaaaacctctatagaaggagaagatggacttacggttagagaattttaaatgggggtaataaacctgtgttttatgttgtgaaaaatatgatgaacacctttgttgtttgcttatatttgacactaattttactgtagaattaaaaaaatgtaacaaaaatgaattgaattttttgctcagcccatcatttttaatgaactgagttacatgtatttacttgaaattcgcctagcatgacatcattgacatgtggattgtgacatgttagggtagaggtaggacgcacaaggtaggttgacacgttaatatcaagtagtttttttaatattttttatttatttacgaagttttccaaaagtttcaatagaaacctaattctctttatttttcattattttttactattcgtaagtattattctaattttaagtccgttgatatcatctgagttatcaaatattatatattttggtgtttgatgatgttgttacaattctgtctttattaaaatgtactatgatggattggatagaaaaaaagtgttataaaatgatctagttcttctctagatcatattgatggattccacaaagcttatgtgtatgtctcttttctaatggactcctccgataactcaaatgatatcaacggacttaaaattggaataataattatgaatagtaaaaaaataaaaagtgttataaaatgatctagttcttctctatatcatattgatggattccacaaagcctgtgtgtatgtcttcctcctaatggactcctccaataaatgaagaggatatttttctcttataaaacatcttctccacttggattcaatcatggatactataaaatataaatcccaattatcggccaaggaaaagggaaagttaatgtcaaaattgtggtaatagatgtaatgagagactgtttatgcggaaaaatataattataggggagctttatatgtaatagttatacaacatttaatctcgacttctaagtaatataaaacttttgaaatattgaaagatgttcccccaattgatactgagggcaaaagtggcttaaactttcggttcaacgctagtgtcgcgacctcaagttcgttgatgttattaggagttaatatatttgagttattatttattttggtgctcaatagttcggtcgtgattttgttcttattagaaggcgtcttaatgggattaagcaaaaatagtgtttataaattatccttaatctcatgagcgaagattaaaaattcaatgaccaatatcaatcatggattattttcatttgtaaatataatatcaacttattaagttatttcctaaaaaatacagttatgacatcaatacattcatctcaagaaaaaatcatatcaaaccaaagtagtcaaatactacaaaaaaactaaagcttctatctggatttttcctaaggagaggaaaaggaaagaagacatttaagtctaagggaggagttttgttctattccaccaatcctttaacacaattatggttccttctcaagcaaatttcatatcaaactaaagtaatcaaatacaaaaaagccaaagctttcattaccttgttaggtttcaacgttgaattttcctaaggatacagaaggagaggaagatatttgagttcaagggaagaatgagaattataaggttgacttggtggttgaagagagaaagaaaatgaaaaggtcatgaatttgaatagttttattaacaaaaattaataattaacatttgttataaaaaaaaatcaagaaaaaagattttcttctgtcccaccaatcctttaacgcatatgcatgaaatctcttcccaaacaaaaccaattagatttttgaacaatgaattttccacaaggatggataatgaaatgataagagtagaaaattaagagaatcttctttaaagaaaacgataaagattgaaaagaaaataaaataatttttttttgtgatgtgatgaaggatattaagaggatttaattttttttaaagatgattacaaaatataatgtccaacataaaataacccataacatacaaacaacaaaaatacacatatgcttacattatatttttcaaaagataagattattttcatgttaattagtttcaatttaaatttaattttcaaagtttattttttcatgttaactatattattttttaaagattttatttttttttaaatattttattttttttatcttaatcacctgtacctttaaattgaattaaaaatttctaatagaattatgaatgaataaataatttatatatttaaaaatatatcttatcataaattttaattatatattaaaatatttatttattattaattttaagttgaaatacatttttaattatttttaaattttatccttgtaaattatttttattttcaattttgtttgttttatattttattcttataaaactttaaataacatttcattatttaaagtattttaagataaaaaatataatttacagaaataaaattattttaaaaaagttaaaaatattaaattataagggcaaaaaaaccaaaaaatacaaaaaaaaaaaattacaaaaatgggacagttttgaaactatttatcaatatggggcaactggtcatgcccagttctgggcgtgacctatttctgccacgtgtcatgcacaggtgaatcgatgcgtatataaacttcggacggtcataacttttgactagaatgtccgattgagacgaaaccggtggccacgcgcttgaaattgagaggagaaggcctgggcaagtcttggccaaaaatttttctcaaaagaggcctctaagtgcctcaaaattacgatttaatatttgaaccttcaaaaaatttcttgttttctaattttttattcatttaattagttaattgcatgctattttttaattgtctaattacgtctcttaatttcgagtattttgacatgaaatatgtatccatcggacattgctacgaaaaattatgattgttcaaagttatatgcatcgtcaattttacagcataattttgttcaattttttaaattagttttgtgatcagtgaggacattagtcttattgcttgtggtcgcaaatttttcccaaaagagacctttaagtgcctcaaagttgcgattaaatcttcgaaatcccaaaaaaattattgttttctaattttttaattattttgtcagttaattggctaatattttttatttttctagttacttctattaatttcgagcattttgacatattgtacacctcgatcggacatttctatcaaaagttgtaacttttttcgatattctaaatttttatatggttttgtttaatatattttggattttttatcccagagtacattcatttctaactttttcgcactcatttcacgttttaccacttgttccactcatcccaaagtgcactcaccacacaataatcggaattgtaacaccccattaattccaatgtgcacagcggtgaaatattgcagaactctaaaaataggagtggaactgcgtgagacaaagttaatcaaattgaaatgtaaagaattgcattgcgcttacccagagagataaagatggtgaccaacttactcgcacaattgatcattcaccatgcaagatggacgatcctttctaattccctttctcggttgaatgtatatgttttgactacactaattttacacaattgagtcaccgattgatagaaagcctgagtttcggtgtagtttcaataacgagttagttgactaggtgcttttgactggaacaaaaagagaattatcaaattatgagaggatgaaagagatgatgagagggatgataataatgtgtttaatgggggtagtctcaatataaaaaatgagaaatatcaacatataatattccatttaaaatgctttctatattaaaaaaatgtttaaaaaaatttataaaaaatgaggaagtatcaaaaaataaaaatttttaatttttgcaaattccgaaagaaaattgaaaaattttattaaataaaaaatattatactaaacattagttatatatatccagaatatattacataaaatcatataaaattataaaaatatattaaataaaaaatattattaaaagtaaaacagatcatatctatcatgaagatcaatctaaaaatactttcatattaaataaaaataaaaataaataatattaaataaaaaataaaaaaccaaatattccatcgttaatttggtcactaacagtttttgcgacaaaattttggtcgcaaacaaaaaaatagaaaaacaaaaaattttgtcactaaatcgatcgctaaccgatttagcgacgaatttagtcacgctgagcgtgaccccccttggtcacgcccaaattaaggcgggaccagtcatgcccaattttagacgcgacccactgtcccagattggtaaatagtttaaaaacggccttaaattaataattttttatttaaaatgtattatttaggttcttttgtcaattataagaactaaaaaatatttacaccttaatcttttaaaaataaacattacaataatagttaaaaaaaaccttatttgaaacactagttaagccgtaccacgacatcgaccaacattaacccctaaaaccccattcggtggtggctccacccagacagcgtgcgtctctgcgactaatagctacagcaggtatgtcttttgcgccaatggttactcggttcaaaaccagtacggttcagaaccggttatgaaagaattccaggttgaaccgttttttaaaatactcctgctcaaaacggtttcagaaccagtttttgaaagcggttagggtttcgcgctgcacgaacccatgctagtgcttagggttcgaggtttgtgttttgaaggaggttagttagttgtggagagtgtgtgcgggaagttggggatattcatagagagagggtgtgggtttcttctgctttggttgcgtgttggagttggactgagaaaagtaaggtcaaattataaaatttgtgttggcatagcatagcactacaccaaccagtggttgtgtgtgaggtgtgataaatacaagtaaagctgctccttatgggctagcttcctagcctgttctttattttgatctgatttatgggctaagcccaaatttttctacattgctctagccgtgtgtcattggcataaacaaactatgggattctatttgtaaccttttctcttttactcttcacatgtttgcccctttttgcactagaaatatatttttttaaatgaatttttgggatgtatcatagaaaatttgtgatacatgtgttaaggaaactaatttttctaatgtagttaattttatataaaaataacttcggatgagtttaaacaaaggatagaagaattagcttccttggttattcaaaaaacccctcaaacttctacatctcaagaagctcattctagataaaaataactatattacaaaaattagtttcataacatatacaaaatgattttattacagaaactagtttttataatatattaacaataattacatcatagagactatattttgtaatatagttcttctttatatattacaaaaaaaattgtaagatttgtgaaggaaaaaaaagacaattgtgctggtgacatagaagggttgtgaaggaaagaaaaggagatgaaagaggaaatattgagagagagagaaaatggaaagggagaggtaaggaggtgtttcctgtgagaagggaaggggtgctagtgagagggaaagggggaagggtattttggaaatattataaaaagatgtgtagaaaagaaagacctacgaattatgagttgatcatggttcggcctaaatcggattgtgttttgaccaaaaacaatagtttatccgtatttgcaaacaaaaaatatattgatctgtttattgaagtaaagaaaacaagaggctatatattttttcggggtgagaaacaaaatgtattccctaaattttgttagttggagatatttctggatagtacagaagctgttagggttgcattgttgctcttgatgatataagggggaaattatcgagggagttgctatttctagtcccccatattactagtatgctctccttagtatcccataaaaaaatagttttaatccttattttttttgtagaccaacattacaccttatgaaatatgatttggactcgtcatgctggtttttaaaaatttgacctaagaagttgttatgcgattcctttataatccattgacttattcggcttccctcagttttcccaactcgaagatgactcgcggcataaaacaccgtcagaaagccaagagcaagaagaaggttcaatctcgtacccttttcaatgttttgtattataataacctcacttcattatggttttttgttggcacctctcatttttttatataaaattttgtttaaatttgtgggcaaaaaaaaattcagggctcgaagaaagagggtgggtcttcttcatctttggcgccagaaatcccagtgaaggtgtggcaaccgggtgtggataagttggaggaaggtgaagagcttcagtgtgatccttctgcttacaattctcttcatgcctttcacattggatggccatgtttgaggtattttcattcatggccttttttgttcttttcatttgttttctgtttttctatttggctccacagaaagaggaaagagagcaaaactttgagcttttttgataaacaaacctgtttgttttagctggtattgttattattaataatgataggatcatatgttgttatgtgaagttcctttggcattggcattgcaattcagtggagaatcttagccacctttattgggaacttgctttatttctgcttagtatcagtaatcttcaagttattataaatacattttggggcttttgacagctttgatattttacgtgactctttgggcttggttcgaaaagaatttccccacacagtatatttcgtggcagggactcaggtcagtgttgtttcatatatatatatatatatatatatatatatatatttgtttgaggatgtttcattaatcaaatcggaggtggttagtggtttcatgagaaaaatggtaacgaatattaggctttgtagacaaatattcactagagaaagttccctttaaagggattttgagtcttgaatataaatttctttcctttttttatttattataactggtaattatctcaagaaaagttaacacccagcagctcatagttatgttgtccacttgctttgcttcctttgtttttctccattctacttcttttgatcaacaaagtcatgttatggcaatgcatgtgcatgtgccacaggcagagaaaccttcttggaattctattggaatttttaaagtatcaaatattactggaaagagacgtgagccggtgcctaaacttggaactgatgacactgaaatggatggtgaggatagtgacagtgacgatgatagtgaggatgaagaagaaggtggtgctcagggtcccagtttgcaggcaacttcctcttcatttaagtttttattgtttcatttcttgactgcttcaaatttgatgttactaacattttgattctttttgcatctacagttgcggaaggttgctcaccaaggatgtgtcaaccgtatacgctctatgccacaaaatccccatatatgtgcagcttgggccgatactggtcatgtacaggtcagacttttcaaccatttgatttagttttctaatttgacaaaaaagacaaaaatctatttatttttactaggattgggagattatgattttatataacaaaaaaagacaaaaatctatttattttttactgtatgtgactggaggttagcggatgacagaatctgtaagatcaaagtgtccataaaatggggtggaaaatatttaaatacatgattgtggtggcaagcttttactgtattggttattattatgctcttacacattactaaaaaaaactatgtacctcattgtctagaggctcctcgctatgcgaaggtaagggggaggaatattgtacgcagccttacccttgcatatacaaagagcctgtttctgaattcgaactcatgaccaacaagtcaccaaggcacaactctacagctgtgccaggactcttacacattgcagactttaaatttgaaacaaatggattcgtaaaactttggcttgacttcataaattattattatttttttttcaaataaggttaagtttgtttagtgtttgttgaataaattaattaggactgcaggcctctttctttggctctgtaacagtttgggcgacaatacttcagataaacttcaaatgagtaactattaggattagatatgataaattgtagctcaggtatagtttactcttagatacagatgtggttacctggttctaagcattgtaacatttaaatttctttaaattcttaaataattagcagcagttaaggttaaacaatgtggagtgtatttttctccatcttctatttcaatcaaagttaaatactgttttaagccatgccttctatttagtatacactatacagtctgatacttgagaatcaatttgtaggtctgggacctcaactctcacctaaatgctctagctgagactgaaacagaaggtgtccaaggagttgctgcaatttttaatcaggacccattgtataaatttaaacacaaagatgaaggttatgctatagactggagtcctcttgttactggaaggcttgcatctggtaatctttagttatatttttttcagtttagctatgtcttccccctgagggcgagccttggcatagcggtaaagttgtgccttggtgacctgttgtaatgagttcgaatccgaaaacagcttctttgtatatgcaagggtaaggctgcgtataatattcctcccccttaccttcgcatagcgaggagcctctaggtattggggtacatagttttttattcttagctatgtcttcccctggcatgtctccatacttagttatcacagatatataaagcttgacaatgatcttcatttttgaaggggattgcaataattgcatttatctgtgggagcctacatctgctggaacgtggaatgttgataatgctccatttgctggacataccgctagtgttgaagatctgcaagtatgtttactcatatgcaaagcagtagttgctcttcttgtagtttcagtatagtatattttgttccttacactctaattttactagtttatccttatttataaatctaattagatttttaatgttcaattaatccctgcagtggagccctatagaacctgacgtttttgcttcttgttctgtggatggaaacattgcaatatgggatacccgtttggggaagtcaccggctgcatcttttaaggcacataatgctgatgtgaatgtaatgtcatggaacaggtattaatacattaattctatggtgttccatcaactgctattatagatctcttcatcactttgttctatattatactgagcaggttggctagttgtatgttggcctcagggagtgatgatgggactatttctattcgtgatctcagactgctcaaggtataagttgacttcgtaaagaataaaacaatagtaaacatgcttcatttataacagggaggttactgtgtgcatgtgatgttctgtcaatggtgtttcaaattatgtcatatccagcttcaatttttttatcattcttttttcctgttgtcccagtaggcatattacattgaatttgtaaagctgtctgatgactttcttttcccttgtttcattatcacatctttcttttaccattcatgtgcaaatcaagtgcctataaatccatgtatgaaggaacttctagatgcattatggtgaagaactattatagtattattgcattattatgatttagaaagtaacttcacattgtctattttttcctgcttattaatttacttgttattaaagctgatatgacaagtgggcaggaaggagattctgtggtagcgcatttcgaatatcacaagcactcaatcacatccattgagtggagtcctcatgaagcctcttcattggcagtttcttcatctgataatcagcttacgtaagtaaagggttttgatagcattatctgctgaattattttttgcttttatactgttaagagagatttagtggtaaaaggtcgatctttacattactacatgacactgaactttatggcatcttctgatccaaatagtgaaaaaggattcacatgagcgtaaaggactgctgttattttataattaactctttgcatcgctagttgtagccttgtcgggatttttttttttttggctaacccttccccagaatctacatgcgcatgagcttcatagcaccactgctccttttttatttgttatttatgtatttgagatttgacaagttttgtacctttctccacagtatatgggacctttctttagaaaaggatgaggaagaggaggctgaatttaaagctaaaaccaaagaacaagttaatgctcctgaagatttgcctccccaactattgtttattcaccaggtatatccaaatgctcctccgctctatttatctgaatgttagaataagactccctgattaattgtgttcattcgtttattttgccttgaattaaaacagggacaaaaagacctgaaggaactacattggcacgcgcagattcctggaatgattgtttctactgctgcagatggattcaacatccttatgccttcaaatattcagagcacactgccatcagatggtgctgtataaaaggcacccccgctaagttttcaagcaaaccatttcgtgaatctacttgaatgttgaagaaagtttcctattgtaacttttttcttttttttctttttggttccttttgttttcttcgtggtccgtgcttcaagttttgtggattttctggttagcttggtattcttcgcttgattttgaatgcaattttcgtgtatgccgtctaaactaagtcatgtagaccaaaagtaatgggaacaagctggctagtttagccaaaaatttatttatgtgctcgtcataatttaattatttgggttaagttgttaactagcgtgtttaccattcattggattttaaattttaatgtcaacttgcctaattcatattgtataaaatcctggtttgttgaatgttaacattgattagggcacattgttaatttcgtcaagttcaaataaagtcactgttcaccaatattgtggggcatattgttattaaggtcaaaagcgataatatattgggtcttgtgtatgggttcacataatgagtttagtctcaatatctcgtacggtaatatttgcagattattacactaaggtctgtttggtggtagaataaattatttactttttttaattagtaaattatagttattagtatttcctattatttaggggtggttcatatcaaatcgattcaaaataaaaataaaaaattgaaccaaattgattctttttgaatttgattgaatagttttttcctcaggctaatcaatttgatttggattgttatttatatttttttaaatcaaatcaaatcgcaacaatttaattattatttatattactatttgttatgtatatcattttcttttttagatgatctttgtttgatttaaaatggatgaaaatttgatagatttttattatagaagattttatatattaataagtttcataaatttttatcagtaattttttaatgtagtttaatttaaaagatgaaaataacgtatataaattttaatgaaataatattttagtaaaaaatcaaattgaaccaaattgtaaaatattggtttggtttaatttgaattttattttaaatgaaaactaaatcaaaattataattttggtttgggtgactttttttatgaacaatccatccatacggaccgaggacacccctattattatctatcctattggtgtgttagtataatgctgaggggagctgaattaggaaataagattggataattttttgggataattatgctatttaatatgaagtatctattaggattagtctatgtaaagagacataattgatcacttttaaaaagtggagtttacgttttttattttatacagaatatttaattttttaataacttaaaaaaatgcgctagagtaaagattctttacattatcatttaattgaatattgtaatgtattgaaagttattgactttcataataattatttttaacaagattatactgaaataatttttcatgacagtataaatttttattatttaaaatatttttgagacttataaatgttataaataaagtttgtttgacattataattaatttgatttgaaatcaatactttaataaacttctttattggtggaataataaaacttgttaatttagttattttataattttgtaactgaaaatttttaattgatagaaataattttttatatctccttaaaatatattattttaatataatacacattttcatagaaaaaatattaattgcatttaaaataattatttttcataaaattacttttataaaaaaaattaaaatataattgtaaatttatgtaaatgtttgtatgagatattaataaataaaatattattctaatatactccatatgttagaagaagaaaacctaacatcaaaagtctattccacgtagcaattaatattttacaaatgctgtagtctattattctaatatacttttaatgttagaaaaaataaaatctatcaccaaaagttcatcccatgatcccacaaaacaatagttactaaatgacaaagcttatccagtacgcgttaaatagtgcaggagttactcctatctgtctttaatagctggatggtgggaataattacatggaggagtagatatagatagataatagtaaatatattcatatagtaaaatagataagtattagatattagatagacaacataatagaaatttactatagatataaaaactaacgagtaagtgaccgacgataagcataacataaggcagttcgaaatgtacaatctaaaacaaattaaaacatacttttgaagtctatttggatataaaattagaaatatttttaatagtttttctattgaaatttttttatatttttaagtagaaaagctctgtacttagtaacttttatccaaacaaaatcttaataatgaaccactacttttttaataatctatcagatatatagtctagcatgtggaaaagaagtccatacaaattaagataattattaattaataaagacaacatgaagagggtcgaaatattctagacaacataacaacatgttgcagacgcaaatcaattaattctatatatgctgcaacctgcaaactaattaaaatccatccatccatcactagcaaaacaactaccacggctactttcatttaaagtggtgcctatctgttactgcatgagtcattaattgaacgcacccatcacgaataaatgttgacagaaccaattggaatcacgacgaggagaatggcccaaacaacagctattaggtctgcaacgagaacaggtctaagcatgtttccattagagcccttgtggatgtcgtctgagactggtggtgttgttcccactgttgaagctgaattggttttcaacgaagcatttctgaagatagcagcgtcaggggagtttggagatagacccagaagctctgccatcaaatcaaatgtgtcccattttcattatttgaagataaaaacttaatcataagttcttttattttaacaataaaaaaattacaacataatgtttggaaaaattaaattttatattttttagaaaagtagacatgtgtattttctttctggtgaatgtacaattgatttctaaatttatttataatatttcttccggttagtcaatcacattaatgtaaaaatagtaattaataatatttttaggattttttaatatttgtttttaagtcaaactcaaacttcatcttttaagtgtcttttttcgtttgaaggtcagagtcggagatcaattactatatatgtaatctgaactaccgtgataatggtttctatcgatttctattgatatgcaattaagtttttcaatttataaaaataacaaaattcaaatacataatatcagctggtgaaataggttaattgatgaaatcatggttacttggatcatacaataaattctccaataaagttggacatgtgctaattattaagtgactcggttctttttatgatcagtaatttagatttggagtgtgagctagtatttggcaagtgaatgaagtactcattaataaggatatggttagttaaaaaaaatttaaaaaatatttattgtaaaaattataagactgtaaaaacaattatgaataaaaataaaaaacattttctttttaagttttttaaccaatattctaaggttagtgattaacatttttggattaataaagatatattattagctggtaattattaaagttaaagaggagtagtgagttatggtgggatgaacatactaggacagttggtggtgctggcattcttcaagttacaagcagaaggcagctgaagcagcctaccctcttgtatgcccatgtttttcacctgcggactacccttgtgagtctgttggatcgcgaagcacaggcactccgggtcgctcttctttatctccgacgtcgcctcgcagcagtccttggtcggaaccgccgcctgccccgtcgcgaagtttaggcacggcagcactttctgaaccagcaggttgcacttcgccgccaaatccgctccctccgactccccgacagccaacagaaagaggcacagccacactgagcctactactactctcattttctgctgcttcaacttcattggttagtttagttttgcttccttgggtttgagtgtttattatgatcgatctcaagtactgtagtactacgtctctctctataatgaatgctggcacagttgtcgttctgtgaagtgggaaaggtgggtggtcttctcctctccatttaatgttcaggatcatttatttgtaaaagctactatacttctacatggtaatggtagtttacctaaatggatatttgagtttatatactagtagcttcttaaatatactacgcataatagaacgttggacactttaaatgtttgaactatatactatcagtgaagatattacttaggttaggcccggccctgctggctgctgccctagtttggagcccactagaaaaagggccgaacatttaaaagtttatactgtatataattatgtaatattcattacttaatatattttatatcatgtattagaaaattgccctattgtttttttttttttttctgatgccttactttataaattcacagtagctatacatgtgaattttcagctaattgtaagttgtaacgtatcaacacgtaatgaacgcagaattatagacttgcatggttactcttttaacaagataagaactacaaactgaaacttaaattataaaggaattaactaaaactaagttggtattgtatttataataaaacacacacatatataaaacgtatcacataagaatagtaaaatgagaatgattaatctcaattattagattaaagtaaaagattaagattaaaatattttaaattctaattaaaatttcatttaatcattaattctttataagatttatcaaatagaaaatcaaatatttaaagatttaatctatgacatcctaaaatatctcaaatcgattatcaccatgacaaccaccaccgtcataacaatttccaccataactgtcatgatcgtcaccacaattaccatcaccgtcatgatcattttcaccataactataatggttgccaccgcaaccaccaccatgatcgttaactatcgtcaccacggtggtgaaagtcatgttgatgatgatgacggtggttatgataacgatcataatggaagccatgatgacaatgatgatagtttatcatatatattaaattattcttttaaaattaatatattaagtttatccaacatctagaaaattcataataatttatcatatataacaaaaattaaaattaaataaccattacaataaatattctgaattgaaagcttgtatagaaatacgagaatttctgactcattttaaacctgggataatttccatttttgaagacattaatgtcatattttaattgtatttattacttgtttaaatatattaattaatgtttgattaagttagttaagttttttttggtgaaggttaattcacgttacatattatgtcaattttgttacaccagaaatagtctgacaaattttaaccattaaaacggctctcttaacttccagcttcttttttcccacaccaatgagtctattttctacatctctttctgggtttctttaagctttttgcttgccaattctaatttcccaattttgtagtctagaagatcctgtaaaatcttggatgatttacgcgtaacatggatatatctttaagagcaatgtgaccatcaacatctcaagttggtgctcattttaacatgttgttgcctttagtctctgaaacttgtgtcacgtattttttagtaaatttaacaaagacatattaggggttcaattaatgtgataaatgacattttttttattgagtattcagtgtaataagtggaatataaattcatagatgattagtatttttattaaattcaggaattaaaatgaaaataaataccaaattcgagggttagacatggattttttttaaaactacaattattcgatttcttttcctcagaaaaatcaaatcacaaccaattggaattggagctgatgcgagacacatctacattatttttggtcaagcaatggcccggccagcacatgcatctaaatatatcatggatagacattaaggatgaataggtaaaataataccaatattctaccggatataataataccaacacaagtaatatctaaatgaatgatgattgatgaacatgcattagagattaattaataggcacaataataatattctacgggatataatagtaccaacataagtaatatctaagagcatgatcacacaatcacaaacataattatttaattggatataagtttatttaatagttaaacatagagatacaaatgattactaacaacaatcaacatataataacagtttatgtcttttaatcaaatggtttaaaattagatatacgataaaaatttggacatccagcaaacaatctcaaattctcaatcacgtggctattaatccaatgattaagatttttataatgtttacctatgacattttattgcaaaagcaaaattagttcgccaaattttatttatatgttgtgtctttgtacctaaagaagtgcaacgcacatgacaaaaaaatttaatgacaaaatttcataataaaaataccttaaactaataaatttttaaaataatatgcaaaattatagtactctaatagtaaaaattagtgtattaatagtatccactatcaaacgagtgatcaaggtgatgtatgcaaagtcattcttgtgggctctttccgcgagttctgtccttgttttgaaaacacgggccgaacaatagatacgatcataacgagaagtcgtaaaaggctgttatctggactctgtaatggcataatggactaatggccttccaggaacttgttattatcctcacacttcgtaatttttatatttatattaattatgaattaattgtttcatgcgctggatgataaataattattttatagatataatatgtattttgctctaaatttaaaataaaaaaccaaattaaatttgtactgaaggactaaggagatgtacactttgcacatcttacgtctgcacctaaaataattaactaaattatttaatacataaggtgaatttggcatacactaccttaaaattatttaatattttattttccacacatatcttattttacaaggtaatcatgctaaaaacataatcaaatattaaatattttttatcttaatcctctaattcaataaagaaaaaatattttgtctaatccgaatttgattaaaaaataaataaaatatagtaaaaatttatttttaacaaaaattaaatacaaatgatttaacctaactttagtatattaatcatttatgtttaattaattgattatcaaacattaatatatatatatatataaacatgaattcaaatcttagttgatgaagtaagaaattagttccttttccaattttcatcggctatcaattaacacgaaattaacttaaattgctacgagaataaagaagaaaagtttgtgttaataacaatttaagaagcactaacttgaaaactttgcactaaaaatgtaacatttattagcattctatcgattaatttctgttagagtataactgttacgacatagtttccaacattggagttaatttttattcattaatggaataaaattttatattatcaactaattaaaaattattttaaaatataatttataaaaaaaatgttacaaaaataaccatcttactagttataacaattttatgcttttacaaagaatctaattattgtgagtttacgttaataagagaatgtattacattaataatataatataaaaattatactgattgaatactaataaaactattaattattctgattatctaaccacaaatttgtaccgtcggaataaaaagccaccgatcgtgaatacgtcctattcgaagtgaagggaatgtcgtaaagatttatcacaaatttaattcattcttatcctcaagtctgaggcaaaatcattatcaccactctgataatccaaagtggacaaaaagctagatccacagccacatattacaccgaaggatcctattcaactagcatctcttctctactgtgccattccacaaatccgaatcaattgatgaaaattgataaccacgtttttgggtgtaaaacgagaaaaaagaaaaaaaggtaaagatgaagtagaatataaatatgattgttgtcaattgttagcatccctctgacttcttcttacgaacttagcaacacaaattattgcttcacttttactcaaacgactaggaaaaaactactgtcttttttctattttatttattcataatttttttctaccaattttaattatatacttaaaatgaatgattaatatttaatagcctatttgaatttattacttagctgagttggtaatgtctttcataagctaacgaagtaatatttattacttttatccctcttcaatattccccacatatcaagggggttatcatgtgtatatgttggtatgaaattttgaacagtacaagtgagttattctccgatggaatttaatgacttttctaagtcaactatctaaaggaaaaagaaattaatctcttatttacatttgggaaatgatggttagtaactagtatttataattaatttccctcaaagcaattttagtacaatcattcttaagattgcttattttttaaaataataatattgaaagcctttttaatatgttttaactaaatattagttagttgttctatttctcgtggtccctattccttcaagtaaattatatataatgcatgaaattctatttcttaacagatttatacgtaaataacgtctttacagctgcttatctgaaatgaaagaagaaaaaaaaaagtaaatttgataacaaatccagcattcgcataaactagatttgaactgtcatccacaaattgcttcaagatgttaagcaccgaccagcggggatctagtttggtggaaacaaatccttttaaggaagcaaatggtggttagcaatgatagacatctattgcaatcagtaagtgtttgaggtctaccatatgctatatcattaatggacaggatttagctagcattccttataaagtgaccatgattttgacttctctctgttgccttgtgatgatactttttcatgcaagcatgtggaagcaattattgttgctattatagtcgaaaagaaattatgttagatttgtggcctcaaaacaacatcctaattatgtctcttttagaagtataatgttgagcagtctcgcagaattatttcgtatatatgcatgtctaagaatatgatgtaaacacactgtctaattactttgcagcacaaaaatgttttttttataacagatttacattgataacaatatttttttaaacattgagataaacattttctattggttgttatataataactgatttcgaaaacacttaaattttagattgattgtattaaaaatttgacatagaaagtacattgatctagaatgtggacactctttacaactttcgaattttttggcaagaatttataatatggtggtatagtaaaccaattttggaaaaaacttttcacatccattcttcgtataaccaatttagattgttgatattttttttcatatttttcattttttacaaaactttttaagtcgattgtgctaagaactaatttagatttttttttctttttaaattgattattagtccagccaatccacaaaatccaatataagttttatgatttcagtaacaaattcctattttcactccaattttttaaccctcttctctagtacgtaagacgaatccaagtttctttggcaaaagtattttcaaacttacattgaagatctacgccccaacaacattgatcatcttcttatatatgattatgattccttcattggctgatacaagtattgtagggtgggatgaaaggatagtaatgtttatagatttgaacaggtgatgttgtgggttctttgatgcaagggttggggtactccttgtaccctctatccatttgtctaataaaattattatttgctgataaaaaaaatataagtatgactccaatacttgttttttttttttatatacatttctccattttcatttttctgaatgtttactgttcttgggtgaatttgtattttaaaacctgacctcattcattaggtgttattatatatgcaactttatgagataatcttctctctctctgattctataattataacttcactttcaaattatagcctttctctttgtttcaaaccctgaccttgttatatgtttctctcttttaaatttaattttaatttaagagagaagtatgattttttatttttatttttttccttctataactaattaagtgctttttgagaaatttaagaaaactaatccatagcgtatttatgataataaattccttgaaatgggggtccaatatatttaaatttttaaacacgttttttttttctcttttaaaaatcccatttaaattgagttcgtacatttatggcttgcatttcaactccattcttgcattgcatggtccttttgtttcttgtcttggttgcggagtcaacaagtaaagacgtgctgggtaatgggcatgattgacttgtgtgggagaaagaaaaatactctctcggtgactagtgtgttcatgttctgaagtactaaattatgcaacatttggttgatatcatgtacaatggttttgccaaacctctaaaaagctaagattattttgtcggcttcctggtaagttggccccctaaagtttatcattctgttttttcagttcatattctaagcctttattacacggtcacatgctgctatgggcaattttgcttccaaagattagtataagatttctagcttttattaaaacatgatcatgaacgcaattcctatgccactaatgaacaagtttaaagtttgtgagtgcaatgcaagaatgtcaaaatttggttagattttcaatttgctcttcaatttgtggccacaaacacacatttgctatgatgatggccccaaatatacctaaactgtcagagaccctattggggattgtctttggatgtgggtgcaattcttgacagcccctgtttagagagcattcttttttattttctaattttcattctgatcaggtgagaatgaattttcttggaccacagcttaaagtgaatatccggccaagttatacataacccttcttttcttgactcatcaattttctttttaaaaagtctcaaactagcattcccaaacaataatttattaatttttcatgcttcaaaataattggtattcttaaaatttagttttttaaaattattttgacaaaaaataataataatatacacttcatgtacattcacacacacaaaaaaaatccttccgattcttttgagttttgatggtacggtcgccaatttgacccggctcggcccattcaagacattcctaatgcgaaacatacttttagttttaggttgggtcaatttaaattaatttaattgtgcgggttagcatttttttatagctaaatctacttttctttttttacagattttgaaccaaaggttctactttatggacttatattttttaaccaaatgttacatggctataatttaatttatatatatataaataaataaataaatagagaatatcaagtgaatttttttttttcattgtcagagagattgaatccaaatgaaattttgtaaatataaatatgaaaaagcaacgtttaattcaacaataactttttaaaaatcaaattacactcatataacttatactcacaatcatatcagtcaattatatggatagtttcatttcaaaacctattgttggattaatttatttattttacatatggatcatatctacaaaaataaccatactaattgtatataaaaaaaacatactaattaaaaaatatgtagttcaattttcattgttctaatacttgagttataatttatattatctttagtgttcttttaagtattgtcaaaattaatatataatcaaatggtttttttcgtatttttcaagtatgtatttaattaattttgatgtttataagttatgtattaaataacttaaattaatatgatttaattataatctatataataagaatttcaacccagtgataaattttggtaaatgcaaattatccaataaaaagttgtttaaaaatgtgagaatttccttaaaaaaaaaacaacaacgtgagaatgtgtgtaacagaccccttttcttttcatgatatttctcttgtgaaagtaatatttaatttttttatttattgttctattaattagaatttcctcactgctatcaattttatttatttctcatgatatattttcatttttaacttaattaatatactatcatttttatgataaaataatcttagctcgtgtattttttgtttcaaatgtgacaaatattaatagttactgtaatgtaatattttacacttttatggcatcttactaatttattagaaggaacaaagcaggtaacttttatgtgtgagagactgaaaggtcatagtttacgaataaatttttaaaggaatgccaagcaaagactggggaaaatatcccatctatgatggtacccaaccccatagaaaagctaaggccaacatgaatttattaaagaaagatgagaacaaaatatcatgggaggactaggtcaagacccatgctagagaaatttcaatctatactgagggagtccttgcagatcgtagacaaaaaaatagaaacaaaagaaagggacaccatcccaccaaaaagattgatggatagaaaccgtgaagttagcagtgtaatcttgtaaacgggacaaatattttcttctctagaaatgtgaaaagctttgaaaggaattaaaaaaaatatatttattgtgaagatcataaaaaaaaaacgtaaaaaatattatgaataatataattttatattttttaatattttttttatttttttaactaatgatctaagaatgttggttagcatttatcataaaagaagattattcaacatttcgttcagatttgttttgatacaaaatttaatatttctttcatttcaaaataaatattatcctaagttgttttatattccttcgtctcattataattggtattctagattatttcgcataaacacaaaaaatcactaaatagatgaaagaaaatgacaatttttaaaaaaatattcataccatcattaactatttttgtttttgtaatccatataattaatatcataacagataagtcaaaaaagtaattaatgttgcatttaaaaattaatataaaattattttgagacaattttgtctttttagataacattttttatgggaccaagagactaatagatagataaaagtgaataataattttacacattaaactaatcttaatattaatattatattaaaaaattaaagtaacatttattaaaagtattagttggaagaaaacaactgacattatattaaaaaattaaataaaacacatattttagggaaaaagtatataactgaacacaagtccaatacaatttcccgtcaattagttactgttgaaaaacagtgacgctacccgaaaatgcagaagtctcgtctctttggtaaagatccatacatatataatcaggataaggtaccgaccaagcatcataattttgtttgtatgaacctaaatgatcgctaacaaaacctaatcttcctaattctatgaaatgggtgtacagccatgttcattagtcttcgatggccatatatgacatatctgtcttcctttctaatcactaaccagcagcaactgcactcaccattaagaatttaatttggttaattacagccacatcctggttcgttgtaattatcaattattactttatctcatacactgccaaatcattttgtggcgtaatcagatagaaagtaagtctcaacggtgacgtatagcttgttatacatttgtcgagatgcatgcatacacagtgtaagttacaacatttgaagccgaaactcaacaatacatgaaacatgttcgtcatttttaaattatgataatgatgcgatgaaaatgaaaaggcctcgataatctgtcttcggtttgtggttggctgttatttattttttctttttcttgtttaggtaggaaagtgtgctacatccttctagtattggttgtcatgctttcttgttattttatgtactgacgtgggttagcatgctgccttgaaaaataatgtataacgaaaacaaaagcaggtacaaatattgtgatcacttctagaaggctataaccggttacatctaaggctaatttgaggttaccatattttaattgagacctaatcacagtgtcaacaaaacattttctttaaatgaagaaaaaacctatatataaactcattattcggtaaaaaaaataagaaaaaagacatcattgtataagttaccaagcattcattttgctacagcggaaattttaaaatttatgtcaacaaattaatttaatttttcaatcacaaatatctaacatatattttaatttttggataagccaattaaaatattttgtagtatcttagttgttatagtataaattaaatttacaaaattaagaatatttatagccaaaaattatatctcaaattgaaatttgtactaatcattttttatatgagtatgtatgtaatttcatagttacatatatgttacataagaaattaagtaaagtaaaaataaaaattaatattttaatttactttgacttgttaacaaattcttttcataacatgaaaaaatggtataatctttttcatttttatttaataaattctattatgatcttttgctcaattttatttatataattagtatttaataatatattgaaagttgaaacaatgatattttattaattttaataaattaattttttttttatatcactaattgttcttatggtatttttagtaaaggctttttctttgaattctataatattttattattttatatgcataatatatatttatatatatattattcgtttcattctctaataatgaaaatattaaaatggttattcagggttattttttgttataccgaattgctcctattttttttttacagattatttgatttctttattattttaaaaatgatactaattaatcacacacatttatctttagagaagtaaagtagtgtgttattatacttaacgtacgtaaacaactaatcgacttaacttagtaagaaatttaaacctaatcgcctcttgacagaagtacttcatcttaattcaattaaagatgaagttaacccttccaaatttattttttaaaaaaagaaaggtaaaccataacttacctgtaaatgtgaagcccaaaaaatcatgttaaaccctttgttcttaaaaaacccagctgttaacacttgcatgataagataattgcggtgaggttaacttcacttaccattcacgtaaagggtgtcccaagaattgccagcactaagcaattcaagttacagcacatcgcattggtttctcaaatttgaactgccaaagctttttgcttatacttgtggaaataattagttgacgcctccgaatcaacatcctagtaagcaaaattcaaattgaaatacttttaactttacccttcattattatccaactttcagattttcttcctttactaagttttgtcgacaccgaaattattctctgttgactatgaatcatgacagttaaaaagagaagcattagtgggtgtaggtatagccataagccaattttgcacatttgacttttgaccatctattgctcatggtaggcctttttttgttatttataattattattattctcattttagtagtattttattagtatcatacaataatagtggtagcaataaaaggaaaatgtttttgagtgaactgacataatataataattaattcttggaagtgaaaataacagagaatgttagatggcttcaaaattactcaaaacactgggccagaagtccagcacgtgtagggctcagtgggatatgtgctcgatatacgaggaatgaaagggacccaaagcagaagctaaaatgcgtttaagcaacataataactctaacattggttccctctccttaatcccatttttggttcgttacgctaaaatctcactaatcccaattacttgttagtatagtttattggtaagtaagagcatattcagaaacgagaatgacgcaaatttacgctacttgttgctgccatcacgttttaattcaaccattattttttctcttaaatactacaatattagttaattatattattcaattaggaactagtagcttattctcacagttttttttattgctttgtctcctttagttgtaatatttgctttgacttgcaaaaataagcattaataagtatagtactggcaaatattaagggatgaaagtgtgacgcagggaactcctcggataacttagttaattaaaactgacgttaaagcttaaaagaaatatgaataatagaaaacgtgaataatcagataaatattagttagaacatgtagaaagaagatagggatggcaacaagaattaggagtaggaagacctcttttttttttttcgaatgaaattggacttctaatagcaggatggcgtgccaccaaccatgcattaaagtataaatttaaagtcataataaataaaaaggaaaactaaccaatatattacaaagtgtatttatagtgccatgccaatagcgggatctttggtaagggttagtcacagactatgcgttatgaaacattttctgcgtattttcgaacttagtttgctcaacgagtacaattaattaataaaaggacccgttattcctgtataatgcttgaaactttagcctttgttttcatcgctaaaactagcatcgcctaatcgaatccgactttgttggtcgtcaattttgttattttctaataactgaaattgtttttaagtacccgtttgccaccttattaaataacttggtaattaaaactcaataataagcctatagtaacatgcattttttttttgtcaaggaacaacttatttagagcctagaaaccctttggaaagcttacacaagcttgatcccacctaaaatagcttatttagcaataatgtatacacaccttacataaatagtgatacaatgtatatacataaatagtgatgcctaatgactatgtgtgtggtcatgtattttttttacttgtttaattttctattcttttcctttacctactttgaaataggtagtgagcttgagatacacatgtgatatatattccccaccattcacaatacactggactgtgtggggatgagatttgaattgcaatgattgtgttccacccactcgccatcttaaccttatctattttctttcgcaaatttttccagatccgttaaaataaatctatggggaatggtgctattagctcgcttcaattgcaaaattgtacaattgaaaccccaggttaatatgcttctacgtggcttaaaagaattggctcaagtagtcaaatagtactatcgtttttgtccctttaaaacaaaagcgtaaaagttgtgggaacataatgactagggtcgcatttggttaagagccagcaggttccaactttccaagttcactaagagacctttttttttgtgttttgtttttttattttctcttttttttagggcgcttccttcgtttgtctgcgtgtgtttgtagttaaatttggccaagttcacttaccatgcacgtaaagttgaaggaaagcatggaatggtagtttgtcctaggactgggaggcataaagcaacttcttgcttacacggccaaagtcgtgagaattgatcaactcaattcaattggcaagaaattgaagaaaaccacatgttctatagtttatttatccaagctatggattcagattcgccaattgataacatgatatctgtctgattcgccccatcaagttactctaagttgggcacaaaattaataatgaatgggtaaaaaaatctcttaccacttcactgccaataactttttttttttttttcagtatagagtaaagtggacgaatcaacaattaatatgatgagattgctagtatttgcttgccgctaaatgccaatatgtagaatctgaggatttaggtaggtggcgtcagtagtatacatcctcgcaacttttcaaaccaagaaaccacggtcacgtgcttgttgtacggtgtagtaataaatttgcccttttgaccgcttctcttacctagagtgaacaagaaaattgtaactaacaaatacttcggaatttttttttatcgtttaatcatccatcccataaattcaaaatatatatatatctaaataagaaaatactagtttttttttaacaaaagtaagaaaatactacttaatattatgttataattaatttaaaaaaatgatagataaggataaatatttttcttttctacaacaagtgagagagtacatattaattgcactacgcctccgctttctttctggagaaaatgttagaaaaggggaaaagggtagggccgaagataatttgagaaaaaaataaaggctaaattataccttcgatttattatgttttagtgttattttatttagtacatataatttaagaaatttattttaatcatttatatttttaaaagtttcatattattcaatgttaaaaatcttaagttttttaacactgtcaagacccgatgtttcaaatttatgtcggtgataaattacagtgtgactataaaatgtcatgataatattatttagtggatggaggttacaaatttaagtgttaacaagacactaatatttgttaaaagaaaaaaatttgaaacttttttgaaaaattaaaagatcaaaatataattttttaaaaatataaataatcaaaataaaccattttaaaacataaaggtttaaaataaaaactttcaaaacatacaaaatcgaaatgaaacttaaaacataaaaaactaaataaaatttttaaaatttaatgtattaaaataaaataacactaaatatgatgaaacaaaaataacatttaaccaaaaataaaaaggtaaaaagtatgacctaaataattaatttgactcatcttagtaataattaggtcattcacaactcgatttcagtttaataaaaattttacacttgggtttaacttataatctcaaattgcatgagttactagtcaaaattacttaaatcttggacagttttaaattaaacatttttcgaaaaatcaaaatatgaactagaaattaaacagaatgcagttcaagtttagttcatatccttattcagtagggaaacagggaaagatgagattcttaattaaacttaatacagttcaagtttagttcatatcatcattcagtagggaaactgggaaagatgggattcttaattattgctctctttttcctaaataataatgtgagaagagaaaggtgtgcaacacgaaagactatctgtaggtaggctgcataatatacatacgtacgtgtacgttatacatatatggttataataaattgtcggttgtacattttttatacatatattgtcggtgtgactcgtttttcagctgagagcaaattaatctacaagggctaaagtgcagtagttcctgattaaaaaagttacattacaatgaagagtctttggctgcatgcagcatgggaaccgacaactctgccgtccttcgcgttgacctcaatctgactattgtagctgtatattactattagtaagtatacgttgttcataataataaaataataaccatgattttaaattgtgatcacaattatagttatagttgtgttattgtgagtcgaaaaaaaattatattataaatatacaattaatatgacgacaattacaattatgatgagtcaaaatatatatatatatatatatatatatatatatattaaaattgtaaccttaacgacaaattgtaattgcgaaacgttatttaaaatcataacaataattatattaatattttgatttcattactttacaacttaatatttgaataaaataaataagttggtttattatttaggtggcttaccacaatctgaaccaaccaggtaggctcaaaggaaaggatatatatagttacaagtttgaattgaagttgaagtggttttatagtaaatgatatgatatgacactcgtacataacacatgtgcatgtaacactagttaaacaagcaatatgtagcttagaccatactcaactcaactcaaccgtcgtttttgctttggtttagtttagatggtgtatcacgtgcacatgctctcacacaccagtcaccaaagggatccttacgaacaagtggtagtatttggcaaatgcgttaagcaacatcctctgcatttgtctccaaattcctctcacttatttcagtgatgagatatagatatatatggaggcatgcaccgtgcagtggtttataaatgaagtgatctttgttgcttcacttgttagtttaatccttttttaaataatttattagtaccgaatcgatcaatctctgcatcgtacggattgagtaatgagattgacatatttgtacgtcaacccatgatccccatcacacagactctaaaaatatctcaacctccttccaactcgcaaatcgcaattctcattacccgcattcgtggacgcgatcatagcacaaattaaccttttctctttggtacgttaactttatgtttaactttggccaaacgttgcatgtgcttggggatttatatactaattaaattatgactaatactatttctacataaatttctcacagttatttttaaaataaaataaaataaaataagtaacatttttttaaaatttgaatcacatgtattctttattaaagataattttatttaagttaaataagattatagtggacgataaaaattttctctgattaatatgaaaacaataaaaaatactattcttaaattggcgcacagtgattcaaaacaccaattgagtttgaagttggtgcatgcatggtgtgcgctacttcttccatgactggcaattataggggcacgtagtcaacctaactgattagaaaagctactgtgggatgaatgggtcattgacatggaaatgcaacacatctttttatattattttttcttttgccccagaaaatatggcccgcttttaggtgtcaaaatccagtgccattgtccgtgatttccctttcgatgcctgatagaggttcattatataaccacatataattcgtgcagatgaacccctatttaatggctattttggtggtggcaatggcaatcgttgtcaaaatttaatcataggtcatattcattcaactaagttaagaaaaaagataagaaagattgagtcaacaaaaattttaaaatctaggagatcgacagttagggataattatgttagtaaatatactagatatatatgatgtatgaattatttatagaagtttttacatatacttgattttttaatcgtttatctctttcaatttaatctttttattttattattattattattattattattattattattacacttgtatgttagtcacgtttttatttgatttgacatatgattagctaacatgggttgatatgagtagttatgatgaatttcgtgtgaactttcacattcccgtctagaggtattaggaaggagtgtctccaatatttttaacttcagttgaaccatagagtagagtctgcttccattataatttaggatttcatcgatatatagcattggtaagcaaagttttttacacagactagtacaagaattgtttttatttatttatttaagatgtaaaatatgtgaagccctgtgtgacaattttaaaaagaaatgtaaggacatacttctagagtatatataatgctgtacgatccactttcttgaaataaactatgacaaattgtgagtatgcatgaaaaaatggacaatatgatttgattacatcaattttttggggagtgaaaattgtgaaaaaaactattcatttttgtgactcttgatatattccctctaaattcgtatataaataaaaataattttatatcaataaaaaaattagttaatattatttaattttttaattttaaataaaaataaattatttctaaaatatttttattaaaatttattatcatgaataaaaatgagtcatttttaaaatataattaaaactaaataaagtgtgttttaagaataataatattaaatatgaaaaattaattaaatttatttataaatccaatatttatgatcacttttttatttttttatatatgagtgcagggagtaatatatatcacattttagacctttgactatgtataagagaagtgatctaaaccaaaacacaatttctattcattaatgattttttttttaaataaaatggtacagttaaaaacttttggatctggtaccaacacgtatacatggtttagacattaatattgcattatgaaatacaatgaacaacgcatatttgatatttgcatcatctttattaaatgaatgctaataccatctacacaagcatctagaaatcataagtataccaactctccctattaattgcgatacatgaagcaagagacagaataattggtctcaagcaagaaggcaaaattatcaaccattgacgaaacaaaactctgctttcccccaagtgtaatttcctagagcaggtagatttcaaaaattgaatttattgggtaaagaagaattgaaaatttcaaaaaattattttattttgaaatagagaaaaaagtattattttttaaataatatgctgatcttcatcattcttttataattcattttatatgtttgagatcttttcacaaaaatcagacattaaactaaaaatcattgctaaagatgtatactaaaaatgttttttaagaaattaaagaaaattaatgtacgacaggtatacacaaaaacacacaagaagcaataaatagtgtgtagtagtattgtttgatacgtttttccttcatttggtttcaagaaaaaatgaagggggaagggtgagggggagcaagcagagggtgggcgttgcgacacttagcatgtactcagtcgtcttcaaaaatcgtcttgcgtggcatgtgagactagtgacagcaccgtaaggatgtgcctgaaaatgcatccgcgtgccatatttcgacaagagccgtgcatcaatgagagggaacaacttacctgtccagaaacctcccaccaaaaaaaggggccccacttaacatctctccctttacaacttcagagattctgtccaaaattaggagaaagtaagaaagttgtgcaattttgcaataacattccccctactcttggacattacttagataagattgcagccttaacctacctttttaatagcttcactcctaataaacaagccaccacttaggcaggcctgtgtttaggaactttaggaccttagccaatttttttaagaaacttaatattacatattatataaattatttttcaaactaatttttttattttttttaccaattaaactcattttaaatgtttttttatgaatagtaagacatttgtcaaaagtattatatgttgagattgaatttattttttaacttattttttattttttgagttttgaaaaccaagttcccgctttttatttgattttttctattactataaagtataagaataaaagaaagaagtatcacataatataaataaaaatatttttttaaatctgatatggtattaaaaaaatatgaaaaagaaatagagaaacaatgaaaatgttgaataaatgttatttttaattaaatgaattgataagtcatgcatcaatatctctggttcttaatgttgtcaaaaaaatttatctctaacattaacaattatgttcctaattaatagtataatttcttataataagctacaaattcaattttcaattatatatatgattttggtatttagttttttcactcctaattgttaattaagacaaataactaactattggataatttttcaatcatagaacatctttgtccgttgcaatttgaacaataggaacagattcatataaaacttacataataacaattaaaataaaattaagaagcctaaggcaatagtcttaattgcctttcactatccacggccttgcgcttagataatttatcagtcaacatattgatttctgttacaaaattctatttgtgacaaaagttattttgttaatacatcaagatcgttatttttgtatttttttttatcttgataaatttgtattgaaatgtgtattatattatttttaactgtaaatcaaacatacacgtaataatgtatttggtcaaacggtaattagttctaaatcacaaaacgattaaaatctatacactttttttttttcttgaatcaatcaatttacatggttttaaaccgagtatggggtatttgtggaatgagttagaagggttttatgacttttatctttttctttacctagtttgaaaatgtgatagggtcaattttttaaacttgaatttcatcgtatgttttaattaaaatttataaacttaattgagtttataaaaatatctcaaatcttctttcttctaattatattaaatttgtaaattaagatttaatcttaaatatattttatagaataatcaaacatctctttaaactaattttactgtcaaaatacttttagaatcctcccactgaaaatccaaaacatcctaagatatatatatatatatatatatatatatatggaataggactaagtaaattcaagttaatgacataatatagtaatgttaatattatatgtagttaaatcctagaattaaagaagtatataattaaaataaaggtatattttataatttattaaaagttgtattattaatgtataactatttttataggaatttttttttgtctcaaatcattaatgtgctgaattatggatgaactaatgaaccgatgaacctatcatgggatgtcgtggagtcttcgattttgcctctagcattttttatattaacttgtgacacaatccaataatggatgacttcatgggctgcagtactgtgatcaattatttcttctagcaaagctttttgccaattcctgaaagtgaaagctggatagatttatcaggaaactgtgtactgttaaatccacatatgatgtagtacaaaccattagtgaagtggtcgacaaatctctgttcaaaagattttgaaaaaaaaaaaatatccgttaaaagtttcagcttgtgctcggagaatatttattgataaaagaaaagaggaatatttgatataaactatgatatgattgcaaatgtgctttctgcaacagtaatgaggagaccagtggccaacttttttttggcttgcagtattttgtatgcagtatggtgcttctgtttctcgtggttgaggagaaattcttagttacatttagagtaagaaattttttttttatttatttattgttcgtcatgtcagtattatgaattattattgttttttacattaatgataatttttaattttttagataaattaataataatttttattttttctaagtagattactgacataataaacaataaatagatcagagtaaaaaatatcttgcttaatgtgcacttaagaatttttcgtgacggattacatagaaattgttcagaggtgatgatgtcctagcctggacgtgtaaaacatttgttgaaacttatcaaaattaggtcttaaactgttgaacacgaatttagagtaagattcacagtttttcttatttatttattttagattgaaagtgaggggacattccatcagtatgaaatcattttaattaggtattaatattatatggttataaggattaatcgatattttttctttaaaaaaaaaaaaacttgtgacaatccatttattcgcaatcttttacttacacggttccctgttaagtagcttttttctttattcctcagttcaattgttgtttccagtagcagtgatgttaacagaagaaagcatggggacaattgacatatgtacacgtcacataaaagaaagaaaataggaaatagaggtaacctttcttcgtggcaggaaaaaacagaagagaataacgaggatgaaaaataataaaaagacaagatgcggataagatgcatatcttgtttatcacaaagagtagcagccagcatgtcagacctgaacacgcctctccactccacctttgctttcaaatgcatatttgtttttctagtactctattatttttttaaaagttttaatgtcagatttttatttatttattaaacgtcagatataatatctacactgcactgcatttttattttccccgttattatttttgttcacgtatgtgttagagattctaaagtcagaagcactaaaatccaaattttagaatacatttgaacttagggtgataaaaggagaccatttattacaatgatttcaataaattgaatatatattttattatgtacttacttttaaaatgtgggtaagcatgaatatcataagcacgaataccatactaatttgtgaaatataattagacttaaggtttaaaatctaatattagagactcaattatcttactatgatcgatacactattcttgatcgtcttaattagttaaacagtctacgattactcaaaacttagtctcaaagacctgaatatgtgttatgctcaatctgcctgcctaacttgttaaagcttaaatttctaactctaactaggcatgacaacgagacccaagttcgtgggtacccgtcaaaacccacgacaaaaattcggggacgggggcgggtttggtattgataatacccaccccgcccccgccataattaaattacaaatttacctttatatatataagaataaaatcctgaaaccctaatcctccccctcatttctcattctcgacgacgatgaaccttggccagcaactttttgaattaattccattttggaagctttgttgctgcaatggacctctactctttgttgtgttttattttaattttggaataatatatatttaaatgatattatattttgggagaaattaaatatgtaggtccataatggttttaattaaattgattgattttgtttaataatttttaaattatgatttcatattttgaatgtgggtttgttattaatttttttgttagctagtcaattttttttccgttttttttcaaaagaaaagtcacattattttttttttaattaatagtaggggtgggacgggggcggggaggggaaaacccgaccccaacgggaacgaggatgagtttggattttaaaacccaacgggaatgggggcgggtgcggtgtctaactctaacgtaggtattaatattatcaaaataaaaaatttaagcaagtattattataagtgcttaaacatgtatgtgtggatcgatatacatgtaggacagcacgccatgtgttccaaattggaaagatctcatctaatgggattcggggggtacgagcaatattgcaaatagtacgatatgggattgggttggcgtagatagatcgtagtaggctgataggttgtgcgataaatatttatagatagatagatagagtagtaggagttgctataatctcatacccacacgtccggtcccattcgctcactagccgatgagattggtgatctctgttatggactcaaagattgtcctcatctcctaatacatcatttctaactttttaagaaaattatatgagatatcaagtattttatttgattgacatgttgttgtgaaaattttaaattagaaaattatgaaaatatcataagcgattctcaattttattctgatgtatgtcatccttggacctaaagtcatgagaattcctacattaggagttgtgtgttttaatgtcatcaaatgttgtccatgataaggtgattatatagttggttattggatataaaacaaatagtgaattgggatgtgagtggtctatatgagatttgtccatccttcatacacgactaatatttgtgcgttctctttatactgtaagagaattatgcatgacatgccaaatgtgtagtcaatgagatattgatctcgtttatttgatgtttgcttttagtattaagaaatagataaactggactatacaatattacatgatctatgcctcgtattgaattatgatatttaaaataaaaaaaaagactaatttgaggtgcttaaatgggtcttgtacacatttgactcatttatactctttccaaatcaagtacttgataaacacctattctctccggtccaatacctttggttgggttcttatcctgacatttaattaataatttatttgtttagttataacaatcttatttataaaataatttaaaaatataattggaaatatgaaaaaaaatatcgcagcatagaatatttttattgataatacaaaatagacattaaattttataaaaatatttttagataatacaaaaatcaaattaattttttttaaattataaaaaaaattgcgtccaaaaaattgaaactaagaaaataataattaactttttgcttgaaatttaaccaataattgagtttgaattgatttggatgtattagatgaaaataaataagggagtaagttgatgatttgagatatgtgagtaggggtgaaaataggttaggccaggtcagactttgataggtctgagtctgactcgcatcattatcattaagcttaagcctgacttgttacatgttaaaaataagttattaaagtctgtatacaaagtctgattaaataaaaataaataattaaaaataaaaaataacataatatatatgtttttcttataagttatcaaatatgatcctataagttatagatatgtttttcttaatcatttatgagattttcaaggtgattttttaaagtgattggtcatctaccttcataataagaaaaaatattttttaaaaaataaatatattatttttaagtttatatatatatatattaaataggccagtctgatagacctaacagactttttttaaagcttgagcttgacctttttatttaaacagacttctccaaaagtcttagtctgacctttataataaacaagttaggtcaagtcaagctttaactagaccagaccaaaagtccctgagagacaacctgatccattttcacccttatacatgagtaaaaaaaatggatgagattgaactttgagtagaagagtaacttttagaagaatgaatgtgtaaaaaaaatatgtcacttatatttattacttatatttatatacatggtattggtgatatttaatatattagcggtaaaaaaataaatgaaaaataacgttcaaattcaaacggtaaaatacgtgctcctaaattgcaaaaatccaatttgccaacggttacacaggcagacaatttacttttcattttttaattaaaaacgtcacacatgccccactatgacataagtaggaatcggttctggtttgaaaaacacatataggatatgattctcatgcaatagaaatccaatttaagtaccgattattttctatcatatattgtgttggatatactttgcattgcagacggtcttacatacttacacaacaacatatgtcattaaaatgttaaatcacaaacgtttcataattgacataagttataataacttgtctatattaatcaaatggtatatgtctatttttattaaatgatatatgattcaaatctcaattttgcatacaaaataaattatattaaaaaattatcttgtgacaatgaatattatatattaatatcatgatgataaaaaaatatcacaaacatgttttttatttggataacagtgatatattacttgatattgctcattatttagtctttttactaaaaatatttttaaaaaatatatctattaacaaattatatagataatttttgtaataatatgtattaatcaaacaaaaaattaactcgaatgatttaattatgttaaaatttcaattactgattaaaataaaacctttcaaaattaatatagttgaatatatttcactatttattttgcacaaattttttgttaataattttaattttcatgaatattgaatgcaaaaagttaaatcaaccaaatcatcaattaaatcaaataattttattgattgactaaaattaattaattaattatcacaaaatatgttaaaattatcacatatgttgaaattttattaaacataagatttatttgtattaacaatttagatttgatataaattttaagcttttatccagtgttaacgtatcattatataatttatgtattatgttaataattcgagttaagattgacgtattatttttgagttgactctagtcttatttggaatattataaggttttaaatcaattaatttttttatacaaatacagacaaatctattccacaaataaactctactctcaattatctcaaatttcactctctttttttttatcaatatatttaatttccttattgaatattatttttaatctaccactctcaaataagacatatttttaatctaccacaaatagtcttatttttaatttcctatcttctatcttttactttcaattaaatcttacgattttaaaaaaatacaataatcaaaattatttttatacttacatttagaatacttattatttattataaatcaaatatataactcatgagtaggaatcaaattatacgatataatttaacaattattataacatttgtataacttaatataaaatataaaatgtgaattgtatataaatcattgaattatatttatatatattattaatttcatttgtgtcaaattttttaaaaattgaacaataaaacaaaaataattaaatgatcaatattttattatattttaaaatattaatattacgttgattttaatttatataaatggagtaataaataattttgtattaatatgaaaatttttatataatttatataaacagaatttttaatccaactatgatttttaagataaagttaattttgttataaattttaattatataagataaggtcaattatttatcttatgccaacgtacatattagtataaaaaagttaaatacgggtattaaaaaaaaacaggtaaaagcaaaactgctttttcggacaatatttcgtaaaatagtagttattgccatttactttgctaccacccatctcttacacgcaagtacaaaatttgagcaataaagattttaaaaaaattgggatgggaatgggaccataaaaacaaaaaataaaggggtaaacaagtagaagagaggagtgagtgtaactgaaccagttgctaaatcgtagttttgacctcgaaatgagtttggtcttaaacgagtgcccaggattcggtacctgaaattgcccactccaatgccactgactgctgaaacacgttccgaagggacacgcaccaaacgacacatgtgtctctcacgcgcacgcgagaatcgcgtatgttgtttcaaacctgtggtgaagttgaattttcaaataactcaagttagtcgtttcactcccaacaaatttaaccgcttttaaaacaaactcgacaatttttactgtctctctcataaaaataagtaaaaacacaaaccgaggaagagtataaaaagagaaagagagaggaaggaggaagaactgttcaaaatcaaaatgcagactaaggagaagcatttggcagtacaaaataagagccaattttcaattttaacattcacagcatcgatcaagtaagacgcgacgaggatgcggatctgggtcaacaacgtttgaccagcataaacgatgacattagggtttaattaagtacttgtgggtcccaccttaatatttctcgtgtcccgttattattattattttttttttacaaattctcaaagaagtatttaaaagccttcggccttgtcgttgatgatgttgtggtccgggtttggagattcattacattacattacccctcttatatataacttgttacctaggttttccttcattctttatctttcaaaagagagacacaacaaaaggaagaaagagtgattaagtagggacatgagaacaaggagaggagcgtgttaccctggagtagtctcaaggatttgttccgatgtgagggtttcgaagaaaataaacaaggatctgcacatccatatgcatatgcatgtccccgccggagactccattatttgtagccggaaaaggcagaagaaaacgccggaaaaaaccgccggcggtgattacgattttttcgagtctttgccggacgacctcgtaatctccatcttctgcaaacttagttccaccgccactaaaccttccgatttcgtcaatgttttaatcacgtgcgtctttactcaaccctcgttctcctccttcccacatttctttgaacgggtttttgattctgttttttttttttttttttttttgaaaaacaacaggtgcaaaagattaaacagattagcacttcattcgcttgtgttatccaaagcctcgcccagaactttcactattaaagcaaacgtttggtgcgaatcggcacacaaattcctcaaacactgtgccgatgccggaaacgttgaagcttgctatactttaggcatggttagtacaaataataatactaattaattaaaaaaaaactgcgaagtgtgaagaaattgttgtttgttattgttattgatgaatgatgaatctaaatttgttgatttggtttctgtttgtgcagattcggttctactgtttgcaaaaccgagggagcggcgcgtcgtttatggcgaaggcggcgattaactctcacgcgcgggctctgtactcgctgggcgtgattcagttcaacggaagcggcggcacgaagagcgacaaggacctacgtgccggcgtggcgctgtgcgccagagcggcgtttctcggccacgtcgacgcgctgcgcgagctcggccactgcctgcaggacggttacggcgtgcggcagaacatcgccgagggacggcggttccttgtgcaggccaacgcgcgcgagctcgccgccgtgctgtccaccggcgccgccgcgcgcacctggctgagttggaatcttcagccgcagcagctccggcaggggtccgggtgtccgcttctcagcgatttcggatgcaacgtgccggcgccggaggtgcatcccgcgagccttttcatggcggagtggttcgccgctcggggcggttcgccggggccggggctgagactctgttctcacgcggggtgcgggaggcccgagacgaggaagcacgagtttcgaaggtgttctgtgtgtggcgacgtgaattattgctcacgcgcgtgccaagcacttgattggaagttccggcacaaggcggagtgcgcccccgtggagcggtggctcgacgaggacggggaagatgtcggtaacgacgagggtgacggagaggtggaggttatggtagatagttagacaatttttaccacggtaacggtaacggaagtcgctttggacggaaaaatgaatctatttttggcgaagtgaaagaaaaagaagaattacctgtgatgatttattcgccgtctcaaaaaggtagaagagagtatatggcttcttttcttttttccttgtatagttcgaaaattctcccgaaaaatacgagaggagattctttttctttttctttttttttgcaatttcggagtttaaagttaatttagaaattcaatgctaagaggttactagttactactataatttttgttattaatttaatcgatttgaatttaattaatagttttaagttttattgctatattaaaacttattttgcacatttatctacagtcacttgtttgtatttgagatattagtggatacgacaaaattaaatgtgatttggttgaagattgagatttggtgagctgtgatttgtctctattgatttaatgcggcgccatcgcataaggttgaaaaaggaatagtgaaaataaatctaatcagttcacagacatcaaatttagcattcatacaattttacttcccctcacatgcatgagatgattgcagagggttgattctaggtgatccaacaacttgttagtagcgtaaagaaaattataaaaaaaaaaggtgttaatgacaaaagattcaaacgaacctatcattgcttgatggcactaattatttgaaagatactgttaaatttgtttctattttattctctgagctagacaaaccaaattgctcagaaaaggtttaagtgaggttaataataataattagttctgtggtctttgagtacaagactaataatcttcactccgacatttgcctgacttgtttacaacatgtttctaataatcgtgatccatttacagtatacttttttaataaggttttttcaaatcccttttacttcaaagttcaattgctttagtggctaaaattcagaaaactctctcgaactgtatagctcatgtataacgaatatagtccatagtttaacttagcaatataactttggaaacacttctaaattatgtttaatgaagtatattcacgtttcaatgtgaaaattctaaagcaactctggtgttgcttttacaaacacggcgggatcgtatcatttgagcctttttttcatgctttttccggacattttcttttccaagtgaaatcccctagtatatgaaagagtgaaaaagtgttttcattattgtggaataagaagccttcgtaccttgagatctcaattccagggtttaatagtacatcctaataggggatgaccatacttgttcaatttctctctcatatttgttcatctcggtgaacatttcataatattgcccaagctgccttcgatatgagtatgaggaattcctaaaaaacaattgtttgaagcctattgatattttggcctcttctaagttgtgtttgatttaggaaaggaggagataaataagagaaattttatactttttatgtgaaattcattcttttatatttattttaattcatttttttttctattttcattatctataccaaatacatccttaacgctagcttaatttatgtctagtcttacaataattttaagatatgttttttttacattaattgaaatgatttattagaaatattataattttcttagatgtttataaaattagttacttttttttactgaagtgtaaaattagttacttgactattataaatttaatctatttgttatttcattttaattagtaataaaagttagtctatttaatacttatttaggcattattcatctggactagtattttaaagagaagtggtaacaacactttttttttaaactctttttgttattgacttttttttgtataatcactgtgaatcccacatttaaaatacgaaaaagaaaattaataaatgacaactgaatctattaaaattagtgacttttaacaaatttcaatcaattatgataaggattagaaagaatgccgttactatttctctttattaaataaattcagttttaagaaaacatatcatcagtgctaaactaaaccaaaggaattattgataatatttcataagcaacttatgtgtaataggtaattaacattgatggcaattaatgttttgctacttttagttctaacgtttaccatattaactaatagaagatatgtatttttattgtgataaattaaataataaaagttaactattaaaataaataaagtagttactttttaaaaaatatataataaatatcataataagatattgaacttactttaggcggaatttttttttctaactatagaaacatctaattcataaacgatactatgaagttgtaggagagagttattgaatatcgcctaaggagggagatcaatttttccaaaaatcaatttggatttatgccagaaagatgtaccataaaaactattttcttgatacgacaattaaaggaaagatataaggaagaaaaaaaagacttacatatagtattaatagattttgaaaaaacatatgatacggtcccaagagaagtcttatggtggattcttgagaagaaaaatgtagcattaaagtattttaatacaatcaagaatatatatgatgagactaccatatgtgtaaaaatttgtaatggaatatcaatgtattttcatatgacagtaggtgtttaccaatgttcagctcttagtccttatctctttgccttagtgattgatgaactaacgaaatatattcaagatgaagtgttgtggtgtatgctttttgcagatgatatcatgcttattgataaaaccaaagatgatgttaatagaaaattaaaattgtggagaaacactttggagcctaaatgattcatgataagcaagagtaagagagaatatatgaagtgtgagttttcgcaggtaagagatagtgatcaagacacaatgcatttacttggtcaagaggtacccaagaaatatgtttttagatacttgggatcaattttacaaaaaggtgatgagattgatgacgatgtaaatcatataattagagtagggtggataaaatggtgaagtgcatcgggatatttgcgtgaccgcgacatttcccttaagctaaaaggaaaattctatagaacagctataataccgatagttatatggagtggaatgttgaccaacacataagcaacatgaacataaaataggggtagtagaaatgaagatgttaaggtggatgtgtggttatatgaagataaataagataaaaaattgagatatttgacgaaaggtatcaatgatactgatatgtgaaaagatgagagagcatagattgaggtagtttgagaatgttatgagacgaccactagatgctcccgtaagaataaaagtgtgttaccaagagctcgatacaaagagagatacaggtcgatcgaaatttacctaggaaaaggtagttaaataagacataatggagtgagatatagattgacgaacgatatgtcttaggatggagtggagaaaagttataagcttgatggatgattaactcattagtagttttatgttctagttgttcccttgtttttgttttcttcttcttcatttctttcttattttattttaacttatttttcatttcttttgtcttatttttactttttctttccctctccttttctctttctttgtcttattttcgatatatcattagattcatttaccacccgtctcaattaacttgggttaaaggtgcagttgatattgatattaattagttatattttttaatttttctaaataaaagtattagtaattaataataattttggagagtttttttcttctataaattgagtctcaagtaaaggttttactttccttatgtttaggcacaccatggctccacatatgtcgataaaatctgtagagaatcattggtacgatttgatgaatttatgaagttgtataagtaggtttatacgcattaagttttatgtacacaattggaaaggtcctttatttctatttctttctatttgacccaatttattatttattacaactcacaaagcaggatattcaattttaaaagattcaatacctaacaaagttattcattaaaaatacgtaaatgacatggtacgaatatcaacaaccaaatgctgctccagaacctgctttcatcttcttttttttttttttcatctgcaattataaatgtattaattaacataagaagtgcttaaaaataattacatctccaagattctcacaacactacataatctgacagtgcaaaatcaaaatcagtcaaacaacagaaattattacatcaaagaggagttgaatcttaatatatactcaccaaaacttatataaagaaagatacatcacttcaactctagaatcaaaccagaattcatactcaatcaccctacaaacttaaaatttgatagagaagcaattggatcagcttgccaaagttaacaagtgatacaaaaatctctttgaaaagctttcaaccatgaccatacaaaaaacatgattttgtgtcaaactttctcattgtcaaattcttttccttcaaacaccatttcatttgattgactccatagaattcagaggataacacaccatcccatcacccaccactcatttgcttttctcccaaccaaacaatgcgcatgttgcaaaaaaatgatccaataggcagtgcaaaatttaaacccataatactagactaacgtttccaaatattgtgtgaaataggacatgtaaaaaacaaatagaataaatcctttacctcctctttatagaatgcgtacaataattttcatctaactttaattatcgctgtcttttttttttttggttttttggtcaagaggggatcagaaaagatgaaaagaaaagtaggagacacatttgagaattccaagttgcagtgaattggtgtgggatatgcgcatatttgcatatcatagagtagaatgattttgaaataagtaagctggctggaatttgagtcctatataagaacctcaaaatatatttaaaaagggggaaaaatattcgattttgcacagattattaattttaaatggggaaacaaattaatttattgggtttgggaagatggtgagggattgataagagtgcacttattctttctgcaatgttcgttatttattaatttttggtccaggttctttatttatttcagttgcactgaaccccatacaagtgaacgggtggtccaggcccaatacagtaactagtcccatttccaaatatctattcaaattacggagaagaatatcacaaaagggatcatagagaagacgaaaaaagggtaatagtttggcatctttttcaaacaagaaatcttgagttttttcattaattttttcaataaataatctatcactatacttagagaatatggaaataaaaatacaaagaactttgagagacatgcttcttttatttccaggaaacatatttggcatttccttatggggcaacattagtactaaaataagaattagggtcacattctaaagagatgggaggcttggcaaaacaaaaggaaaaaaataataatagttagaatggatgatcatatatgttgggtacaatagaattcgtgcattagaaaacaaatttgcttaatgggccagctacggagacaagcttacttgttacatgctaactaccactattttgtcgaaaatattaagaaccttccacgacaggtgggattcttatgcctttgaattgagaatgaattcccctgtttgagcatctaactgttaattttttttcctttcttgctttaataatctctgtttgcttcttgctttggtatctttgcatagcatatgcagttattgccaggtcggttgtcaccatcttatgctttctgtctaatcatttttcatgtcagaattagagggagacaattttaaatcatcttaattaaaggcaatttaactatatagcatcgatttattttttaaactcctgaatgcatattttagattaatgtttagtaaggtattatggactaactaatgttttattgatttaagtagtaagaaatttatttatttataggtaaggagaataatctaatttatttaatcagggaaatattgtagttttttatttaacacctaattagtttccctctattcgagttaaatggagttagttcattttaaaaaaatgatacttttaattatgattttatgccaaagttgatcaaatcttaaattttgattaaaaaaattaattgtcgaataacttgtttcaataacctttgatattttttttttgttgaaattaatacaaaaactgaataattgaagacttataatatttatcaataatttgacaacttaacttccaagcttaagttatcaagtaataaaattcattaattacttttaatgaaaaattacatatgttaggacgatttctttaatttactttcattttattggtagggtatactttgcaaaatgggaataaatgaaaggagaaaaaacataaactaaaaggtctcctctttgtgattggggtcaaagaaaatgagataagaaagaggggaaatgaatgatgggatcatgcctcaccagacacgaaaaaaaataagaagacaaaaccacgtaaagagagaattatttattttatcctgagaagtaatgaattataaatatttgtatatctaatgcatggataaaaatgtctcggtgataaaatatttttttcgttcacacttttacctaattatatagagacaattcaactttttccctctttattttcttttgatttaaataattttaaattttacttttatttatttatttatttatattctcttttattgaatttcttttatgtttcttctcacgtccaaaatccaaataaagcattcaagaagaaatagctctcctcaccacattacccttatgtagtactacctacattaaaaaaattacaataacattatttatgcctgtattaaccttaaggtagtagtatttctttacctgtaaagaccttataaaacaaacgcaactatttaataagtatttattactattattaaagtgagttgatccatcctaaactattccaattccaattcccacctagcctagccactacacctaccaaaaaagaagacttgttggctattttaaaaatgaattaataaaataaaattttctgtttttataatgagttggtaggccaatcaatttaatattataaataaaaaagaaattaaatgattttaaaaataaataaaataaaataaaaatgaaaagataaataaataagaattgagaaatatgatgaaaattgtgttagaatacgagcttctagttaacgaatgaaaattaaagaaacagaaaaaattgacaggacaactgttccacctttgttctcaacttatcattactcatgaattatatgagtctataaattaatacgaggaacccaacaaataaataaaaatgagtaaatgggttagtatggcacatcaaacccactttattaagattagttttattaacattctttttgtacgagtgtgatgtaaaagataataaaaaataaaaatatatagataatataaaattgaataaatatagatagatgccaagtgttaaaaagtttgtgttagaatacttgcattcctcttatacttgaattttacccattgtttatagttgtatgaatttattgcacttttatgtgttatatatatatatatatatatatatatatatagatattaaattgcaaagttatattgaaaaaattctgttggagtgagtaatatttatcagggggtgaaaaataaggtgagatttaacttaaggataatagagaccgaatcttattcaccaaaaaaataatagaaaccgaatcctattattttgagtaaatgtccgttaactataatggcttgattattaaattaagcccagaccaatataagtattaaatggctgagctgcatgatgggaactaatgggcttaagaaaattgagcccagactttattgtaatattggcaaaaaaaaataaaaacttgatccagaagtaggagtgggtttagccacgttgaaaacgcaggcatggaaagcacagtctattttcattgggtgctgatcggaacaaacaggtaatgcagcaaagcactttctcacactgaattttcgcgtttcaacaatttcaattgcactttcatcatagacttcttcgtaatattttctcggaatgttccagattcgtggcttttaccgttgttttgttgtcatgattatgtttttctttctcaatttcgtagtttaggatttcgacatgattaagtgctttattttttttttttttaatgattggaagggaatagaagagcggagaagatgggtttcataatggaattcgctgagaacttggtattgaagttgatggaagatccgaaggaaagggatcggaggttcagggagcacgtttatagagtgaaggacaggtgcgagaagacgaaggagatgtggagctaccctatgcgaccctatgggttttggacattcgaacgccacaattctcagcttgcttgggatgcacagattagccaagtggccgggaggagggacccttatgatgatctcctccaacatttctttaccccacctaagtgaggtattgttgttgaaaactgtaatttccaagtatgcagctctcaaatgtcaatgcaaaactggattgtttttggttgattatatttggttttgtctctttgatgaatgacggtcaattactgtgtagaggttattttagtactttgaggctgatgttttgatttgtctgcatgctcttatgattatattgtgtttatggagtgcaactagagatactgtgttttttaaatcctttgggttgggattctggagttgtttaggatgagagttgatggtgaaactctgcagagtctgcacctgtcaggctgtcactgctatggtgtaagctgttatttactatattagaagcgtggtttttagtagctaaaacaaaataagtctgagctttattggggtgagaagggaaaaatggtgaaagttgggaaggcagggaatgaagtgagaaatagtggagtggatgggttttaccaattcttaggctgtgaacatggaaaaagaagtatctacaggcttgctaaaggtagagaaagaaagagtgaaacgcatcaagagttagaagggtaaactaaagtcttgctaactaaacaagttatcaaggaaagatggaagagtcactttcgagtttcaacaagacatcttcaagtgttcctattacatatgctttctcaggtacccttacaatcacctcagtcaagaataatttggcttggtcagccttagttgaactctggtttataggtctggatctctttgacctcatttaaaagtcagcatctgatatttgctcaaaaagtcaaagtcagtgggacatttttgatcaccagctttgtgctctgttatggtgatctatggagcctactattttgggcaatttcagaatcttaaacatgtttttaaccttcagaaacaagtcaaagagctggtgccatgatgcatgcttttgctgatgatatagtactagttggagagttgagagaagaaacaaacgggaaagttgagatgtggagcatttttgagaacacagactttgtataagtagaagttaacatagtatctgaaatgtatgatcagcaaaaagtgcaccagtttgagcttagagctaaaatgggaggccataccacacaagtcgcatgattttaagtgtctaggatccatggtacaacgtgacgggaaaatagagggagatataaaccatagaattcaaaccatttgaatttaaaggagtgcttcaagcaaaacacagtaatgtaaatagaacagtaaatgagagatgagtattatttgtagataacagaaaatacagtagatgataatcctactgcccagagccaagctctttcagagaggttacaattctctctccataacagaattctaaaattcccgatacccctctctctctgacaccttccctaaataccctcagattccatgtcacacttttggcaattctgttactctcttgccagatctttccttttctcacctttgtttttcctagcatataccctggatatcttgggcctctcccttacttctaagcccacactcccattcctatcattattagtgatagaaaagtactactgaagcttcaagggaaaattttactccacaacattaattatagtagttgttatgttgtttaggattgaatgttggagagcagacacacaagatatgcaaggaaataaacttgatgttgcagagcagacatgcaagattataattaggaatgtttgcatttgagtgggggttgaagtagcatgagcatcgattgtggaaaagatggtaattcctgccttaggtagttggggcatgtgtagagaagacttgtaaatacccaatacggagagttgattagatgaagggtagtgcaataattgaggcagagggagataaaaaaccagaaaataaattagatataaatggtttgtcattaggtatgatttacaatagagcattattgttgttcctttaattgctttctttatatgtatatttttctattatagtcttttggaagtttgacgaggtaggtttctagttataattgcagtacctgccgctgtcttctgtactcatatgtggtattctcttttctatgcagtgttgctgaacttgccacaagcattataggtgaaaaggatgaatttgtcgtaatttccccttctaatatcctgtcttgtcgcatgttgcagagattacaactggattgtactgttatttcaaaaataaaggttccatataactatgctgttacagaagaatttttcctctccagaatttacattcttgcacaactgcacttcttggcaattatctgctttatcaatgtttcatgtcattatttagtatttacattgtttgtggatgattcatttctgtcgtcttgtagcctgtagaatgccatatttagaaccttttatgtgttgaatagttcattgttagtttttcatagaatgaggataggttggcagccttaaggtttgctacggaagtaaatagtctatcattgtggtggcaatgttacactgtgtatgtttaaggggaatcccactttccaaagcaggttgaacagggaatccttctcactgtggattcacgttcaatgtgctccaacgtgaaaacaaacgcagctttagtgttggatctttccattaatgtagtgcattgaattttgacacccatcctgtaaatttttattttaaccacaagtctatatgttgaacttctatttcctccaacttccgatcctttcgttgtttcaccaagttgaccttgaaagagatccctgtccaccaaaagaggccggttcactgtggcataattgttatacatgcagaaaacaataaagaaacaacttcaaaacctgcaccattcgaaagccttgtgtctttagatttttaacaaaacaagtgcgaaaatccaataagtacgacaagagttatccataaaataatacgttctgcaaaaaaggaaattatgcagttaatattgtattttcaaacgtataattgttttaattgaaaaataaatctacctcaactatatatcatttcaataaaattagtgatgctcaaatccatcgcataaaacaatggttgttaccaggacaaaatcaacaattaaatttagtttaacagtaggaaaattcaacaaatttcaaaatcacgccaaaagctggacgatatgagcatggcaaaagtcatcatgcagatttagaatgagattttagagaattccttctcaatcattcaaaactattctttgaccaaaaatcaaatcaatacttatttgtttcgatgaccttccctcttccttttcttttttgtagaaagagccaagtctaaagtcaaggaactcttcggtttagctagcagtgctcattacgtcttgaagggcaatcatcgattccaacgagagcataggatgctcctcatgcatttgtgaatgcaaccctgtttcaactctttgaactttgtaatcaacttgtgatgaggaattggcagcctgacctaccctttagtagtaaattagttctgaagcttcaatgtttattccttatattagttataatccctatatttattctgtttaagattttatctctccaccgtacgggacatcaatccataacatgtaagaataatttgaaattttaaagattacgaacgaatttttgatataactacaatcaaaattaaattaaactataagaataaaagtatattctaaccaaataacaataattcttttatgagcctagtattatatttttagtaatactgttcttagttataaaataaatcatttaaaaaccaaaaatatattaaaaatcataataattcgtttttaaaattactattatgctagatataatttttaaaataattattataaatcaacaaaacctgaaaggattagtcaagtgaaataatacaaaatctcgtatttagcacgtagaggcttgtgtccttgggttggagaggcatccctcctaaatttttcaagtgctataaaaaaaaattttttttttggtagatggagaaaaaacaaacaacaaaaacaaaagattacactccagaaacaggctgattcacataatcagctaataacagtccctgagttacacacacaaaaaaaatcttctgctttatcaattagtatttaaatcatattcttattttcttatttattattaagtgtaagtgatttgattgtggcgtccaaggaagaaatgctcttgaaatgtcgtggaatgttaggtgggcaatcccagttccaatagtgagttagtgaccaccctcaatccgcccaagacgacaataaagataatttttatgcaagaaaaggacgaaacaacttcaacttggtgacgtccatttaacgcaaccattgacacaatcccataatgttctacgaacttggttaacttataccatccacacactccgaacccatttcttacacttccatgaacacccacattgcccacaaacttaaacaaatactagccagaagcagattttatgaagaaaatagctaccctattagtagtgctctaagaactctctgccacggaacctgcttcatcttcattcacattgccttctccctgtttaaacgcctttgctatctcatcaattggaatcagaggcaaatagccaaacacggcaaaacccttttcactcgttcccttgaccacattgttgtatttttctgaccagtgtgcagctgtgggaactgccatctctgctactgcatggaatggtggatattggttgagaccagtccacaatttcaccgaaccaaagagcacaatttgcttggactcagtggctacataatttgctgctgctcgtgcccctccagattgagcctcactcactactttctcagctttgtgtgtcacttcctgaaccaaacaagtgacttgggttgcaacctgcttaaccaaagaaggtgcatgctcatcgaatttgtgagcagcttcatccacctgccacaatcatatacccaaaaattaattgcttagcaaatagtagcaatttcccaatccgttcaaacatcaacaagggaatttcatttcaggcatgtcgatgcaagggcatacaaaatttacataaattcattctttttaattttattttgttttaagtactcatggaagacgataggaatcaaacaagacaatttaagggagagaactatacataaaaaaaagtcaaactgtgtgatagtatcaagttctggggtaaacaaaaaaaatcaactgtggatgcatgtacagataacaggttcctcagaaagggtgttattgttatttgccacggttttcaccaattcaactacgtgggggaacgaaacaaatagatcttgatctgaataaaaagataaaaaatcgtcagaaagaaaattcatccttaataattagaaacagaggacaaacaaattgcaagctttaactgatttggttgaaggggtacagcaacaaaagaagaaaaaacaacaaatcacacaaacaaaactaataaatatagattttcatgaaagaaagagagagaaaccttgttgtcgacaaaaaggaggaggtggttggggacagccttgaatttgtggtagacgggacccagaacggtggttacagtgtcttccacggttccaacagcagatctcaaaggtcccgagttttgctttgcgaagtcgtagatattcgacacacacacaaaggctttaattgccgcaatctttacaaacccaagatgcttcagttcttcttgatcactcttgttctccatatccctctgcacacacaacattattcaaagattaattctatgagatctctgcaaacaaaacatagaaatcgagaaagaaaagagaagaattgcaaacctccaaggtggtggccattattgttttctccgccttggaacttgcacgttagctgttgttgctgcaaatataagctcagtctctcatttggagtgttcatttatagatacaaatgggaatcacatgcaactatattaacataagtaaatgccaacgagtacggactccattcttttttaatccatgtttaaggttgtttttgtaaaaaccaataaatataataattttttattttaataaaatagtcgtagagttttttatttcatttctttctctttcaactccacaataaataatgtatgtgtgaattaattaaagataaaaaaagtaagattataattgataaaggaataattcaggtgatcttgaactttacaaatgacaaataaatagaaacaactttttttttaaaaatccgacaattaaaaatgatcagaaggagtaacttaaaaaatattgattaaagaatttaaaatatacttttttttactgaaagatagaaaattgtaatttttatgattttttacgcttttataaaatttatataataaatatttttttaatttcttaaccaattaatctacaataattttttattacctagaccattaacctaatcaagttacttagtactatatagcaattgtagtgtagtattaacctcgaaatattaaaagtgaatatatatttactatcatgtctaaacaattccaaaaaaatatgatacgatagccaggtggaatcaggtctggttacttttgttctttaaatacaatcacaaaacaatgccaaaaaaaatatttaatttaggatttattatcttttaaaaatacaacaaaaaacaaaaataaagaattgttttaatttacacttaatttcggtagaataagttcaaattttttttattatcataatattagtgtaaagtatcactaattttattaataattaatatatgctagagaatttaactaattcttctcaatcatattctttttatctataaaatttaaatttaatatctttcttaagaaatttaatttcagtgtaactaataccgacgatatacgttcaaatttaattacttaagcattattgccttattgcggggatacaatatcccttttttttaagtaaaggaagatgagattgtgcctaagtctaaaacaagaatttaaagttttcactccttttttttctgtctgaggttgtattacttaacctatctcagctttgatatatcctaagtgtattatgattggacttgaggtgcaccaaaacaaataatgagatgccttaaataattatccaagttaaatatcccttcaccgttggattatgtagtctttaatattttttgtatgctagcccacatgagatattgtcgaataaggccgatcagaaatgccatgaaaaaaattattagcccataccttaacccaggcgcgttatggttttgtatgattctgatttctgaatatcgccatcgtgattttggataaaattaaatgcgacacttttatttattgatatagttttagtttaataaaaactaaagttttaacgtaaatattataaatttattttaataatacgaaacattaataatatatattattatgttaaccattaattggtagatgacgtttttctatagcgattccattcgttattttagaaatattccctccttgttctcttgtactgtattctatcaacgacgacttccaaacaaaagctctacataatatttgaattctatgatttattcccttctttttttattctttttatttttcttgtcctatgaatggccttatccttccggtgccgatcatattttgtctgtaccaatatctttcccatataatgaatgctacaaattaataaaatcttgatcctaaattgtcacatgaaaatgtaaatacgtcactggaggcttatttttatcctttttttaaataaaaaaggtatctctttttcttttcgatctatttggaaaaaacaacgtgaatgggccatgtaatttctgttctttcttatactttgaaaatatctttaacatggatctcatactgcatacattactgcacgatcaacttaacattcatttacttgtaattatctagttcttgtaactgtattatatcattctcttagcttccatgcatatgcttgtcctctctacttaggcctttacttaaattgagattttctctttaagcctgagttatagagttaggggagttatataatcttgtttttaattgagtctattactatgtatactcttgtggagagtatggagccaaggacttttctggtttattctattgtaaatccctcttatagtttttcactcactccactacaaatggacactgctcacactcttaacttttgtaataattaagcaagacaggcttagaaattatttacaataatttctgtattgtgaggctcaggtcatcattctatagagtaaccttcttgggatattttatgattggagaaacatttttctggtttggtataaaggtaattttggcaaatacaacaaaatttgaatgctagttgaaatacatacacttttggttactttggttaaacctttctcaatacacattaggtatactgaaaggtctcccacctaatgggaagctaaggctgctccaaaacttgaaatggcagaattaaaactaatataattggagagccatgttacaatagagaaccatatccaaccacttaatgcatgaatttgaaaaacttatatcttcagaaaagcaataggaaactggatttcatcttttctatctttgtccagtgtctttgcctaattcagaaagtgtatttcagcattgtctccaaattgtccattggctgggggttggagggtgaggagagtatggattttgatttggaatagagtggtttagtcaatttgggattgcgggaattcaattattttttccaatgggattggtgatccttttcatattgtggaattaaatttaatccttggcattggtttttggctaaatccaataataggagcatttctcatattgagggtattttgaatagtttctagttctattgcggtagtaatggggtactataggatccttggtgttgagaattgattttcaaccccctttttttttgataatttggaatatccttgatactccttttataaagttactagtactcctctgcttaaaacacccactgatggtttgttgaaccagtagaatagacttatacaatgtttgaaaaagaataatatttgtaatggcaggaagacttagactactaaaggtattttagtaaccttgttagctcaagaacatcaaagaatgcaatagcaatgcagactaattatttaagatagtaaacgaattaatgaattatatagtactgataaataagcggtgtactccttgcaagtaatcaaaattaaagaataaataaacatccatttcacagtttccctgacaggtcaaattaatagcaaatatgcaatttcaggtatagaaatccgaaactacctttaaaagatgaatccgtcaatcaatgtaaacaaaaaatattcatcaaattaaaagtaaatcataactaacatcttatgaaaaaagaaagacagagtttaaccttgattggacagacgacattatgttccttcaaagtatcataaacactttccaagctcaaatgctccatgaaaatgtgtacttcaagatttccaacttaatataataatatagtcaagcaagttgataccttaaataccacaagatattgaaattgcactgaccaatgtcttaatacaaatcaggaaattgcagaacaactcatcctgaggataattgaaatgaaaccccaaactctggaagtaactctgtgattggctctgcagcttggaccaaagttggttggtataattgaaggcaaactgtttctaataccatgttcatgaaaaacaactctttggcaagttggaggcgccatctaaacctcatagattctactaccattggatcaaaaacttggttggtgtgttagtataattagcagttgttaaactaataagtttgttgaattttgatgtttgtcttaattatttgactttatgaacgttagatattaatagcattattgagcaagtaaagcaattgacaattgataaagaacagaagttattgagaaattaggtaatatcttgataattgtataggtgaagtcagacagccaaaattcatctcattgaattcttgcttattgcagtatattgaattttttagctttctagctagttgcattcttcatctttttagattctcttgtttaaatcacatcccctttttcgtttatcatctaaaaactaagaattaggttaaactgatacttaaacaataatccttgtaagatcatatcttagaatcctttataattctaaattacttgttgatgtgtttagttgcccaacaagaaaacttaatagcaagtaaaattagatccgatcaaatccttagtttgttctctacaagatgccaaagtaaattttccaatcatgatgaacaagctcgatatgaccacccgtttgaataggtaaaaagcaaaaaacatacatttaaacataggtttaaatgttgagtaaagctcaacaacaacaattactcacaaatcgacttaatcttattttcaataaattataacattcaattgttttaagttttaacaaatactagtatgtgagaatgtatgatgcaacatgcaataatcaaacaggtactacttgcacaaggacttgaaaattgaaatcactgtacatacgttgatcgtggacatttcaaaggcaacaaaacaaacttaatcacaaattgcattaatgacttcccttgtgaaaagataacgtagaatctttggcaatttcgcatataaaatgatcaattaatggttcatgggcacgcctaagagaatatgttaactttaaggttatgctacgtggggacccaattcaataagacaatagatttgtggagcattaacatgattattggaagtgtgagtatgtaattacttcaacaggaataaaagggctttgccttttatactgttggagactacgcgaaacgaatattgatttggattagaaaagcctaaaactttggggacgtgacttaaatatctttaatcactttaatagtttaaagaacctggcttttatccaagacatcatattctaataatcattttgtcaatagaaaatgaattgcacaccacttaaagaacctcagacttagaaaatgcataccatatgagattcccaatattccactaacttgatattggggagacgacgaatagagaagtagaatagtacgtacttcgaaatctgttaccgtcctttcttcctaattaagttagctttgcacgtaaaaatgatcttattggattttatcatttagaacagtgttacagaaaaatatttaacacatttctttttaaagaaattttactaaaatatttgaatctttcttttataatgaactcatataaaattcacctacccataaagagtatattaaaataatattatgtgaaaatgtatgctgctagtatatatatatatatatataggtaaatctcacttgaaaaaaattattctgccaccataaatgagacctagctaccaatttacataaggatgtatcagcaacatgtacttaactaaagtaaattaatattcattcaattcaatttattttttaaaatggttaattttcaaaattgtaaatatagcataatctgaaaagattaaatgatttattttttaaaaaacgaaagtgttttccatatctttagggattaatttaagtcatccttttttatgctttaaaaagaagtattatgcttaatatacaatgtgtttaaaaagttccgcgtgaaagataaaatcaaaacttaaagacaatacggatagatagataggagaggttaagaatgagcatgggaaaaaaataaaactttgtttttattatcaatccaattactgataaaattcaacacaagttaataaatagataactttataaatatattgacttttgaccatgccaatatataaaaaaaattattgagagaaaaaaaaatctattttgataatctctacaaagaaattttgattatctattgggagacatctttagtgcacacgtaacaaattgacccaatttaattactgagaaatgatagggagactttctctatactctcttttcaatattcttcatgtgattgagtgaaatttgttaaaaatcattaatattgatgagtctcacttatcatttaatgattctctctttatggattgtttaaaattatactattataataaacatatataagttatttgactgtaatgtgacattttggaattaattaatcggagataagaaattcaaaatgagttatttaaattgaacttgtcttaacctttaggctatatcatcctaaagtactattacatgaaagaatcttatcaacatataaatccgtagttcataatacgtaataaaaaaaaattaagtgatagaggcctcgaaccatctattctaccatagagaaacggtagacaataactcccccgaacacaaatgatcacaaccggaaatgctctgatatgtgcatcgttttggcctggatttacgcctagagcggtttaatgaccattaattacatcagcctcaatcactgagagaatcaaataactttctgactaattaatccacaacagctcaaaaacaaaataagccaaagtggccagtgcacacttgctcctgtgacgcacaatagacaaattgcctaaaaaacaagcaaccacccgttggaattgcacgaacaaaatgaccatttattaccacaaaaatatgacaccacgcaccatgcaacggagaaatgcaatacataagtaattagaaggtgcacaccattgaggaaaacactcttttctaggatttttttttgtcatttcttgattcttaccgatttagtgttagattctttgtgggtaagtcattagtcatcaccgatattcgctagaaaatgcaggaagaactacatatatagtagacttgctacaaagatttcaacttactgggacaaggaagaacatatatagtagacttgctacaaaaattttaaaatacaattaaagaatttaatacaatgacaataaaaataatattattgttgtctttaattaaatagaacaactttttttaacttaaagtttttttagttaaataatctaaactcacttttttaattaacaatttttttaaaagggaaatttaacgtgggtaaggaaacagaggacaatttattttttaaaataattatataaaaaataaaataaaatattaagacactaaatttatgttaactttttattttaaaaattagcaaattaaatattatatattaaaaatgataatttgccctcccttattctacaaattaacctcagttcataaacatcttaacagacggtgtgatttatccgttccatacatccagtttggaagttacaatcatacagaatataaaataaataaaaggaaaggaaggggagggtaaaaatttaaaagaaaaaatgtagcagaaaaaagaaagaaaagtgcattatgttcgtcaaagtttggttattactataggcatccaaagttcaaaaacatatatatacagggtttcagaaaaatgtataacatatggggttactcaaactccaaaaaaaaatagataaaagaaaactataaaataggttgttgtaactgatcagtagtagacagaaaaagtaacactatttacatgctaaaggtcgaaatagaaaaaggtggattaatttttcttatttttttcgaagatacgggaggtttaaagtgtaatgcttttagaagttacgtataaatgtatcataaaaaaaatagacagctaaagatagtgataaccagtaggagttgctttaagttgagaaatgattatgataaaggcttaagctttggttagtgacttagtggtgggacatctccagcaaaaacttgaaactagatctttacggtaaaatgatttcgatggcatcccctatatatgatttgttttatatcaattcatatcatataggtgacaatagctagtgagccataatttttaacattatttaaaattaattagatttgttttataaaattgtgcatgcaggtgggttaacccattggatttgctattcagccagctgcgcgcgtctcatggtatttaacccaaagcgatattgaaatgagacgcaaacatacaagaagaaaaatgcatacattacattacaatagtttacattttacaatttaaagatacataaagccttcttaagccactctcttcttagacccacctcctgtcaactggcactggatatttattttaataatttgataccctttaaaaataaagtgaaataaaacttagagataagctccctaattgtacgataaactcatctctaaatatttcactagatatttgagtaacaaatttaacatcaagcatcagatactcgatcatcctaattgcacactaaacatggttcggttcaagggcttacgattatttttatttatttatctacgaaccactagggatcgcagaggtgtcttcatttccatggaaagcctaaggcattcggaaagatccacggtttgcgcgggaagccatatgaagtggcgaagaaggtgcgcgagccagagatgggccgtggccaagcccaaggcccggccaggacacaccctacgtccagccccgaagggtgcaagcctcaagtccgatcccatgatggagacatcttctttgaggaacctctcgggcttgaaagcccacgggtcttcccagatggacgagtcatgcgaaatggcccacatgttaaccattgctgttgtgccagctggcacgaggactttgtccacatggacatcatggaccgcaaggcgagcccatgatagtagcgggcctggtgggtgcagccggagaacttctttcactatggcctggaggtaagggagattcgcaatatccgagtctagcacgtgactgttttggccgacgcacgtgtcgatttcttcgcgggctttcttttgtaagtcttggtgtaaaaccatccttgccataacccattcaaggagtattgcaactgtgtctgttcctcgaaataccatttcctgctcaaaacaacaagatcatatatatccacatatataagcacatccacccattaggcctacatgaacaataagctaatgaatttatgtcactcccaatctgaatcttataaagaaagaatgagatatgcaaccactgggttacttgttaaaatatgttgacatcataccctacatcaaaggttttatttctctaaaatacgtccaatattaaaataagggcttgtagatgtcaaaactaattaaagtctcactgagaaaatatttatagtggcatggcgcgcactagattattattctttatcatgatgattgatgaggtactgatagtgaataatatatataagttaatgttttagaaatttcttgaatatatggtcatttcatcaacaatttaacctaggggactttctctactgtgtagctatgtgtcgtacaattaatgaatttatgcatgttaattaacaagtttaagatgataagtaaaataatatactaatccttatttgcgttttttgagggaaatataacgtatggaaaaagatgcatggttatattttatttatattattatccatgggatgagagagaggtccacactgagtgtggggttttgagagaagaaaaatgattctaggtagatagagtacttacccacagaatagccaccagatctgaatcagccaatctttcttctttgggcaaggatagcaaagtgctaagaaaatcattcttcccaacaaaccaccctctctttttcgctcttccacaatttgccccaccacactaccaaccttagccgccaacttgtggcaccttctcttcaccccatgaaaatccaaaaacttgaaaggaaaataatcctccaagttaaacatcgcaatcaactcgtacccttccctaaccatatcccccaactcctcactcttatcgttactgccaaaaacactctccaaaatattacaaagtgacccttcctgaaataccctccgaacctccacacccccttctcctccatctccctccacgcgctcttcaccatgtcgtcacccacgcgctgtcggagaccctccaagccatgaatcctcctcggagagaacatgtgaaacgccgcgatcctacgtaggtgtcgccagtaggttccggaggagcgaaaccaatggcacgctcgaacatgagagcgcgtgccgattcttttatcggacgatccgaaaacgatgaacccaacaagatttctctagcggtctcggggtggctgcttataacaacgggagtaggccccagactcagcgccattaacctctttgcgttcagcgaagtggctaaagccgcaagtttttggtgagctaaagagcccatgagggcagagtcccaagtatgggccagcccataggcccagtaagttttttttggtttgataatagtgatagtttctccatgcaaagcctccgggacaagccagtagttaagggaaattgcgaagagggttataaagagggtggttgttccaattccaaggcaaagacaaacagcgagtgttgttgaaggtaggagaaagaagaatgttgccgtgggtttcatgtttggtcaaaagaggaggaagaaaaaagaacggtgttattgttatccagagatggacgtgtgtcatgggatatagagcatgtggggatcaattggaatatataggggtggaaagtggataagttaaaagagcccatggttaaggtgaccatggttaagaaccccaggtgctatcttgttatgacgtgaagtgcactataacatttaactttatgagaatcagacccacatcttccgttccttttttctctttttaaacaccttgattttaggaaagcaaaataataatttaataggaaaaattttcaccaataaatcataaataatcatataaatgaatatgacatcacaccttaatctaaaatcttaaggtttaggtttatgatttttcttcacttatatgatgttcaatattttattcctatacgatgtgagacttacctcatatttgtattccaacaatctctccttcaagtgtaagtttcatctacataatagtctttccctcaattgaagtcattttcatccacgagtatttctaggatggccattagagctttcatgctatagatacttgcattgtcgctccactcacgagatacaccgcatggaccaccgtcaggaagacttttgatgcaaggaatccccagccaatgatccatcaccgcatcttactcgttcgagctggtcatcaagtcgaacacttgatacagttgttagcaatatcaccttgaattctaaaggaaatgagagaaatcacacacatacacaaatacaaacacaagagatttaacaagatttggcaagtgcgcctacgtcctcggagcaaagcgatttttttaaaccattaaattcagaatatgataaagtactccagggtgggagaactactcctttgatgggtgttgcaatgattctatttgcgatatttctatctattattttggagatttataattcgtccattttactctacggaatttctatgaattagattcacaagaatcgagtaattaatttttctatccattattgtttggtagtttattccattttgatcatggaatttgtggtttttgtattttggaatgagtgtgtgatttgttttaattgatcctattgaaagtacaaaacataaaatggatttgtcatcttgatagagatgacactcgaggtgaaatcctacatgtgtaggaatgagaaggttaacactatataagtgaaggaaaacataagcgttaagattttggggtaaagtgtagtctcaagttcacttatgtggttgctcatagcttattggtgtaaatctccctagtgtttaccccctctatttcccaacaattggtatgagagtcgatgattcgacttggtgaccggtttgaacgagtaagatgacggcggtgaatccttggcatgaggatcccttgtatcaaaagtcttcctagaggtgagtccaagaagcgtgtctcgtgggtggagcgacggtgcaaatatttagagcatgcctcgaggggaaggctaccttgtggatggaactcacacttgagggaagattattagagtataagtgtgaggtgaagttcacatcgtgtgggaatgagaaggttaaataccatataagttaaggaaagatccataaatatgaaccttaagattttaattaagacgtgatgtcatattcaatagataattttactaaacacttatgattcaataagataactttcaacatctaactaactttttaactatttttatcaaacataaccataatttcatttaattaagttatattattattattatgcacacttacgtaaagatattttactttatcatttaataacatattatcatatatattaagttaattattttttaattagttaacattgtgaaaattattatactgatgatgtacaaaaatcaaaatcttattattatgtgtacgaaggtctcagtaccctagtggttcttactatatgtgtgtgatttagtaagtttgaccagtaactcactaattaaatcaacgtcttagtaacctctaataatatattgacactaaatcagcaagtcgagtttaataatattaatttaataatttataccactaaaaaaatattaatttatattggattaatataacaaaaggattttctttccaaactcacgtattgttgaatcattataataatggtttaacaatcacaccacttatagaataaaataaagaatgagaatattcagatgcattatccttatatattaggtacattgctttaatttacacttatttcaaatgctttatagatcatctttatattgaatttttgtacctaaattattttattttcatgtacgttaataaagcattgcggcctgactcaaaccaattcgtgtttatccatctagggccttttaatggctataatgtcacacccagccccaaaatatttggccaatttcttggaggcttttatgagtggagaaattatacttcctagttaagtagtgatgacccattctcatgggatgtacttggtaagttggtgttcgatcagttcatcattgacttttgccatattgtccattggcatgtatctagttggcaattaccatatttgagcctgatttttgtttattttctatttttaaaactaattgttttgaaaaaataaatttcggtaagagtaattttcaaaaactgtttttaaattaatatttctatcttaatttaaaataaaggaaaataagtttttttttttaatattgcctcattttcttcttctttttctaatctttaaaactagttttgaaaattattttataaatgatttttggagacaaaaatcaaacacatctcatatcactttggatttcttaaacaaatatttattgaaaaattaagaaagcaattcttttatgaaaaaaaacctttaaaaattgagatgaataattattattttttggagggcgtcaccttgatgaaataaattaattttaattttaacaataaattaattaattattcatttttaaagcgaattactttcattttataaatacttatagcaaaatttatttaaagtggtatttgataaagagttttgagtttttaatattttattttccttgcatttcttctacatcttctcctattttatattttttgtgatactatttatcattcattacttattttatttattataatgaagattaagatgaattgatcaagcatgtacataatcagataaggtcgttatagtaaagaaaaaatactgacattttttaacactttttattattattacagttataataaaaggataatttaactagatcgcttcagtgatatgaatactaaattctttcatgcgcagactcttgtgaggagaaagaggaataagattcatgatttattctttgatgatggaacttggcatattgatccgaatgatcttcgtcaggaaactaccaggtattttcattctattttctcagaagatagttctccttctcattcttcctttgaggttcagaatatcccccaattgaatgaggatgggaatcttgatctttctgctcctgttacggttgatgaagtcagaatagctgtgatgggcataaaatcattcaaggctcctggccctgatggtttcaaccattcttttacaagcaatattggcctatcgtaattgatctctggaaacttgttagagatgccttcctttatggcactgctgatccgggcctccttgaaaccttgcttgttcttattcctaaagtggaaaatccaaaccatttgaaagaatttcgcccattagcctttgtaatgtggcctataaggtgattgtagttagactccgtcctttcttaactgagcttattgacccctttcaaggaagttttatccttcgatgaggtactatggataaccttgttctagcctaagaagtggtccatcacattcatcaatgcaagtctagttctggagtgcttgctttgaaaattgaccatgaaaaagcttatgaccgcttaagatgggatttccctccgagtatcattcgcctaatcatgtggggtgtaagtggttcaaatttagctgtattgtggaatggttcgaagcttgataacttttctccagctcgaggtctcaggcaaggggatcatctttccccttaattatttgtttgttctctgtatggagaggctagcattgaggattgatgagcttagggagaataatacctggctccctatctccctttccagagggggtcctcctttgcaattataaatattacaacaacatacattctaatacaaatccaacatataaaaataaaacaaacgtaaaaagaaaggttttgatccgttaataaaattattttttcctcaaacataattttataacggattctcaaacaatgctcatgctcttctgctctccatcatttacagccaatagaaaatcaaccagaagcagcacaaagtgaatggagagaaaaggaaaaatgaaaaaaaaaattagaaagatgtaaagaagttggaaagagctggagacagtcttggctgcacatgaaccaagtcatgtttcatgagcatgttcgtcctggaacatgtgagtggaaagtgaaaacaaagacctgctatttatttattattattgtttaaaattcgaaccgaccaactcaaagtcacagtaaccccttcataagcaacgaatgttgataacatgaattaatcatttgatattttacaaattactataatgcaaaagttgtgtagtatgtacattagcataggttatagcctctgctatgtttgtcgctttagaggcagaatgtgcatatacaatctattgactctgagactaagatttgctgagccccccccccgacaagcttgtataaagtttccacttctccgtgttaccgggcaaagatatttaatttagtcaccggtcaacaacattatgcaattctaagttatttttggaaagaaaaataataataatttgtttttaaaaaaaattaatattcttccaaaaataaattcaattaaacacaaattaaatataaattctcatacacgagtgagaaataacattcatgttcttgttccccattttatttatattgcgtaactgtgacttagccgcacatgccactgataaggaagagcaacgtcatggcttcgcttttcacaatgcttggattcagaagaaaaaaaaaaaaaaaaaggtgggaaatattcctgttttggaggggtggaggtttcacctgattagcagtttagcagtctgtttggcgaaacagcgagaaaaggaacacagtgaaaggaaataggaaagtgaaaaaataaataagaaatatgatgatttttttttattaaagagaaatattaaaaaaataatgtaaaattataaggtttgtataaaaagataaaataatttttttattaaatatataaaaaataatattttactttcacgtaatgtgtagcacacaggtcattatgcgtatatgatagattatacagcacacataataaattatcaacacaaacataacaatttttcatggcattggcttaatttggttgattttagtgtgcatatatataatcgattatatgcacctacaaggacgatagtcaattaaaatatgcatataatcgactcatcaaatccatcaagagctgcacaagggtttagcaagatgagcaagtgtgagaacaaacaaggattagtttaggaaagtaaacactgtgcgtccatttccaacctgtttctcttctcttaagcgagggaataagaccatagtaaaaaccataactttaaacttatcacctttctatttcatttatattaaacaacaccatttttttttatcatcattacgatttctactccctccactcattttttatgtatttctatgctaatacagtgtaaataaagttatgtttgaatatataatgatgaaggacaaaaaataaaatagaagtaaatgaaaataaaacattgctattattttactgcttagatgttttaaaatgaaagaaacgagtatatcccatattctaaattttacaaataatgatattggaattttatcagtttcatttcattattttatcatgttttaagcaatacaaacaataaaacttgaaatcattatatttcatttttgtttttccatccaatatatatagcctaataatgaactcacttctagacttagataacctggtgcggcccattggtctgattcaaattcggtgacttgccttttgggttagtttggtgaactatagaactgctttttgtgtaatatggttgacttgtttctaattttaatttttggcctttagtcaaaataatttttttgaagttaatttattttgcttgggaaagttttgactccaatgttaaattacatgttttaaatattataattaaattatattctatttaaaatatataacgttttaatactatattctgtttttttattacttttttaaggtttttttaaattccttgacttattaaattaattgataatatcctttttgtgaatcgacctccgatccgaatcacacacctatgctcaactatgtccacatatataatattcatgaaaatgcaatgacaagtttatctttaacaattatagattcttcttttattgtaagctttttggatgactttgctttccattttcttctctttttagtatgtgaaaggacaatcccttacaataatatgccttaagccacatttctcattgccatgtgttactgcaaatcttacggaatgatttttcccagcattcaataatgcaatgtgcaaacacatccactcatttcacagttggaataagcaaaaactggacatgtgtttcaccgtggcatgtgctgtttacctcgcagctgaaccggtcacaatcatgtctgtggttttggccaactgtgtttgtttcaatttcttataaatttaattttgcatcattaacataaaaaatgaattataaaaatattttatatttaaaataatgttttaaaatatatttaaagaattatttttactttaatataaatactttttaaattatgaatcttatatgcatgagtggttgcacttttgatcctcaagtattataaggatgtcaatcgaatttttaataattgtaattttctaattaaaactattttttataataaaaaccgcacaattctcgcataattgtgatgtatacatgggaatcaattaataaaattaaaatataaggaattaaaatttcatatttacaatacagaagagcctaattgatataattcaaatttaggtattaaaacaaaaatactttcatttatattatatcacattttttattttaaatacttatatcatttaatatacattttttttcattcgtacttttattttcactcatcaaacaatttaaaaaatcaattcactttctattttttcttcttctttccttttactttcttctccaaaccaaacatactattagttggtgttatttagtaatgaaagacaaaattcttttacacatcaagattagaaattaaagtatgtttttatcacatttaattaataatttttcatatataaaaggattaaatatgtttttggtatcgaataatatttaaattttgtatttaatctctaatattttttttcttgactcttgatccctgaaaaaattatattttatctctttcatcagattgactttgttaacttaatacatcatcatttgattaaaaaaacaccattggttgtgataaaaaaattaaaagatcaaagaaaaatccaaaaatatttcagaaatcatgtacattctctctagtacgaatgaaaactttttagatggttcaagtattctctttacctcgtgtgtcgcagatataataataaaaaaaaagaattctttagtctttgtattctaattttgagatggtattatttaaagctccttttaaggagtactattgtgcaactcaatgaatcgccttgaattagtggctaaattaaacctgaatccaattacagatcatttaagcaaaccattgatatgtgctataataagaaacatggttatcccacaacccatcaggaaaagttgttcaatggataattgtacaacccttagagaatacatctcagatggtgactagactcaaagagggtatggagagcacaagtttcttcttgattccggagtggcataaggctttgttggtattgctactagactctcgtcaaaggcacagtacaaatccaataacttactcagacgtcaagtattgtgtgtaacttgtttgggtcttctgagccaatttaatgggtactcaacactggaattatttagtatttaccatcatatatatgtgcatgtcattccctacataagtttcaatgtcagaaaaataaagcctgtctaaattaagttgtaagatggtgtgaaaccaacaaatcttaattcttactaacatgtcaatagcatgttaaattttttaataaattcttttcaattaattttagaattttgtgattagatcgccagagactaacaccgtaatcttcttccattaaataatattgacgtgggaacctctatccatgaattctctttcactcccatgccacactctctctttgaattttgtttttcccaaatcattatctctaaaatgactaaatcccctatgtaatggtttgcatccatatggttaattttcctagtcttgtcttccatcaaaatggtagatgaaaagaattaaaataagatcattggcgataatgcaaacattagtttttaattatatatatatatatatatatatatatataaatatataaattctgacccatttgcccgtatggcagtatacttgctttgtcctcagacagtggaaatgaagcacttgaataaatccagtaatcgtacgtttttattccaattccttctcatttctttgcttgatcactttttcatgtgcatcctttatttgtatgtctaccgcattggtgaaatgggagtgggggtactactgcttaactatttataagttataaccatgggcatggcatagagtactttgggtctttcctttttttgcttcttacctgtgtttaggagcatgccatgattgtctttcaattattatgtgttaaataatattgctcttatcctttttgaacaattatattttttatgtaacgagtattttagaaggaatttcatcttcgttcttgaaatcatatgtatgtcagtggaatgcaatttaaactctgcattgtgcttcttcttttttttcatttaatagagatcttgtgcgcatgtttagaagaccttttctttttggtagttctaggagacctttatttcagagtgaataatcacttattttgaaaaagttatctcacaaagtggaaagaaaacaagagattatttttctcaaaataagttgaactaaaagatacataagtattcacctaattgaattataaattaataatgggatagagatatcaagtttatgcttgtccatgtgataccacaagtttgtgacagatgttaacgaagtgagttccattgcattgattaagatagatatgctaataaaggtttttataatgcagcagatatatcaatgtgctgttgtgagagaaaagaagaaagcgagcgcagtactagtgtgaatgtgcgactgtgcgagatgtggaatgcaatctaatagtctattagaatcaaaaaagcaattaaagaaacagaaaccagttgaagtggttgggtagttattgcttcttttttttaacaaagatttaacagtattagttttaaggatttaataacaaaattttagaattataaattatagagatttaaataaaattataatttaacccaagaaaattttcttaacaattaagaaaaaaatacatatgaagataacaaaaaattgattttatttaaaataatcaagaaatatttttttttagttacgtcatcttcatgttgatgcttacaagtgctgcttgattaagttaagcaacgttagtacgttacttgcttgacaaaatttattattgtaatatttcttatagaagtgctgttccttatataagtaagtttttttctcaccaaaaaaatataagcaagttttttttctttcaaggaaagatacattccttaaaatttgttaatgtttttttatgttttgaaagagagaaattaatacatgttaagatcaataaaattaagttaagtatttactttaaaaaatttagtattagagtaaatttttgtgtaaagtacttaaaatttatatgatgttaaaggattcataaaagataagtaaactcatttaagtaattatgtattgtggatgttattagtagttaaatcaattttaattttaaattaaaataaattatatacatgaaagagataaaaaaaaattaaaaatgtttcctctagtctcgattataagaaaaaagaagacatgttttatatttattaagaaaattagttaatttcattaaattgtatcattttcattaaaaataaacacttttcctaaatcatcattcattagaacttgatatcaaatatataaaaaaatcattgatcttattaaatgaaagatattttagagaaaatctcattgtaagtaattgatatttaattacatttaagacaaaaaaattattacttatatttaagattgaaggaagcatatacatttaggataagtcatgtgtcttaatgaaataataatatcttttaaaatgtgtttttatttaagaaaaacttttaaaaatattggtttaaataataactcttaaaaagtattactgtttaagaatcattcttaaaaaaccactcttattcaaaataactatttttaattcataaagagagagggaattaagttaaccctgaatatttaataatccttcctctataaacaatcgtgacttagaactggacaataaagaatcaaagagcgcaatcaccaaatagccatgtgatcatcttatgaacccttcatccctccaactttttggtgtttgtagtttcatttggtttattaaaaaattattcaaattaaacataaaaataatatgtaatttaattcaatttaaacacaatattaaatttgaactatacatcaaactaactttttggaaattagtttaaattggtttgatagttttttaaaatatatatatatatgacttttaaaattacttttaatttagcaactaaccaaataaatttacctatgtaactaataaaaattattagcaatacttgaaaataacatttgcataactataggcaacagagtatcaaaaatcgtagatgacatattacaaaattttataaaaaaaaaaaaaacattacaaactatttatagtcaattaattatgcattatcaatgtcataaattcataatttaattaactaaaaaaatgtttggtatatatgatattgcatattatcattatttaaaagatataaaagattggatttcatataaggatataaaacaaaaataaatataaatacaatatacaatattttacaattggatttgatttaatttccacaatagaaactggaaaacaaactataccaaacaaatgttttgtcatttaaaattttgagaataaacttttaacatctttaattctaataataataaatatatttttaattctatatgttgttaaatttgcttttagttttccaaaaaaaaaaagttattggttttagtctataaatttaaaattttgaaaaaatattatttattgtcatatattaataatataatactaccactatgtcacttcaaaattatcactaatatatgacacattaccactatgtgaatatgtgataacaatcaccatttaaaaaatatatatatgaaggcagaaataaggaaaataggattgagtaaaggatatgtctgaaaactgaagagtggagaaataaaaaagaaaatgaaagtgatatttactaaaactacacaacatgtctcatagtacaagacttggctctgcctttttgtgtgttaggccctcataaacgtacttgtaatatgcttgctagcgagttggtttctttttcaagtttagtggctaacccaatatggttggcatctattggataaggttccgttttaatgctggcccaaatccctaggagtcaaagggaaaaagttattgggcccaaatttcgaggtgttgacctcggcccattaccatttagggtaaatctctaaatgtggtacctctctataaataccctcattatagatggaagctggtgacgaagggattccagagagactgacgcaaagctgcggcagtgagagaggctaagcaaagacagagagtgggtggtttttcttcggtattggatcgttgagagtgtctccgagagctgtgagagcatcttgttgagagtgtttccacttctgttgtatgtgaggctgagtggctccggcaggtggccgttgagcgttttgtaaccattatttctcaatagtggattgtttctggacttggtcccgtgggttttcctcttggaggtttttttttttttctcccacgttaagctatttgtgtgttgattctctccttatctcttctctcgtgttctctgttttgtttccgctgcattttactctgatttggttgttgtggattgagttgtgcaactccccagtgctaaggttggtagagagaagctcccagcagacaagaaggttgtggtgccgagccggatacgcggtgtcaggtagcaaattccacaacagcatcaacccttctttaggtcatgcatgctttcttaattatatatttttttttttgccgacagtttgaatttcttttgtcatcctcgacaaaataatagcattctgttaagtcttcaacaaatgagtattgttactactttattctattcatcttatccttacatatccatctaatttttagctatatattctctataagcattacctatatactttgattaacacacacacacacacatatatatatatatacatacagcattatagctgggggtggggggtttcctagacggttttcttggtcatatattcgttgcgagtacgtggttacaaatttgaagcaccgttatgcattatccatataatacaaatttctattgtgtcactacaagttaattattggggttctattgtatagtttccagcaaatcatacaatttaaaatcatactaggaccactaaggaattttagttacatttaactattcaaaatactatggggatcacagataaatcaaatctgtaaagtgttgaatactataaatagtaaattataaccgggattcttcctagatccaacttccagaatgcagtgtgatcttttgaaaaagcaaggaagattttggctgacgaaagcgtccaaaatatattcagcatatatccaatattttctatgcaatttttgttaatgttgtgattgttgtcctttgtcatagtaaaatatcttcagcaatgtttatatcaattatttgtatcctaaagttgaagaagacgcgtggctatcttcgcacccattcaatctaattgctcttgtcgttttagcataggggagggctccattcttctgaaagcatgaaatccaggatctaaaatactagaattatagtatttagaatccccgttaaccaatatgcatatcattgcttagtgaagtgatgattggattaaattaaagcaccaaatgaatggccaaataagagttatagcaaattctcatattatttgaatatttaaatcaaatactaatgaattatgttgttaaaagaataattaatatttcttatttttatgaaaaaataaatattaaaaaaaaaaacatgtaaaatgagaccaaccaatgctattacacaatgtctcaaaagaaagatcatcaacacatgcaacaccaaaaggattctacagaagacggtttattaaatataaatatgtaaaaggtgggttgtctttgaaggagagaaaatgagagctataccctgtagcagattcttccggagacccttggaagaaaacttaagtggaagaaaacttttagatactttaacatatataatactaggtgcatatcataaattaattatagactcatacgcccatgatcgacccaatatatatttgtgaacgttaatgggaattaataattaattaaattgtattgtttgaaatcaccttcccctctaaatggaaagtgacccataggccgcctcaagcacctattgatcataccattaaaagaaagtggtgggccttgttgaccatcaccagcaatgcaaccctgagaatagttattatcatcgttcaatttcctatacatacgtgtattctagcaaatcaaagataaattaaaggtgcattctactcatgattacactttccttgatatttttgtggtgtttgttttcatgttgtttgattgagaattatgtcaagaatgcgtgtaattaaaatgacatcttttttagtaatatttcaggaaacacttgtcctctctacagatgcaaattctattttctttatgttgctaaaatcctgtttagtgagtcccttttttagggatgtaccttaagtttcaaggattagttgagggctaagattggataaaattacttatcatttaagcgagtacaataatttttttaagtaagtctctattgatactcctaatatgttattaacaatattttcggtaatattagaggtatcttctcaatttacaatttttaggtaatatttttaagttaacttttttaggtcgatcccgagtcgaatttaattctagctttttaagcgtataatattatatatatatatatatatatataataaagaacagtgttatatgacacaataaaattatttacaaattttatgggtggaataaaatacatattttagtacttttcaatccatgaaagattcacttagaaaatagtctctagaatgtacttaatagattttggaaataaatttttgaaccatttacccatttccaaaatcaatttgagaacgtagtttttaaaaaaataattttagaaaaatattacaaaaattacaaaaaaggaggtgtctaagtaaaaagatgaaacaaatagcaattgctctattttttgtgttaatttgttgtttctcctaaatggtttgaactcgatccatctcattcattttttatattcaatttttggcatttgtatccaatatgaatcctacacctcccaaaaagtgactcattataaattgacttattatactcactatgaaactaaagatactgatatcttggaagcattccaataaactactcaatatgataagtaaatcccatttaatggtaaaaaaataatgaaacaacggtatcttaaaataacttattaaataactagtgccggaaatacttttaatttcatgcatacgtgaagcaataggcttaatttaattaccttaaggagtgctgggcttctgaggatgcccttttgcttatgagttctccatgtttgaaaataagtctccatgattaaggggttaaagtacagagaaaattagagtgtggatagatgaaaaaagaaaaaaaaagtattttatttgatatctactcatatagagagtagaaaagttaaaatataaatgactcttgattaatgttattgcgtttgttcgaattttctttgctttgtcatagtctagaaggattgttatacaaatgaaaaacgagaagccaaaaccggttcaaacttcaaacgttcgcgtcacggcctcttctgtattcttaatcttaactcatagtcaatgatcaatttctcttaaattaaaaaaaaaaaaaaatcaacaggtgaaaatcttgtttattaaagttcctaacaattgaaagtcatgtgaccattgttgttaaaacgtaatttcaactcggtagaaacggacgttttaacatttttgcttcaaaaatgactcggttgaaacggcgagttgactcagtttttttttttaaaaaaaaaagggttaaaagcttactcccctaggtgcgctgccactgctggtcttcggtcttagtgctttgtctgcgtcctttttcttctgcgaccttcttcgtcttccactctcccttctccgtcgtgtgctgcgtcgtctgctgcttctagtggtggcgctgcatccgtcatctttctttcttggtggcgctacatcttcatcaatcatcatcagctaatatcttagtggtggcgctgcatccgtcgtcttcctttctgtgtgcttatgtgtttgggccagataaattgctttttgcactcctgttatttctttctgcagtgttcgtatttttttgggacttattttagtatgtagtaaattcttccgtttcgtttacatttcacgtttttactcaccctcaccgtttctgcgttgacactacattttaacaacattgcatgtgacttgtttcgctgaagaacctcaagagcttctgtaactttaagttcccattattgaaaatattagtagtgacggcatgttattggtttgagtacaccaattttacaaagcatatacatcatactcctaacatgttgttagtttgagtaatacaagatttgattttgttaaataaaatcttgagtttaaaatttatgaaagaaaaaataattaaaaagaaaaaatttcattataagtgatcaattaaattttttagcaaaaattaattattaataaaattaataaatatttcacaccaacactaatatatatatatatatatatatatatatatatatatatatatacacacacgttgtacgtgacgaaaagagaaaagaggatgatgctggaaaggttatttaaatgctaaaaggctgcaatacaaaaatattcaaggaagagttatataatatgtatgattgttttgactgaatttttattttccttgttatttttctcctcttttaaaagttaatttaaaataatgaaattaattttcttaaataaaaaatgattgaaatgttgatgaataaaaaaaagagcaataaaattgaaaaaaaaaataataaggcatgccattttgttgccgtaacataaagaaacgtgcctgtgattttacacgggtttagtcaccaacttgtactactaccattcccaagctaagcttgagaattttttccattaaacttgagagtttctctgaaaggaagaggtgctgatagaaactaaaccataaaaagtttgctcatactacttatatatagggatcgaaatgttaaaatggtgtaattataagaactaaaacatcgagcttgagatatgttattgccacatcaccgctacgtcaatgtcatactaccacaatgttaaaagctttagaggagatttgacgacaaaaattaaaatgtaattaaaaaatgtatatgcaaagacttaaacgtgtaatttctaaatatataaatcaaaacttaaaaataatacaaatgcaggaatcaaatgaattttcgaaattcagtccatttctcctttggaaatttaccaaggtctgaaccggaccgaccgggtgggaccttggatttgaaacggatgacatcttgtgtctggatattaatgggaaaaaaaaaaaaaaaacgacaatgcatggttgctgcattattttctttaatcccttgattcatttcctgcataaggttggtcctttgaacattgctctagttattgtttttttgggttttattgcagcaattgctacttactggttcactttttggccttgctaccttctcccacttgactgttgaagctcttggagacacagcagtggtaacaaaataacataaaaaaaggtggataatttggagattttgaaaattataggtttaaatatcattttaatccttgtaatttagtgattttttttttattttagttgttacaaaaatatttttttacttttagtccttacaaattatatttattttattttcatcattatgacactttagataactttttttcattgttcaaagcatagttatcaatcctggatagcggagccgagcggccgccctcaaaactggaatagcagatagcgggatgatcgctattctaatgtttttatatatgtattaaaaaatttataatattaatatataagctgaagaaaggaaaaaagatgaaaggaggaaattgagaatttatagaaaatgggaggtgaagaaatcaagtcccattgtggagatatgctagagcccaatgtttcaatatagcccaaaatttttcacagaccacacttgctccatgttataaaaaattgccacttttgctcccaaaatttctcacagaccaaccacttgcttcaaccttttcaccccttttcacacttctctctcacttgcgtcagtgcatcagcatcacacacaaacaaacactcccagtctctctctctccgactctaatctcgcgatgttccgttgcgcaaccaccgcctctccaccgacgtgtcggcgactcccacggcggattcagccttcgcgaaggtgtggaagaaagtgagccccaacatcgacccgtcgaagacgccactagcgtacattaagcccagaccactcactccctcggctctcccatccaagctcacagtcaacttcgtcttacttgtgactggtgagcgcgaacgacgggccggtgacggtgagaacgaatgtcagagcgaatagtgaatcgtggacgcgtcaccgcaattgcacgcgcgacgccaccatcctgtcacgggcacaacagccgcaaccgttaaacgcaccgctactctaccccttatagcggcacatgtccgctccgccgcaatcgtggctgcgacgcccgctattaataactatggtttaaagctctaaagtattttaaggactaaaaacaaaataagcataatttgtaaaaaataaaaaaaattacaatgaagaaaaataaaaataaaaacattaaattgcaaggacaaaaatgtatttaaaccaaaattataaaattaaaaggaggtacaggaagaaatatgtgggctgcaagaagtaatggcacggcaaagtttatcacaatgattgtgtttggacttagacctattggacctcccattattgggtcattaagtagagggatagctaatttataagtaatcttggggttaaatccaattctaagagaagcgaacaagccaataacaaaagctattatcaaaatctcttataagctattatcgaaatctcttataagtagaggtataaaacctgcaaagcattacaaactaatttatttgcctttgttctccacaatcctgccttctttctatagtttcttggctataaagtctaaacatatactgaacacaagttgtgtccacccaaaaacaccagtaacaaatttgtcaccacccaaagatttgtgcacacacacacacacaacttgtccccccaaaaacaccagtaacaagttggtcaccacccacacacacacactgaaccatcttcattattgttgttatgtatcccttccctttaattaaagagattaaagacatcggcaaagagttacaccatccccgatcgaaagaattgttgattcaatgcgagtatcattcgctatataggtgttgaattcgagtgtaggcttcctattttgccaaaatctatcttccattttatcgttgttctcagacatagccaccgtaccaagccataaggtgttgtcgtatgcaattattccacctttcttcaccaattttaacagcagctcgtgatactttataaaatttttcttgtcagcgtccacaaacacgtaatcaaatgtatcttcatgtttgccctgcaatttatcgcagtttatttttatttttcattcttcaaatatcaattcaaagacaatagataaaggatgttgaataaaatacaaaactcactttgtttagaactactttatatagagagagagagacacacgcgcatacacacactcatttttataaatgtaggggacaaattcaagataataaataaaacttaagcttaataaaaatgtaaagaataaatgatgtaattgatatatataaattgacaaagaaaaataaataaaatatgtatcataagttatttttaatttttatttaaatattttttacaaatttcctattaattactagtttacataaattaatatcatatcaaactttcattatctttctattaatcattaaatgaaatttaaaatgagacacttaattttaacaattaaacaaatgtaaagattgaatataattttttaaaataaaagagactaaattacaaataagccaaaatatgaaatctaaaaatgttatcaagccaaaaaaataaaaacacttacatttataagatcatggagagcagatagtgcatccccttggataaagtcaattttgtgctccactcctgccttctgaatgaagggcaatccaatcccgtaagcttctctatcgacatcaatcgctattatctgcaacattcgcaaaattcttttcacactttgttcattattttatatttcatatgtacatatttgtgtaagtttagaaaacatccatcagaataaatgaaagcatgataacaaatacagtatatgaaaaaattgttgattcgtgtgctagccgtggctgagattacataggaaaaaaaaaggaaaatgtttgatcgacactcaaatgttgaaaaagttaagagaaagaaatgaagatgtaatagataagatgatgtgataagagagaaagagaaaataaaggttgtcaatgaagtagttacactgttgtgatatccaaaaacaaaaattactataaaaaaatgttaatgtgataccttgccatcagaaggaagagcgagagctgtagaaagaagagaataacccgtgaaaactccaatttctaatgttttctttgcgttcatgatttttagaagaatagataggaattgggcctcatccacgggtacattcatcatgctcctgccagtgccaccatacatacatacatacatatcactatttttttggtattaagggggccaatggcccaaaaccaagaaagacttagggtctgtttagataagattctttagaagcacttttaaaagaagaaaataagaaggaaaaaatgagatgggtttttccaaaagcaaaaataaacttttcattagctaatttttagaagcttatcaatataacttctctaaaggatgagatgacatctataaaatgagctaatggaaaactcattttagcttatagagaagctcatttcattattttcttcttattttcttcctctaaaagtgcttctagaaaaacttacatccaaacaaacccttaataagacattgcacaaggtgctgaactagctgttttacacatgttaggtgtgtgtctaatagaagacttgctcccatctgtgttgcatttcactcacccaattggagggggtacccatctaaattcaatgaggctgggtggtatatgcagcatgtgatttagagatcctttcagcattcaattgcatgtgaatttgattatacacaatagaattccttatgtgccaaatctcatatatatacagcagctacaaacagacttggccaagaaaaaatggtgtcatgcaagggaggatttaaagggcctctactgttttaaatcaggaggagggacattgagggatttccaaagttgaacaagagcaacacaatttcaaaagatgtgggagagagattcacaaagtctattacatataataggacagatagtgattgttataatgccccttttaacaagggccaatttagcaacacaatctgtataactggtttggggcaagagaaagcgatcaaatgataggctgtgttgttgcatcaggggtaaggttccagatgaatttgtcatccccaagattaggtcttggaggtacagaagctataatatccaaacaatctaaaatgggaagcaagtgagaaaatttagataaattccataggccactctcatcaacatactattcaataatcttggatgacacctatccacctaaattgacactcatttaatttgcaattgcccatctaccagctttcataatccactcccaagtactttgaatcgccctccaaacctttgagcaattttgtttctttttcattagtggtctgaaacctgatgtttggcaaagttccaattccaaggccttagcatgactgacattcttagaaacaaataatctggtttttgttatagaggccttctggccagaggcttaagacatcaaggcacttcatgatagtatccatatgatatattaatatcccccaaaagaaggaggccatccgcaaagctaaatcactatgtatgatgtacgttccttgaccaaatgtgttacttacatgcttaattagaaaaatcaaaaagaagaaaaggaaaaaaactgtaagatcgatccagttaactaattagtaattataagttcataacagctttgaattaattttacacatgcaactagataaattgtacgtgactgtaacttacttaaccccgtatttctgcagtgttgtctctcggagttgcttcaattgctcgtgctctttgggatagccactcgtttcaaagatgtactaggtaaaaaacatgcagaaaaatacagttaatgtgtactttgtatattgtaaggaagcacaaagtatgttgattgaattaggaagatcacacgagccgtatacatcagaataaatggtttgcgagaagttagattttctgaatggagatgaagatatgcaaattcttttcatattaattttgggcaaacgatgaagctagactgataattgattaataaaaaactattttacacaaaattgataaatggggcttgtgggggttgctgatagtgccgatcgcagaacaaacatgatggtcgaggtgtttcattttgcttgcagagaaagaattgatgattatagcaaattaagggttataatattatattacatgtatgagattgatttcaagtgtatatgcatacatgaagcaataggcttaatttaattaccttaaggagtgctggacttttgaggatgcccttctgtgctgatgagccctccatggttgaaatacagagcaaattgcggggtgtctttagatgaataatgaacttctcaattttatggctgtagagtgtagagaagaatataaggaacttttttttataaataagaatataaggaacttgagcgttgacgtttgagatcagaagcaccattccctacgtggcagtcggccacacttcccgtcattctaaaatgaaaacaacaattacttgacacacttaggtttagagatttttagtaatagattataaattgatatcttacattatttttttatagattttttaatataaattaggattgaagatttcttttttttagtgtgataaacttcattttaagatgttaaagagagggaaaaaaattattttttttgaataatatgtatatcttcaaaaaaacttataaaatttattctttttccttttttattataagatttagtgaagatcggatcttaaactcaagatctagcattaaagatatttttaaatctaaagaggaagaaaaaacagaaataataaaattataaataagacagataatttgataatttaagaaaaaagatatcaaacaagtatttgtatttgtaatatagaaatgtctttttctaaaattagctgtatgaaatatgggcaccgcatataccgctgaaacttattcgactgtgtaatggctgatgtttataatatgaaatagaaaaatgctaagtgaagacatttgggacggaatacactgatgtaatttggagctaaatttgctacagcaacatctattttattctcgttaaagatgtgattgtttgtgtgtgtgatcatctcataaatttttttgatggaatgacaagtcaatggattatcataaatatttgttacttgattgaagaatctaaaatcatttatttattttacatagactaaaaaatctttaaaagactaaaacaaaaaataagatattttataagaaccaaattgttatttaagttaaaatcaaattacgaacaaccaacatcaaatggaaaatgtacagaaaaatgtaagcaaaaagtaaatgaattttaagattaaacttagttctttagcatgaatggagatgtacaaattataaagtgagtgaactgtagaacgacaaagtggaaattgaaatccctttctcacgtatctcgccccttcctctgagagcaaatcttcggttgcacaactagaaaaaatcatgtaaccccattgcccgaaggctccacgctatgcgcaggtaagggggaggctgtttccgaattcgaacccatgaccaacaggttggtcaccaagacacaactttaccgctgtgccaaggctcgccccttcctcctgagagcaaatcttcggttgcacaactagacagtccatatttaattgaaatgacccagtagaggagatacaacaattgtctaggaagtggcaatgttcatgaacatcaaggccccaagtgagatgtcactaaatgcccaccaaattagaagccaatgccaaaacaaatcacagattaaaacttattcaaaaatctgaatttcaaaatgttgagataagaagatgtattaatgatattcctccctttcaaggattgtcactgtaactgaagaatgtacaagatcaacacgaaagctccaaaaatcatctcctctgccaccaatctgggatttttaacctccggtttctatgaacagaaagtttgacccctggaagcttgtgcttgacctgtctccacagcatatcaacagcatcttctcttttggaggatattggaattcataatgatgggagatgttttttagttgcctccacatttcagtccatttctcctttggaaatttacgaagttgatcgatcatgtagccaggctgtaatgcctctttgaaagagaagaaaaccgagaactgggagtagtcaatctcatcctcaaatgggagttcaatttgatcactcacaatgacaggaatgcaatgactcacaatggcatcaaaaagccgacaagatgatggtgtgtctcctgctggatgcaaacagaactttgatgaacgcatccctttagatgactgttgtatcaagagcagtggataaaggaacactatagttaatgattttagcatgatactaaaagattaaaaaaaattgactataattcctctcccctagcaaagatagtaactcatcttggttatattgcaaaaatagtttcaaagtctttgcaccctcaaaatgaagcatgtttttgattcaggatatcatatgaatgtttttgagagagagaaagtgagaaatctaaaactagtactatttcaccaatgcaagatttatcaggtttggtggggggagctcgcaaacaattcattttgtctacagaaagcaaattgtatctcaacattcaagttctcagagtcagaatgcatggggaatacaaaatgtagagaagtgcagcacatgggtagttcttattgtgtaagttatctgaaatatctttcgcttttttaaaggaatcctggcctttgatttacaatgaagaagaaaatagttgtaaaatcaatcttttaaatggttaaccacaaatattccagctacaggtaaagtaagcaaagatcaattacataactatactgcataccgcttttatgttctcttctgtagcaacacttcgctcatagtgaacatcatcataaccagccaatatctttgctagtttaacacggacaatccctttctgcaaacatcacagacgccacagaatcaattatcatggaatttaaagaaggaaaagctcctctaaacttagattggctttaaagtgagcaagtatgggtatatccacctttggattttaccgagttaagatcacaatgcactttacttgctcactttaaagacaaaattactttagaagaaccttgtccaattaagaaacacattattcatataactaactctcagttagacatacatctttcctgtaagtcctccctcggaagaaaagcaatgtggagcgagactcgtatggatcttgaggctcatcatctgtaaaagagtccacaacatgcacatacggggacaccacatctttgttcaaattagacatgccctaggatagcgaccaaaatccacaacaacctgaatcgattcattcaactgatctcgtaggaacctaaaggcattggggtgcgtcatgggaaatacatggtctctacctccagacctctgccagtatttggatttctttaataattccattaaatcaacctgacaccagaaacaagccctgtttaacattgacaacagagatttgtaaaacaatagctatgatgcacagatacaggtacaagtacaaactatacaacaccctgcatttctcaaaaaaaaaaaaaaaaatacaatgtaagcatggcaagaaactgtataacatacataaaatccattacatatcaactcaagaaacaattcaaaacaaaaagctaacaattgtcataacacataataaataagtggagaaaacagcttttttgttccgcggcacaaatttcaaacacgacggaacactagctgttcgagatccctctcgggaggattcagacctacaattaagaataaagccaatgtgctagcccaacagaatcaagcacaatagctgacatataaggcctaacatcaagaatcttctggcactacaccaatcccagtatagtcgcaatgtaccaaatctgatgccaaagttcgtttcgcagactcaatggatttcacagggttgacccttggaggtatttctcacgcctcatcaagtaagaagcaccaccatagcctataggagaataatataaataaatcatataaataggcccattttccaactttacaatctctcattctcctcctgcagctacaattctcaaacactgatttagcgatggaatccatgcaggtacataagcagagttcaactcgtgcgatcctgagaagacttcattatgatattccaaccttctagactggtgtgaagtgaacattagcattcatcaaattcttatgatttttcagcatctaatgccgtttaacaaacatcctgtatcgtaaatcttcacgtgatcttactaatcgcaatctaaggctaaacatgcaaagcctggctgtgaaaaataactctcatagcatagcatctgaatgattcacaaatcaattcggaaaaattgagaaacctagcttggagaaacgtagcgaagcacctgcaattggcgatctatctgcgtggcgggatccttcatggtgtgaccatgcgtgttgaagctgagcgacgagaagaacggcacgaagaacgcttgggcaagttccggatccgaaatcctaaccgcttctctgcccccgccgacgttgaggagcgaccccatcatccagtactccacgctgtgctgcttcttcagcccccagttcaccggccacgccggccattcctcgatggtgacgggcgtctccgccgagctccggcggtcaatcatgccgacgttgaatcggcgagggagatcgtacatgaaaacccgaagaggcgggtcgggtgcacagggagcaggtgcacccgcgggtaactttaggcgagggaagaaataagatcgaatgtcgagggtacctatgaaaattgagtaagaaaggacgagcaagagcacgaaaatgaacgagagaaccacttttccatacattgcaggttcttcttcttcttcttctaaatattttggggaataatagtgagcctgattgatgcttgtaggttatcttcttcttcttctgctgctgctgctgcagcttctgttacgagttgctttcttagctctgcgatcagttgcggtgtccatgtatcatgtatgtcagccaaatgtgaaggccaagaagatgcatttcttccagagtgagcttatgtcgttttcttttctaatttctaattttaatcatctaatgggaagggaaaaaaaatactattattttttataaaaaaataaataatttatatattaatggtgagaatagtttttatactattatataattacaaattttataattaaaatataataatattgaaagtataaaatattttatgctagcaacacataattctttttttaactcagaaaaaaaaacaattttttatataatcactaattaataaataaatgtaagtctattttattcattaaaatataacccctttattttggaggtaataaatctgcaaacattgacaaaaatttacgatagaaaaaagaactttgattttcttctcattcacttgtagttgatttttgtccgcgtcccttataacaattaaaaaaaaaaattgcatgtgcactttggtcgttttgatttttgaatgcagtattctttaaaataatatatttttgaatgtagtattcacggatcgggatctggcagatttgaccttctaaaagaaatttgcatgtgcactttcgtggttttgaatgcattgttcacgatctgatagatagacttgagttgacctttaaaaattagatctagtatgttttgatatactaacattttgagttaatgctgtaaaaaaaaaaaaatcttaatttgaatgaatgttctattcgggtattcggtcatccgaataaccaaatacaccccctcaattacctgaaaaagacatgcttaagtaagtcgtatatccctacacaaacaaggaattcgattattcggatacttgtatatctgcaacacaaaactaatgagaaacaagctcgtatgatactctgatgcctgtaagcaggtggcgatggttggaagaacataccggttgacgggagcatattgtcttaaacacataatcgaacaccctattcgaccggtcgaatagccaacatcccgcacaaagataactaatagtaattgattaaggtcataatagccattaacactaaaagatgtaattaacaaatgattacctcaaatggtcatcctggctaaaagtccacatgtccaatatccattaaagtatatataaataagtgaaattttttagataaaacataattgatttttatttattatgtttgtttattagcatggatcgtgtcttaatttaagtatcggagttctttttacaaatatcacaccttccaaaaaattagacaatcaaatatcaaagaagagctgttggattaagaaaagcattctgaagtaaagttacttagtcattccttggcagaaatatgttctgtatttatttagaaatacttgctaactcctataaaaataagccaatgtacattagtaaatatttgtaaaatttgttaatgtgcattcacttactttttagaaggagtatattaataatatgtaattatgattgatctggttaacatgttttttttctaaaaaaaacaaataggtgtacatttacaaatttttaattcaaaatatagatttgtcttataatgatatatcaataataaaaagtatattaacaataaaaaatgggtgaacttgacccatgtgtaattggatcttaagtcatatgtgaacgaatcaaattcgaattcaaataaataaatcaagatagtagtaagcattaaaataaacatgtttcaaactttcttatgaacaccttaatatcaaataaggaagattttatctacaacagtaactaaaacacccttaaactttaattgttgaatggttggacttaagagtgacagtttctccctaaactaacgggttcttccaagaattatcttgttcaaaacattgaggtttgtaatattttctccatagttttagagttcaataaaaaaaataactctccaattcttaccaacatcaatgtatcaaggattgagttaagtttgaggataattagatccaacactaataaaaaaataatttgtttaagttagtttaaaagtaagaaattataatgggcaacataaagttaagtaagcgaaattaaatatgagttagtttgggtgggtatatatataattataattttccatttcttaccaatattatttttttgagataattttgttccaaatattattggacattaaatatatgcacatattttagtgtatatgtattctgaaaatatactacacatagttttggaaatatacttctataatatgtatactttattttaaaaagtcattttcaacaatattttttttgttttatctcattacaactttgtttattttctaatattttttttgcatatgtgaacatgaaatatcatgttagtaagatgtctaaagagatgaacataaaagaagaagggaccataatacaagtcgggcctcatcgactcaccttatattataggattgactgttacaagactagtgtttaaacctattatataaccccttgtattttgcttgtaatctcttcatttgcttatttgaattcaattggcattatatctctgatctattttcataacattatcaaattgaaaagtcaaattttgacatgtgacaaccgccagttgctacatcatcgtcaaaagtatcatgtaggcataaccattttacttaatggagaaaactaacaatgagattaatttattgcattttttgcaatttcaataacaattttttgttcatctttcaaggacctaattgtcagtacttaacaaagtaaatgatgaatatgaatatataccttcagataatgaaattattgaatgtcgaaagaagacctatggcattgaattggaactgaccgtggttaagataacaaaattgtgagacgtggttggaattggaataatgatagtgaattagggagttttggaaagaggataaaagatgtttcagtttcaatatttaaatggtgacggaaaaaaaaatctaataaaacttggaaatctgcatatgataagtagagagaaagagatgtgatcatgcgaaaaagagaataggagattttgattatctatagtttttttttttaattacatagttatcctttactctgcatgaagtttaatataaagaaaattgattattttgtcaaacataaaaggtgcatggtgctaacatacacttactaatttttacgtgagtctatgtttttttgcttttgtgaacgagaggggaaaaacgccttccaaacgatcaattaaaacccacatgggaaaacaatcgacattacattggccaaaacatctgtaaacataaagggtaaaacaaaatcataaactctcatatgagtgggtctatattagcaaatcccatatataatattatatatatagacatattaagatttatatatatatatatatatatatatatatatatatatatatatatatttgatttgatttagtctttgtttgagcccaaaatgatatggaagcaactattaacactaccatattttctattgatagtttaacactaccaacttttgtgaatctcttttacccattcaccaaattcctacactcttctcatcccctcataatttttatcgagccaccccactgtcctctagcactgccacccacctacatctccgttcagatctagcattgttgtgcacccctaccttgcccaaacccgcgctcgccaccttcaccgtgccactagtccaccaccaaacctatagctactacaccatctttgccccagctttgaacctactgaccacaacaccaccacaatccaacaacgtcacgccactgccttacctaggacctatgacccctacacatgcaacctcaacatctgaggcttcacgtgtgcgacttccctgcaccactattgcaccaccgctcacatccatcgttgccactaatagccttattgttcttgcctaagaggtagtaatacttgaccatgaaggcggcgcaaaggaggctcaagggcttgttaaggaaggtggcaagggccaacgaagggggattgtgtttccgttggtagagaaaaaaaatacaacaaaaacatgatttcgttgtacactatacaacgaaaacatgattacctcgtatatattttttttttcaccatcacttaattcaagggaaacaagattctgttgtacaagtgaacaatgaaatcatgtttccatgaaaatgacattttttcaatttttttttaatgcacaccaaggtagtgccaatagcaaatctagtagtgttaacagttgctctcagatgacattttaaaggggtattttcaggtttgaatgaaattgaccgtgggctggagtagatgttgggccttattctccaccatagttccatatcgctgaattacgaactagggttttaaactcattatattatataaactccgtcaatctttctgtggagttgctgacaagccaattctttgtgttggtgctaaatccctagtaagccgccatggtatgcacttcacctctagtcctttcactttcttactccaatccgtgttttcatatcatgcttaatattattgtttgcacatctgtttctgcaggtcaagtactcaagggagcctgacaatccaaccaagtgtaggcttcattaataatcacttttttgcgtttgtagaatcgacacttattattctctaaacgacggcgtttatagtctctcccaatctcagcattttttttttttttttatcgtttttcatatgcagcttgcaaggctagaggcgccgaccttagggttcattttaaggtactgagtcccgttactttggttttctgtttaacaattttttgaaagtcgaaaagtaaatttcatttgaatagcaacgccatcaatgtataatcaattgtcgacaactcacatcaatgatatatatacttaacagatcctgatgataaaagcggcgcctttttatcctgtttgagcatggccctagataacttgttttgagaaatcacaaaacctggtttatagagcttttcaaataatctaaccagagtggtggcttgggaaaaaagatctagaaactgaaggtttttttttttcctgaagctaatccaaatgaaccttgtcatccccttcccttaactgcattaactttacttgaggctgtcccttctgctctagtttaacttgatttggattgtgtgggaaaaccttttctaaataaaaaatgaagtggaaaaaacctgatggaaaaagcaggggcatgttgcctgtgtgagcaggcctctcataaccttcagggatataataaccattgttattgagtgaacctctgttctctgtttgtgactgaaaggttcagtaaatgatggaacccatggtttaaaaaactgatgaaaacttattttaacaaatgaatgaagttgaataaacctgatgaaaaaagcaggggcatgttgcctttgtgagcttgcctctcgtaaccttcagggatataataaccattgttattgggtgaaccactgttcactatttatgactgaaaggttcagtaaatgatggaacacatagtgaaatctgatgaaaacccttttaataaaagaatgaagttgaataatcctgatgaaaaaagcaggggcatgttgcctgtgtgagcaggcctctcgtaaccttcagggatataataaccattgttattgggtgaacctctgttccctatttatgactgaaaggttcagtaaatgatggaacacatagtgaaatctgatgaaacttttttaataaaagaatgaagttgaataatcctgatgaaaaaagcaggggcatgttgcctgtgtgagcatgcctctcgtaaccttcagggatataataatcattgttattgggtgaacctctgttctctgtttgtgacagaaaggttcagtaaatgatggaaaacaatgcttttgttgcatcatgaatttgattcattctgagcttgattttttatttctttttatgttttgtttttaaaaacagcagaaaattgatgttttacccaatggagggaggcagtagttaatatatgtttcttctttgtgaatgatgtttcattgatgctagaacaatactattgagtttattttattctgagttatatcattttcctagacatgagacattaccttttacattgtacttacagaacactagggaaactgcctttgcaatcaggaagttgcccttggttaaagctaaaaggtacttggaagatgttcttgcgcacaagcaggccattccattcagacgtttctgtcgtggtgttggaaggacagcccaagcaaagaatagacactcaaatggccaaggacggtggcctgtcaagtcagcaaaattcatccttgatttgctaaaaaatgctgagagcaatgctgaagtatgtctatatatactcgttttttttccttttccgtatggctattttatgatttccaaactaactgaaaattgtttcttttcaggtgaaaggtttggatgttgatgcgctttacatttctcatatccaagtcaatcaagcacagaagcaaagacgtcgaacataccgagcccatggaagaatcaatcgtatgtctaaaatgtccagatttttgttttaatggcttgttatcatttacacggttttatttatggagactgtttttgcagcttatatgtcatctccgtgccacatagagttgatattatctgaaaaagaagaacctgtgaagaaggaggtatttgattcatctagttttgttgattctcccccatttttttttcaatgattcattatctaattcctattctttttttggtttgtagcccgagactaagttagcaacaagcaagaaatcccaagctcttcgaagtggcgcttcgtcttagattactaataaattgtttgaggcccaatttcctagattatgtcaagtggagagttttgtttgttttatttttgttatggtttgatatgattttcatactatcttcaaattaatttgagttaattgaaaaacttagtcctttgtatgttttccttcggatggattacttaacattagttttaaaagaaatactaaatattagacataaatcgatggttaagtggtactgaattattttttgttttctttccataatcctcttaggcctgggtttggcccaggcttttgagaatttctgtaagggtttcttttggggttaaagccctacaattcttagcttaagcttttttttgaacgtcaagtaattagcttgggttgttgaagcatttctaaaaaattctaagggtattccagtaaaagtgtaaagctaataaatgatataatgtttttgtaaacgtgatattgtttagtgtttttggtgggtgctgaggaggtggcatcgtaaacagccagcacttattagctagttatcatgtttggcgtttttggtcagttttaatgtttttctttggttgatgaacaagtgcagttgttgaaaataaagatttttctttggagtaattattaaattttagatgttatttacataaaagagagaagtaagaagtatgaaatgagataataatagtcagagatacaacatgtaataacacgaattgtttttttttttttctttctattattcaattgtaattgattctaattgaaatgaattatgtgcaagttttatcgaaaacaagaaattatataaatgtaatataacattaataggattttattcatcgtaattaatttttggatgatgcaagaaaatataccatgacataagtttgttaatatgaatttttttaaagtcagcgttaatataaaatcacccacattgggattccttcatctgatcattgtggcttgtgggggaaaaaaaattaaaatataacaattttaataaaaaaattatgaaaatattgtagttttaaaattatttacaaatgtatagcaatcaaacacgtttcaggtaggcgtgatgcgtagaaactttggaaggtcataacttttgtccgattgaggtgaaatcggtggtcacgcgctcgaaattgagaggaaaagcccttggcaagtttccaaaggggacttggccaaaatttttcccaaaaggggtctctaagtgcctcaaaattgttatttaatcttcggatatccaaaaaatttcgtgttttctaattttttacttatttaattagtgaattgcaagctcttctttatttatctaattacttctcttaatttcaagcattttgatataaaatacgccttcatcggacatggtctaaattgcgattttgacataaattttggtccctaaaggagctgatccttcatatatatatatatatatatatatatatatcaatttagacccattgctctttgcaatgggatatataaaattgccaaccgtgttaacattattctcccatacgtggtagggccccttcaaaccagcttcattaagggtagaaattcggttgataacttcattattctccaagagcttgttcattcttctcaagctgaatttgcagactgttcacttcgaaatggattccttgactgcggttaaaaagatggctagagagcttggcctaaccatttaggaaatctcatctaggatatcaagcaatccctgcattaggactcgactcttggaccactcttcttacctatgtctatcgtaaaccaaatacaagtgctagcttcttggctggtttggcccatcaagggaactactatcctacacttctggattccattcctattatgttgagggttatcatcgaggagaacactgggggcctgaccctccctagaatggttgcggtatagtctttccctttctttcccttttatccaaaaaattaaaaaaacaaattcatattatgataatttcattgtttttcatcaatcgagtacatctattttctaatcacatttgaagttatttatactgcaaacttgaatctagattattgggtttgattgtggagtgttaagtggaaagaatgatttaatattttagtaaaaacaataactgaattaaatatttataattatttttaatctttatctgattaataaattgtttacagtttttttgttccttttcatgttatcattaatatttttaagtattgataagaaaggtatacttaagatttaagagtttactcacgcatcttattcatttaagtcaactaaatcatcttctgataagacttaaaatctaaacctttagtcaaaataaagaaaaagtaaaagaatactgaactttttttttttaacctttagtcaaaataaagaaaaagtaaaagaatagttttgtggtataaactcgaggaggttgaattgagtacctcactttgctacactctccggcgttcaatagacttcaccatcttcctcttctgtctaccccaaaggtatcgtttcaccacacttactttctctttcttttgattttcctcccttagcatgccaaacccattcgctcgacgacactttctgggggttttatttcactgaacatcccgatgcttatacgactcgtcgtgtttctacaattgaactttatattcactttttatcgcaattttcccttttccccaaattttaaagcataacctagaccggggctttcacacaacacaggttacggctgccccagatctgatctagaaatttatattattacagagataatttcttaaattcttgatgttgtgggaaattgtagacaaatgcggctaatgtggccgaaattgtggtcacgtcgattcctaaaaccttgatgtcgcggttcttgatttttatttttggcattgtattatatgatctcaattaacgtgtagggttgctgatgctgtgtattttccccttaattgttgttgattagattaggatggattggctagggcaaaagctggcggagcaactgatgcagataatgctgcttgcatttgctgtgattgcatttgtaggtggatatgccatggcttctttccaaatgatgattctcatatatgctgggggtgtggttttcaccaccttgctcactgtccccaattggccccttttcaatcgccaccctcttacgtggttggatccaagtgaggtggaaaagcatcccaagccactaccttcttctgccaatgtaactcaaaagaagaaacctgttaagaagtaggttttttttatttttacttttttacatttttggggataatatatctttgaagtacatgatgctttgacagtaatttgaagttcttaacctctttccccttcagtcgatattacagtgtacaaccatatatttactctcttttagacattgcttatagctgtgttgttgtgttggttatccattttccttttttttttttttttttttacctattttcttgattttaggcttttgattatatgataggggaagagagttctgacccttgatggtttgtggttttagttttagtgtacaattttgatgattctcacaaggtgattacccaaaggacaaaacttaaatgcagttctggtgttgttttctaattagaatcagagttttaccttgataatctgtttaatgaaggtttccatcaaaggtcaacatagttctgaagctccaattatgattggagaacaacaccaaaagcacttatgaaattgcatttaagttttgtcctaagccaaaccaagtgatatcataagccattcaagatataacctatctagattcatgaatcaattttttggtcgttaggctcttgatggttgatagaccttgttgatttgtggattcaactgatgctcttcaattttaaaggaatttacacagtttgttttatgctaacttgcacttttggtcttcctactttctcaatttcatgaatttcaatcttcatttttttttcccatgaatttgatccctagctattgtgcaattatgatccttatgcaaacttaacatccaatatttaaaggaaataaattgttgaaattgagataattggtgcccaaaatgcaattaagtctgttttatattgttttctaaatccattacgaggattcttctctctaactgtgtctgacttttcttttctttgattgagctacaatattggtctgtcattgtttatggatttcaaagaaattggtttcatatctcaggccaaagggtttttgtagcttaggtaatatgtaagttgcaaatttggaagcttttatttttgttgtagtcttggatgttaatgtgctcttctcttgttttgctgtcacttctgagtttttttctttctttcctctaaagtcagggacaatgttgttaaaatcgtgagaaaaatcgtataatcgcgcaccatcttgcgattttgcaggtgattctcgtgctgaatcgtgttaaagatcggagggtgttccagatcgcgatctttcgcgtgagaaaacacccattttgatctgtctcaatctttaggggttggcttgtgggccgtatttattatgggttgggtttcagttcgaaacccatattttctgactcggcccagttcacaaagcagagaaaaaaaaaaacaccttctgacttcagtcattctttgcaactctcttcatcccctagggttcacctttcaagcttttcgtcctctcttcttcgttcgttgttttggccaggatcttcccttgttcttcatctgaaactgataccttcagcgccctattcttcatctcaaacttgaggattttcagttttttctctaatcttcatctgaaactgagagcttgctgggttcttcatctccctcgtttctgccttttgttcccctattcttcttgcatttcgtttttcattctccataagttttaattttaatagtacgtgttctcgtttgtcatttttacggtttgtcttttgctgccacagtgcacatgttaatatttttttgtctacctaaaatcacaatatcttttatcacttgtgttctgattttgacttttctggttttgtctatcattttaatgtagtattaaaatttaaatgtattttttttatcaagtgctcattttagtgagaaaaataaatatacctcttgaacattttgggcctttggctgaataattaaaattttagcttgatgctaattgagaaagtgcttctctttggttctttcttggaatcttgattctcataaaaaaaaatccatttttttgtaatggatctaccttaactgcttaactcgtcaattcatttgaattgtgacattattcttccacctctagtcttgatctatctttttctatttcctttttattttaattaaaatcccctatatgatgatgatgccgaaattggattattattagggtttttatcataacatatcttcgtgatttgaatcgtgtttatacattcgatgagtatttcaaatatttcacatagaagttctcacacttgtcaaaataagcaaattcaaacatgttattcagttttgtctccaaaattgaattcatattttcttacaaaatcgaagtaatattctgtatgaaatccatttcatattttgcacaaaattgtttagtaaactaacttatttcagaatttcttttactactattttacaatcttataaacttcaatttttttaagatagcttatagctagtaatttttttttattacatttctctttaatatctttaatataacttcattttttatattcgtggttaaaatctctagtacctaaaatatatttttacctaaagtatataatttatgtgaaaaactttagaaacatgttttttttttgttatttcatactttcagctatttaatagttaactttgtcgaacatttctaattaaataatttaacttatcaagtttttaattagtttatgtcaactagttttgttgaatgtaataacaatatttttcatttctaatcctacaaatataagaaattttgttttaaactcttgcaattacattcacgtaaatataacagtttttttttttttattattataaatccgtctcatctctatgaggaccaaataagtgatgacaaatattataggataaaaactaaaataaaatttataaagaagcaaaaagtcatcatttttttgcagcaacgtaaaatatattgatgaagtcatttcttgaattaagtatatgtttagtaaaacaattataatcatttagcaatattaataaatatcttggcaatagataacctaaatgtttaatacttgacacttggtgacaaaaataatttttttggatgatataagtcatgggttctcttaaatactatcacggtgggtttgcatggagcatcatgcattcatcaattgacaccgttctaagaacaaacataaggcaaattaggatgatataaaggtacacgttcattttaattttcctctcaatatatttcattcattcattagaatgtcaagagtccttgaaagtgaccacatcaaaccttaattcaaaggctttggctgaagattagctactccggtgtgtgtgtgtgtgtgtgtactaaatttagtgtgaagcgcaacatttgattgaaagtagtcgttttcattgtaaggatgtctttacataaaagatatatttcattttttcttacatcttttaaaattaactaaacaaagattttttttttcattttttttagtcaaaacaactgaaaagtattttttttctctttccttcaactttttcccatactgttcctttcctcatttttttagttatatctagattgatgaaagaaaattaaataaagagaagaatattatgttctactatttaaattagaaaacgaggatggaatataatatatagaatgagaactttatcaccttggaatattacggtttggttggagtcccttcttcagtccaattggaggttggcatactcctcaatatcgttgtaaggatgagttattttgtattgaaaactatgtgatcagttttattaggaggcaaaccaattgggtggctcgtcaccttgctagagcaactcaattccatgttagtcaccaagtttatgaatagatttccacttgtattgtatcatacattatcaatgaaatgacttaagtttctcttacaaaatgagaactttattctattttagtttttccacaatatatctaaataatgaatataatgagtttgattctattatactacaaacatagcctcatttcaaaacatggcacaaaactctccgttccagacatatctgaagcagataagccccaagaattctagagattgagacaacaccaagaattctgcatcaacaaacgtacttgtaaatagtctgattcaccagagaatagttgatgtttattggacaccagagtgttcaacgtccggttcaccacacacatgtacatgcaacaatattatcatagtaacttcaaagttgaaccacacttttgaattatagcaaataatgatgtagcaatcaacgcatgctgcaatccaatttcaacacatcattaattggaatctcaaaatctgtggtgatctatgcatactccatcaatagaatcaactattggcctaagtttcacaaaaatttcacacttcgctgactaaaagtgggaatataattctgattctttgagcgactggttttatttaatcggcgagtcgtaatagaaaaagaaccaaaatcatagattctagtgggacaacgaaacatacccagaacaggtttatttatagggaaaaaaattgtcataatctactctggttttatttaaggaaagagtaatccttgtccacttgtaattattggtatatgttcgcttacaggaaagagtcaatttttttaatttataaaaaatatcatttcaatctttaaaattatgtacaacaaaaaaattctttaaattattaataaaggttattttagtctttgcatataaaatacttgcttctctaaacacatgcaccaaatgaatgtctcaatccttttctcaccaagactgaataatgaattgcactgacgacaataggcattttaacattttaaaaaatgaaaaaaaaatatttttatgacataagaaggaattgattagattaagaaaatccggtacaataaactaataactatgcccccgaagcatgcacatcacttgatttctaatcatatatatgtagaatataagtagagaattttgactagagagataaaacttatctcaataatttttactcctcgaaattattaattaactttcagttgacagatatcttagttaaaaaatcagggcagggaccggttatcatttgtcatcatgcaattgtgttgctttcttaattagcagtcaagatatttcattccaaggagttaattagctaaaaattccaaaaccgatccataaaaataaataactagaaaactaatgtcaactatcctaatttttataggttctttcaatttttactttatatatgatatgatattactttaggcaccggttggagggttggcagatgcaccctctcattttaaaaaaattattagtatttgtcctaaaatattatattttgcatcctctaattttatgtatttgaatttccttatcagttcatatgtaagagtaagtaaatataccatcttattttaataaaatgcaaaaaaatattatattttgcatccataattatatattttgaacctcctaattttatgtatttgaatctccttaccagtttacatgtaagagtaagtaaatgtaccctcttattttaataaaatacaaatatttattttaaaattttatattttgtatctcttattttcgtgtttgaattaaattatctcatataataatgataattatcaatttttatttttaaaataaattgctaggatcctagatctgccactgcctttatgaccaaatcgcttgaagaattggtcattgcgtcaattggactttagcatttattaagtcaactgtcgctcttttacagcataaatcaagggcgttcataggtttgaattaattccatgaatttagcaaatcaaccaaaacatttcagactttcagttgtgtcggtttgatttatgtgtacactttgcactgaattaaactaatgaaacttaatatacagtatatacatagcagtgatcaagttgatgtaacattaacttttttttagttacttttattttcactattgttttttaaagatctagtacttctaatgaataacttatcctaactatttcctaaacaaataaaactaatcctaactattggaagaaaaaaaataattctaactattaaatttcaagaataaatgatagaattaagagtaatgatctaaaagaattattcttagaataatttgattattcctatgtgtctctatatataattttaattaaaaataatcattcaaactcttttatgtgcttttttagttctttatgtacacaatttgatgtcgttttgtataatagacatgattatgtaaataaataagctttaagcctttcccttatttcaaattatgaaatacatatatttcatgaagtaaaataaaccaattcataattggtttgagctatgcttaatgtactctttttagcttaaaagttaatttaaagttaaagtttaaaataaaaactttaaaatactgttagacttaaatacaagtaaattttaattacttgatattatttaatgttatcatctaaaaaatatcttttaattaattaaagttctagtccaataattctttttatttttaatattaagtttcaatggagatcactttagaaaaaatattttttttaaaatatgaccacaaaaattaaatgacattaactagctttcttaattaatgtagtattagataaaatttaagatctgacgtctgagactaattttaagaattcagaaattataagaatttagtaaggattaaaattatgcaatatggcattatatataaattaaaatatatgataacacaaataacaatcaagcctaattttttttttggtacaagtcaattttcaattattgagtgttatttggtatggaacaaatttgcacagcttttctttccactaataaaataacaagatcacggaaattagaggaggtaaagacagaaggaaacaaaactccaatcaaaagcgttattatgtgaaaaccacgaatcgatcatttcctatcattggcattattctcattaaatttatgcaagaaaaatcgttctgtgaaaatcacgaattgatcattttcctaccattagcattattcttattaattttaataaagtaaaaaaatctggctcgtacaaggccacaaatgtcaacaataagaggaaatagggcacattgcatatccaccaatggctcatcacaacatgactagatcaataagtggttcttgattatcattgatggagatggaataaaaagtaatggtgctttcttgaaaaggaaaatatttgcgctgtagatagatacaatattctattaactaaaaaaaaaaaattacaatattctgcaagataatcagtaagttattattgagacaataagctaacaaaaaatttccgacttatgctagtgcatgtaaaaaaaataaaaatatatacgtgcaattagtatttcggtaaaaatatttatcccttaaactaatcaatgatcatgcaccataattttgactagagttgttattgtatgatattattaacaaaaatcgtacacgaattattaatgtcaggacctaattataaaataatctattaatatgaaaataaaatataataaatatattttaagataaccacaaaccataattgatgtggctcaagtgactttgaatacagcaaaaattatatcatgcacatttgataatatatccattaaattaaaaaaatatgtagttttgaaatatgaaatttatttatatgcactataatataaaacttatttacacaaacatttaataggatttatcttatcgttactttatgttaatgaataagatgtcgtgataaaataatcaaatcctattgcatgtatgtaaaagaaggttttacattaacactgcaaataaattaaattattagaatatcccttttaacattcataaaaagtttaataatctttagattattaagtgcatgctagtttatatatatatatatatatatataaacctttttattgttatcttgttaatttttttcatcaatagaaaattcacaatagactttatgaaaagaaatataatatattgtatacttcaattttcaacaggttaaactgagttgatgagacattttttttttcaatctttaaatagatctaacatactacttcaaacaaatcataattcagaacctataatgagaaaaattatcttaacagaggtgcatactgtcatcatgttaagaaattccaattgcaaactctgctgtttactttatcaacaaaacaagtcctgccgtggtgagattgtgtcagtgttatccgaatatcttgtctccgaccgttttggtacctaaataaatcctataaattccactttgcttcttacagcgccaccaacaactccaataactctatattgactacacaaactacccttctctcatttcttttttcctttcaacctcattattattcttgtaagttcctctttctttttataattcataattcatgtttagttctcttattattccaattcctgttttttacttgctacagatctaccaagggctattttgaatccgatttgtttacacactcttattgtttgtctcttgctttattatatctacacatttgattcttgtttcctgtactgtatgtactccttgtctagttaattggttgtcttaaaattgtttgtcctcctttcagaaccaaagggcaatgctaaaaacgtgtgttcgtgttttctgaaacctcagattcgatttggattcctttgttttttattttatttttttatttctcattgatctctgtgttctcaacagctgaggtttatgtacacttgcaaatttattaagatcctgtgataaagtctcatttataaatacataagaaaacaaatgctctttttattaactagtgatatcgaatttgtagtcttttaatttcagctaagagtatcctgggtttattcaataagtggtctcaaatttgtattcaggataagcaactatgttaaggagagttttgttattcataataatgttattctcaaatagtattgtctcctcgtgcttctaggaggatactattgggcataccaataaaatcaatatgaatctcttgtagtgaaaggttctttcttttggattggtggatttggatgtgtttttcccctttttttctttctttttctcttttttaaaaaaactcttgttagattcatttctttataaacgcatctagtggctacttttgctccggatttttgtgcaagaggacaattgataccttgtagttttcaattgagtggtgttaatatgacttcatctatgcctggatttaattcaataggggcaaaggtttatttatttatttaaaacatttctcacttagttcttttctgtagtttcttacttgctttgttttacatcacaatcttttgtggactttctggaaacactggaaggtggagttttgttagatggtagttccttgctatatttttagattatagtgcttacaaccatttagtatgctttcatgtccaagtgatatctgtaaaaggaatagtgatttgtttttgttaacccagcagattgaacatttttcaattgaagtctcgttccccaattgaataatcaatttttctaaatactttgctacttttttccgtctccagtttgattcattcagctgatatggagttaaagaaaatgaaagtttcagatggctaaggcttggcaagttctatggcctactctagtatgaatttacattttttgctaatgaatattattggtaaatttttatttttaactttaataacttttttccttaatttatagatacttgggcaatgtgtgagggaaaataaaactctggaagcttaagatataatttgcagaaaggcagtaagagggattattgtaggagcataacttctgttatggaatttgaatcagattggataaagcacagaaagtcatcttcttataccgctcatgttattcgttctgcgacatcttttataccttggtcttgtagaatcccaattggtgaagggtatcatgaatttctttaattagttgtactcactacttagtaagacattttcacattgtttggttgattggtcgtgacttgccaacgaaatttctctacatcttcgttgtacatcatatgtgtgattgctaatttgaaaaatacctggttttgtggctgaaaagaagagattcacagagccaaatatgtgttttaccaatttggccaaccatgataaaccaactcttacaaaaaacactcattgcttgaggtccgagtttctggatgatgatgatggtagtagccccatcctacctgggctgcctgatgatgtttcaaagcaatgccttgcactcgtgcctcgttcgaacttcccggccatgggtggtgtctgtaagagatggaggtgctttattcgaagcaaagaatttataaccgtgcgaaagttggctgggatgcatgaggaatggctctatatcttgatagcaggtagtgaaggaaaagggagccattgggaggtcatggattgcctcggtcataatcgtcgatctcttccaccaatgcctggtccagcaaaggctggctttggggtagtggttcttaatggaaagctccttgttatggctggttattcatcaattgatggaactgcatctgtctcagcagaggtttaccaatatgattaccaatatgattcttgccttaacaggtatgcttttcggctgtaaatttacctggatgccgtaggaacttattacacttgatatgataattcctgcattataattgagttaatggaggatcattttttccctgtatatttttgtatgggaaaaaatgatcctactgccagttctcttgtttattatagtttatccatttctgggatgtgttgattttagaaattaggactgaggtgcctgtatgtctatgcttagaagtctttctggtaaaaggttttaacttttctaacatgtgtttttttctatatctgtttcactcaaaacagtagaaagtgggaaataaagactataaagcttggatggaatggcttgacacaaattgagttgtttattgtatgattttaatttcccagttatgtaaatgttaaaatggttttcaagattaaaaaaatcattgtccacgttgttacatgaattctaaaacatgaagtatgcttgatcagcatcagcctcacttttgtagtgtgctttacacctgtatttatttgcttacgctccttgtataaatcactgtgtaatcgataaagttgcatcactttctctatgatgaccttttattattgatctagctatatattctgagttaccatgacatgtcacctttattgcaaggaaccatcttagcacagtgctattattaaactttgtaattgcaattgcagctggagcagattgtcaagcatgaatgtggctcggtatgactttgcttgtgctgaagttaatggcttggtttatgcagttggaggctgaagcacaactggcgacagcctctccagtgcagagatatatgatccggataccgacaagtggacgccgatagagagccttcgtcgcccaagatggggttgctttgcctgtggatttgaggggaagctctatgtcatgggtggaaggtcaagcttcacaattggaaactccaagtttgttgatgtctacaacccagagaagcacgggtggtgtgagatgaaaaatgggtgtgtgatggtcactgctcatgcagtgctggaaaagaagttgttctgtatggagtggaagaaccagcggaagttagcaatattcaatccagaggacaattcatggaaaatggtaccagtccctttgacagcgagttcaagcataggtttttggttcgggctattagatggtaagttgttgctgttctcactggaggaagagcattcttataagactttgttgtatgatccaaatgcagcaccaggatctgagtggcagacttctgatataaggccatctggtttgtgcttatgcagtgtaactattaaggcctgaaaagttggctgcttccgaatttagaaaccttgagagagctaaggattttgttgttttactaggattttgaatagtagtaattttgaaagtgactcgatgttaatttagtgtttttgcttgttcttgttagttttatcatgtcatgtcatgccatgtctctgatttatggttggattatttctacaattattcatgtaaccatcgactttgaccaagcactacaaattatggtgggcgagtttctttttctttttcatcttccttattttgtgttctcttggtaatattagaaagtgctaattggtaaggttggtaggataacattgacaaataaatgtgtcctttttaagtaggtggtcagagttcaattttctgactcgtatttatggaaaaagtatttgttggaaaaattattattttttatttaacttccattcctttgcaaggaaaaaaaaaatcatgtaatatttttttttaatcaaaacgcactcacaaagtttgaaaattgtatattattcaagacttaaatgtgtatctaatctatgttagtttattttaaaaaataattatttattaattttatgaaagatttttgaaaaaataatggatagatgatttataatccctttgtaaatccttgttcttggaatagggagagcttaccctcatttaaaacttttatgttccaaaaaacacttatataattgatatttgtagaaaatggatgttcatctggcccgtgtctatagtttttttttttcttctaataaataatattgaaaattctgtgtacatcatgagtattgatactgagcacttgatataatagatgaaagtggcttgctcgatataccttggtaagaatggcacatgatttatattaagggaaatgacagagttttgaaatgtagaagaaaaatggtaatgaacagtatgaatctttcacaaaagaaaatgatcatgggaaagttataacttataatggaggactgagcagatctgtcgatatgcttttgtgatatttaagataatataaggcgggctaggtgctgttacgaaaattacttttccaaatgaagtaactttggatgatagtcacttacactgatatttaatattttgttgatctgctgtatccagtagtaaaaaatatttgattagaagaaaaaaaaaatgatatagaaaattcttgaaataatatgcgataaacaatgaaatccttgaggaggtgcaaattttgaattcagcaactcttaattcttgacataatgtaatccatgaggaggtgaaaattatgattgcagaacactttctcctagtactaccggtaccagaaatacgagaacattctcttacactcttacttacaatgaggtcatttagtgagcaacaagaaatagcttagcagcccgagaagtattgaagtgttacactaccttgattcttgctgctctcttgagcatgtattagaatttgttgctgaaagagtagaagacttcttgggatgtattaaaaaaaatggacgtaatgaatatgaatatattttatttatattctctttcaacgatgtagtattatttaagcgtttcaaagtctccttttagcccataattaattcatacatgcctgattcacattggcttacagatccaagatgaagccattgtttcagatgcacagagattatgcataatccaaagcaatgtcaaacggtctagctcttcccctgctttgccaaagtgctactgattttaattttcatcatgcttgaccatgattttttaggggaccaaaatagtaaaatatatttcatttactaaaatttaaaataatataattatataactttttgttaaaacataattatataactcaaaacaaaaaaagagagaagaaagtaataaaaaatatcaacacatgttatactaatctaacaaataaaaggtatttcaatttaacataagagacaataaaaaatatacattagtaaaaaggattatgacttaagttttgaatccactattgtcgatcaaaatacatagtcaacattataaaaaaattaataattaatatttgtcgataaaaaaattgacaacccacattttgtagaataatacttaaaacaagcattaacataaatgcataaaacttaacaaaatacaattattattattacatttaaatatatatattatataaagtttaattacttatttgattcttatagttatataaattttatcttttagtttttatacttaaaaaccatctcttttaatccttatgttagttttcattatgagtttagacgatagggattaaaaggaatataaaatgatcagattaaaaaggattaaaaataatatgtgtaaggattaaaatacatgatttaaagtgtaagaattaaggtaaaattttgtataattataaaaatcaaatgagtaattaaactttaatataatactattatatgaaaaattttgtttttaagaaaaattttgagggccaattatctatgcctatataatggatatatgtcttttaaaaaaaattagagggaatctcttcgccctcaaataacttaagtaaaaattatgtcatttgtgtatgcataatcaactattacttaagtaggagataatgggttgatttggtggtgaaggagaaaagaaaaagagatagattgtaggtttgaatttctcactaacaaaaattaacaaattattgactaatatttgttgataaataaaaaaactctcgataagtaagcaacatgtcacgtagatatacagttcttgtttgagttgggactattagatttatattctcaattcctcacgcgaattgtttgggatagggctactaaatttatattcttaatttcctgcgtgaatattggcaagaattgattaaaattttagcatagactcatgaacacacacctttggctaatttgattcaatggaaagataaatcagtgactctttccattatgcaaacaagattgattggactagtcaacttttccacaagttatattttacttatggagtgttcttaattacctcggcaaatttagttaaataactttaacgaaagtctattaattcaagacttttttggaaatttaatactttcaaatacatccagtaatcgcgaattaagctttcaagtaacaaaaatagttatttagcctttatctgttcttcctatccctgttatttttggagtgaacgagtatctaaaagaaaaaaaagtaaatagtatttaagatttgaagttacgtgaaggtgacctcctccccaaaggtgactaaacatggcaataggtactcagtaggcccataacccataaatgcaatgcaatcattttcaagcccaaataaaaccaacaatccaaatcaaattgtcatagtgcttgcacgccaaaatcaggaaatttcagtgcgtcaattcactcaccaaaaactctgaccagcagcagtcgttaaaacaaaataatatttgttcgttcctcttagccgctattgccttcaattcaaccatttgcatcacaggcacacactggaccgaacaaaaaccatttgatcaatttatataaattataagttaaactaaacttaacacttaccaacagaaacaacaaacacaattcagcttctcctcctaggaaacgctgctgacatggctttcgggtcttccgaggatgtctcaggtgtcaaattgcttgtccttctggctgtcatgtacggactcttgtcggcgctgacatactccgtcatccacatgaagttcgtgaaccctctcgggaacgacgcgccgctcgatcgattctccgaagccagaaccgtacaacacgttcgaatgttgtcgcaagagatcgacggtcgtcaagtgagccatttttttgttttttaatttcgaaatgtgaaacttgatcatggtatttgcgtttttaattgtatattgtttacaattagggatcttaactgtgtgacatgatgatgtcaatcgctttcgaacaggtggaatctgatagcgcttttttcatcgccatcggtgttatgaactgagaaatgttattcgtacaataacttttaaatattttatatagcaattttaagtagaagaaaaaatagaacatacactgacactgtaaatccaattacaaactagtatcaaatatggtaagtttactgataactaatttaaaatagttgtcagtgtaaaaacttttagtctaacagtatatactcgctaaactcttatttttatctcttttgtcacattatttgttacatctcatatttctctcttaatcacagataatatttctcttatgaatctggcatgcttttgtgaattgacttatggtgcatttattattaggaagggcgtcctggattgaaaaaggcagcaaaatatattaagggtcagttggaagtaataaaggagcgagctagctccaatgtcaggttgcaatactttattattattattattattattatttgtcacacacttctttttctcatttgcctttttggcccacttatttatttaacacacactttttagtgtatgtttattatttttttttctttctcggagtctgattttattttatttccaatattttatttgcagaattgagattgaggagacaactgtgagtggctccttcaatatgttgtttttgggccataacatagctctgggatacagaaatcacactaatattcttatgaggtaccttggctgttcaatataatcatttgtattagattcagttatgttattaggatttataaataatattcttcagcaatagattacaccctatagttaagcaattttcacatttcatacatgaacttccttgttttaagcctgcagtttgtccattgcttactttttaaggaaaatatcaccactaaagatgcaaacttaatatatgttagggcaatgtattccataattcaagtattatctaaattcagcccatagttgataggtcaccagtcaccactttgttatccaaactgaccaacaaagtgatacatttgctaggattcaactactgaattgagtataaaccagacataaaataaaggtatggatgccttgtcaaagaccaatgcatgcaactaaatgtccacaatataggaagggcattctggagtggccagaactcatgctagaattgcagcataatttcattggaaagggataaggaaagatgttccgcaatttgtaagcaaatgtttcacatactagcaagctaaatttagtaacatgaaagcaataatgtaatttcaaccttttccaatatccaattacatgtagaggacatagagacatggatttttaactggcctacaactatcagtctaacactacactaggatgcactgtcctgttaatatttatcgatcatttgtctaagtaaggccactttgcagtcagaataactaactattcaaggttgccaattgcagaacagttcattcacaatgggcagtttattgaatcattttctttctggttgtggcttattaaacattaaagatattgctgtgttttttacttgtaccacactgagtgctatcttactctgttttttctcacaccagtttaaatttttctatggaattttgcatattcctccagcaaattcaaagttgtattagtatcattctgtttcccttcttacatttactcccacccttcctcttattttcagttccctgctgtgatgttaatttctagcaaagaaagacataattaggaacaccatacttgaagtgtgtttaactcacatgcactacatgtgttataacttataactggcattaatcatgaaccaaagttaagggttaagtgacacagagaattgaaagggctatttgagaagggtgaaactacatgggagataaagtgtaattatccctttgtctgaattacatccctgaaagttggttaacattgaaactgttaacaagtgtttggttttttaggtgggatttcatgtgaccctttttttaactgttttgtcataatgttgaaaaaaatacctcataattataaattagaagtgttaagatgtctcacactgactaggaataaggctagaatacttcttataaggcttgggcaatcctcacccttgagttggtttttggtgtgagcagagttgtcaatagcagtgtagcggccaagggctgcaataagcactgccaaagcatcacacttcaaaattttaaaatagcagtcatcccactatgcgctatactgctatcgtgttcttaaggtcagccgctgcatgctgctatctttgacctgtaacaatggatttgagttaacatgtcctgctacattagctagtaatatgggcagaatactccttataaggcataagcaatcttctccccttgacttagcttttggggttgagttaggcctagttcatttctaataagaagtaataggatccaacaaggtaaaagagggtgagaaaaaaagttattagataagcttgcttctataatctgagataatcctatcaatggggtcacttgctagtaacttacaacaacactgtaagaatcatacagttatctaatagttttaaatataaacaatgttcagagggttaattgaaaagaaaacagagctttataaatgtaatgcaaaatttgaatgaagtacatggggtggtggtaatctggatttacccttcttgcaataaacaatgttttttgatgcaatctctctctgtctgtttactttttaaaaaaaaaaattgttgcaaatgatatttgtcctaacatgtgcacacgtcgcccagaaaagtgatatataccatttcttaactttagagtgggagtgaacataaggtgggaactaacatgacactcttaatataaattaagaaggctccttgaagaagggttttgcaaagactgataaaaaattgtgttctcattagtagataatgatatgcaatctaaaggtctttgaaatatggacatttggatataatgatttgttattgaacatattatgtcaaaagtcaagactatagtgaatcattattgtaccttgagtggctacacatattttctgtacatcatgtaaacaacaaagtttgacatatctgtcttagtttaaggaatgttgactgcatttcatttttattttactataggatatcatctgtggattccaaagagactgatgcatccgttttagtgaatgggcattttgatagtccccttggttcccctggtgctggtgactgtggttcatgtgttggtgagtagtggctacatttgatgtcgtctttgaatttaagagattattatatttgggaaatctaccttgtcaccttgagcattctaaatcttattgttcatctgatttccccacttttcagcatctatgctggaaattgcaagactaattgtcgactctggttgggctccctaccgcccggttattttcctttttaatggtgctgaggaactttttatgttggtaggatgttgtctatggaagatgaatggttattcatgaatggattttaccatgatgaaactaatgaggtattgtttgcttttgatgcttaagggttcacatggattcatgaagatgcacaaatggcatgacactataggagcttttataaatgtggaggcatctgggactggagggcctggtaaatgtgaagcaaaatttctattattagtagtaggataataagctaatcttcaatatctcagtccatcacttatgatgtgtgctatacaggacattttcactgaataatgttgctaaaattaacagatttagtttgccaatctggacccagttcttggccttctaatgtctatgcagaagcagcaatataccctatggctaatagtgcagcccaggttttgtttctcttttaacctccctatatctataatactctactgtgttgcttagccattgttttcccctttttatttactaattcaaacatgaattttctaatttaacatacaggatgtttttcctgttattcctggagatacagattaccgaatattttcccaagactatgggaatattcctgggcttgacattatctttctacttggtggttatttttaccatacctcctctgatacagtagagagactattgtatgtatccttgtgcttggtttggtacaagatatttgattgaaattgcaaatgtgtttgatgtattactctgtctcagacctggaagcatccaagcacgtggagagaatttgttcagcataatcaagacttttactaattctgctaagctacaaaacacctataaaacaaattctagtgaagttacagctagcacattcaacgatgagcgggctgtattttttgattatttctcatggtttatggtatgcactgaagttggtagattcctgcttttgctaatgatctgatactcctagcaatatgatcttcataattgggccatctttctctttgttgtcttatatataaattatggattttcagatattttatcctagatgggtagctaaaattcttcacagtattcctgtcttcttctttcttgttatgcccttcatgcatggtaggtcacattcttggtcagcagcattgtgtgattttataaaaggtaaattagtacatgcttactttcatttacttctttgtaagatgtttctaattgatctccttgttaatcactttaattttttcccataatctccataatctatattctaggagatttttttggcagttatcctagaataatttaaatattatttgtagacactttgaataatattttgtaatttgttggacttgcaggatttttgttccatgctgttgggattatattggccgttgttgttcctgttgcattttctatgctgagattactgttttcttctcagacaatgaattggtatgttcatttaacgttaactttaggcttcttgtagttagtgacagatttttttcttgtttaactttggtttcttgtagttagtgccagaatttttctttcttaatcaaattatacagtgggagaacaaagtatgataagtgccttttttttgtggccattgaagtatctgaggtgtaataatttaaaatcttaatgcattttctgtgatcatgtgttaacataattgatgaaacccaggtttgctcatccatacttggctttcgcaatgtttataccttgtgcacttgttggacttttaattccaagaattatctggagaaactttcctctttctcaagatatttccattgtcaagacatcgaaagaggtattgcagcacatattgaaatgggtttaacaagtctattgtgatccatgtttcatagtttttttttttttttttgatgaaatgattcattaataaacatttactttattgtttgggtctcaagctttacttagcaaatcttaagttgcttttgaagagtacgagttttatatcttggttcttctagttatcaaatgaaatttattgtccgatagaaaggcttaaaacttccaacaacagtgtctacaaaatcagcatacctactttggcttgtgctgccttcatgcgtgatctttataaatatgattgtgtggtcttgtgaatttgaacatattcttcatgagtgattccattttgtcttgttgttgcgagtctgaactttttgatttgacacataattgccaggcgctatctgatgaagcaaggttctggggagcatttgggttctatgccgtattaactttggtgtgcagatttaataaatagtcatgcaccaacacacatgcacatacacatatatatacacacacagcatgatttaatgtattctctttaatacttttgtgtggctaaacaactttagtaaaagcaggcttatcttgtagctgggttgagtggaggctttgtgactttttttgtgtgtgcttccctgcttcctgcatggatatccttctgcttgtcagtcaaatactttggacaacagtcactcaggttggttgtgaattcttatgtaattgtaatcattgtatttactattttcgtacaaataattgtgtgtcttgcttcatcttcggtcgtactgccactaatgtcattgactcccttcacattatgatagatttgtcttgcgtgtttgctgtttttatatgcacgctattatttaatctattttcattttgcatctgctattcatctccataatttttttttactctccaggtcaacaatgttttacatactacctctagttccatgccttgcgtattctgtttattttggtggctttcttacccagtttctgatagagaagatgggaatgatgggttctcttccactaccatatggttagtttatatatacacactccagtaattaaatatatgcatagtagattggccagtaattaaattaacttataatagagtggtttttaaggcctgggatgataactggaccattgtgatggaatcactaagctttatgctactgcatttgaataagtacatttataagtttatttatttaaaatcaaatgaaatgtatgtatgggattatctcgcttgaggtttcctttattgtaactcatcactttgtatcatgctagcaatttcataatggtcaaaatgcttgtggctgaccataacttcttcttgcagggcactatgttcccgatgttattgtggctgcattaattggaattgtaactggttggtgcacaggccctctaatgcccatatgtgggcattggttagccaggtcatccatcttgcaatttctgctacatcttagtgtgtttgctttggcattatcatctcagttctttccttacactatgtctgcacccaagaggattgtttttcagcatactttcctaactgcaggtattgattatcagaaatggcagtatggtggcaattataattttcttgatactctctgaagtaatcaattaatctagtgtctataattgcttatataagatcctcttatttgttttcttttccattatcattgtagtaccccaaatatcacctttttccccctctttgatctaatttctaacatttttcctatggtttggcaggctcaagtcagattatggaatccacttatgatttttctgtaactgactccaattctttactattccttttcaaacattcacctagagtggcaaaggaattgaatattacttcagagttttcatttgaatccacatcattgtctaaacgcaatgattggatggtaagttgcatgctgatataactatatgaatctttttctcacaggcagtttttcatctcactcaaataaaatgggaaagagtgaaataatatttttgtccacgtttattggttgttctttaattaatgaagttcaaggttgagtcagactcttcagtagttgcaaaatttcaagttggtgatctagctggtctgtttatttgttcagtagttgccatatttgtttatattacatgtattaaccacttttagatatactgttgttatcatataaattcattagtacaaaaacaactgtttttttttaatatatttaggcttgtgatttcatgaaattaactttctctttgcaggcaatttttccagtttcttttctcttctcaaatagtctcaagttccctgcaaaaagggatgatattttgaaacagtatgaattctttcccaaattgtctgttcaaaatccatctttaaatcccgaaaagggacccagaagagttcacttggagctttatttagggtgagtggatcatggtaccagcatagttaatttacagagttaaaaatgcatggtgtgatttcttgtttttaataccttggcctagtgtggaaatcttgattatactaattgtttagttgcataaaacctttttccatgttggtatcatactataacagtcaaggcgtgagaattagtgcaggggtcacaaattgtgatggtagttggactagtagtctgatttttttcaacttggttgatcttgtctccataaagtattttattatttcaatcattgtgaatttttgtctataaaaaaataactttcatctgacagtttttagctgcaatttgttttcgttggtctgaaatctgtttgacaccaaggtggtgatctgaaaaaagttgaaagaaaatgaaatcttaaaatacctaactttttactttgttttcatgtacaattattttcatttcagttccttggaagaggtttgggttgcggttctcaacatcactggtcctttatcaagttggtcatttgcagataatttgcttccaggtatgaaaattgtttcctccacttagttaggcgcaaactcaattctaagatagtattaaaatctatcccagtggttattggtggtcctatgagacctgttattgaatcattatcagatcacctacaaatatttaatcttacaaacttcatacttcagatgtctaattctcagcatgaggagggtatattggaaatcccatattgactagtatgtggccaaaatagtgtatataacttaccttataaattagcttttggggttttgttaagctgactcagatgtctaatcctcgacatgagtaggttaggttgaaaatcccatattaactagtgatgtagtcaaaatagtgtatcattgtatataacttatctcatgagttagcattttgggttgagttaagttaaactcaaaattctaaggggggtgattaaatgttttcattgcctaatgtagcctgcatttgcacaggaaccgaaacctatggtggtggtccacaatcatatatatgtcgtctcagtggacctagcgatgggaattggaccttctggttagaggtaaaatttgatgctgtattaaacttctctttactataacagcgtaattttattttgtttgataatgtcaggctaacagctctgaagcattaagagtggacctagcggttttagaccaaaagttggttgatccagtaaagagattgaagaatctttttccagactgggttgatgttgttgcatattctagttttatgtctagctatatcttctaattctttatgtaaacatttttagaagaaagagcaaacatggcatttatagatgcaaaaccaaaaccaaaatttgatactagatctggactgtcacaaatacgtctttcctgaatttggcttttttggggggaaaaaattaggagaagctatccctattacaggctgcagaatgcaaagtcatagggaatgcttatagtttatcaagaataaaataaaaataatttttttgctgaagcttaagagttaaaccaatgggttgcaaccgaaatgctcttttggtgctgaacaataattgaaaatcaatgtttcgaaattcatccattcccaattaacgacagtcaagcttcctggtacgtaagaaggcttaacttctaaattaatctcttttgtctgcgtttgttcatcttaagtttgattcgttgtgagttctgcagcatttgttgttcagtgtaacagaacctctttattagttataaacttcatcgttgaagattggtggtttggcctcattcaaaacttttacgtagccgaaaacaattgtattaatagatattttgcagaaaatggatgttcattaggcctatatctttttcattttgttttacttttaaataatattgaaatctcatgcaaatcatgagcatttatagtaaggcaaaggactcagtttttaaacaaataaatggaaagtattgatctttgacaaaagaaaatgataatgggaagttacaatggactattgagcagatatgtcgattttgtaatatttaggataagttaaggggggctaggtgcaattacgaaaattaaatttcagatgaagtttaatttgggtgatagtccggcttttacacttggacaccctatatactctttttttccgggaatatatttatggactagcttgtggtcatgggtccatttttgtagaaaatgtcggttataataataaatttagtttactatttaatattttgttgatctgtatccactagtcaatatttgattaaacaacaacgttacatgcactcttactgcgttggtattcatggacgaaaaatgagaaggaagcaaggaatgtttttcgcaaatagactctccaccaagctgtgtttatcctaaatatttccatatgcttctgccatgattaatactacaagcgttgtccaaccagtaaatggatgtgccccttttcccttacccttcgtctgttcgtactgttcccacaaaaatcccgtatgttgataattgcgcactatatttctgcagtaaagagaaaatatattatctaaaaaaacaaccaataactttaaacaggatttcaatcgaactgaatacagtcgacaatacctaattaaattgcttctcaattcttcgtagatggttttagctttctcttgatatggcccattctctacaagattcaacccaaagattagtttcaggaagaggaaggtataaaatatagtgggaatattagcagatattttgccttggccagtccatattacctttggagtaatggtggagcgctgaaagaattctgtaattcatgtttatccaaattggacctctccagtatggagggtcatgctctgtgttgtgtttcatgtacaaggaactgtgtaataagaaatattatttttggttcactataatcaacatatgctgaataatgtcgttcaattatatccattaaaaaatgcattagagcatagggtgcaccttgttttggcaagagaacgtaatccatagttggtccataagaggctgcgatttgaaatgagttcaagctgcttttccagaatccgtgatccctgaatgaaacagaaaataaacatctatgaactgaaatcattcaagcaacgaataaattcttagttcattgcataaaaagacatgttaatgagaattaatgcacatcacttacagatggaatgatcctccccatgaacgggaataaactaacataaccaatgtgaggaaccaatctcaatacaggcatatccataacattccggagaagttggcgagtagcataattttgtgctgcctcaggttctttccatttaagttgaacctatcatggttatgtaaagaaaatctcattcttggtcatgaatagggaacccatgtattggtaatcttgcaacagtatgcataaataatactaaatacaaataactatatactctaccttctctgtatgatttccaaaatcaaagtaagcaccatatgcatcatcaaaatgcatctgtatggacatcaagaacaaattaggcatacacactattattgtagcaaataactattaaaagtcaactgcatagtttgctttcaattttctttttattaaaaatcatttaaaaacaaaaggaaacttagattatcattattttctccatgtcaaacaccatatgttatccatgataaacacatagaatcttccatggaacaattgctgccaatagataggaaaaatagttggaaatttcaattgtcaagagaaaacttgaaaaaaagattccatgttaatgcagtgtgttcataatcaaaggtttttatatataaaagatgttcacattcttcaataattccataataataaacttggagaaggcctagatgagtatcccccacaaggatgagcctcattttctatgaaaagtcaagaaaaaagaaaaacccaggaatgtgtgaaagttttctaaatataaaaagttttctttcccataaaacagtaatttgttttccatgtttaaaattcaacttattctataactgtatgtgctaagaaagttttcttttctcttaattccccctttttatttctctcctctttatcttcactattttgctcctgttccagtgctgcatcaccaagcagggatgcaccaccaccacaattacaaggtgtgcaacagctctaaataaagggagatgaggagcaaaggtgcaatacctggttcagtaactcaaaatccaatagcaatttagcagtagaaccataatcctgcattatttcattcaatatgtcaattaaataaggggattaatctgctgccaacaattaccgtactagtaatttatttttcaaattataccatgccaggtttgatttccatatccaacaactcttgaatggaatgcatacagtctgctgcaagtaacatccaacatctaagatccaagtggcgttcatcttcacttgggtgtgaagctcgtggataatcatccaaaccagaggacagtgtctgaaaatgccagagataatgtttgttaggagcaagggtcatcatcagggataaggaaagctttgtcaaaattgaccaacataaacaccgcaactgtgttatgtgatcctaggatgtaatagatcaaagaacaactaactacaagtgagaattctggattcaaactcattcagtgctcatgtttatggctttctagtttctagtagcaacagagaaagccatccaatagactcattttattttcaggaaaaaaatgtgtcctattgtattctttgagtaccatcaaagatatggaacaccaacagcctacaaattatcaaatatgtaggaggcgggcgaatttcttcgtatattttattgtatttggcaagaaatctagagcaactgtgtttgcatctctatgcttaattaggattttggtctctgttgtagtagctatttatcaatgaatgtggttgccttaacattaacttcttataaaaccatgacaataatggtaaagtcaatctgctgaaatacctatatagtatatagttcagattaaaattgtagataagtgctgaaattaaaaagtatactggggatgcatattagaaccttaggatttatttcacgcattgtcctattgtcccgtccgtgccaatagtagctgcccatctgtttccctttattaaaaagtgatgataacaatgataataaaagggtcaaaacaaagcaacctatttctagtgatcaagcagacagcacgtgcaatagtatatacctgactgagttgtattgaaccaatggaaccatgcttccaatcgaacaaaggcacgttccaggaatagagagatctcacttctatccattgcagtaaactcattattcttcaagccattaattatatctacagaaacagatttttaacctaattcaaaatcaccaaattaatgtttcacatacgtctgatataaagtgatatttatagatataataatgtacttcataaaaattgtcactttccataaatttattactcagaatcatctaatgtatcatcaaatccagatcagttatgcataattcctaatttaaatgaagaatgtgcaaaaggagttacatggatatgctaccacagaagaggtaaaaaataaccaagcaggaagttgttaattatcatccctcaatgaaagggaaaacctgtcacatgcagcctggggtcctggactcaaggctcaagctatggcttgcttgaagtaaattattgtaacctatttataacaaggagaaatagaaaaggaacattagcatataccattcaatgctaaaaacagagttggaggatttccattagttggatgctgaggaacaaattcctctgggacccgactgcaagtacagaagaacctatatgtcaataggaaagctaaaaactttaaatttactgcaattatttgaacaaaatgtttagtaatacacctcagtgcttcagcccccaaaatttgttcacgcggtatccatccatcaacattcatcaaatccaaccaatgcccaatgatatccaatgaaatatgaatatcccaacgcctggttaatgtgcacaagtgcaaataaagcatatgtatacatcaagagttatttatttgttaattaatacaggtaagtcttgtgcattcaacgacaacaacaataataacaatactagtggtggtggtcatgaaggatattactaaaacaaaaaaactaaccagattataagttgatgaaaaccttcatcccataaaaatcctcttggaaagaaagatcgacttggtacagctgtgtaaagctcagcagaccaatacgacatataattgacatgttctctaagctgcaaaggaaaccaacccactgcatatctatccaagtctaaattgctgacagctaattaaaagtacaaaagttggcaatatcaagatgtaaaaaggaaaacaaaagtcactgacagcaattaattgaagagtaccaaattacactgttagggagagaaatatatgaggaaatgaggcaaacagaaaattaatacaaacctagctactgacacaggatttgttttcaagcctaaaaagatagacaaatgcttcacaacatcaaatctaattaaacttctatgatgaaccagagtgtgaccacctatcaagaagaaattttacaaaatggtggttctacacaaggcaatggttgtgcttaagaatattgccttcgctagcaaaatgattgtagtggtttcctttagagtcagattctcaattccctagcaaagggtaggattcaaaggaatggggaatgagaagcatacagtcaatgtaactcacaaatccttgaatacttatgttatgaagttacgcttctttcatttctttgtttttcttccgatgtggagatcgttcttgctacagaatttcagaggattccagctggggatcacccatttcctatttctttgctttctactttttttataaagcaaaccattttcctatttcttatcccagtcaactactgatgcaggagctttttcagattcaaatttcttattggtttaagtcttctaattctaaatccattgatagttacaaggatttaaactttagactaaatatttccacttcactcaatctctggttgttcaaaaaaatattattttattccatttgaagtctaagatccactctaaggattaatatcacacacatgatcaaaatctctcctattgaatcacatgtccggcagttagatatttgtggtgtaagctttgataatattggtgaattgtgaatttgtacaaagagcttagaacattttctccaattagagggttctaggagaagggatatgaagggcaaggcaacttggcagtataaaatgttcactgttaataggtgattatggttagtgagagatgcgagaaatgcaaggttacatttttttttatattggttttacaataaaatagttttactctttttagcaacttcacagtgttcagataatatttatttcaaagtcaaatctttattgatctgcagcatgatttgctagttaattagcttgtctaggttttcagtaagcattaattcatttatggatgcaactgaagaaatttttaatttagccagaatcctctttattggttagcaatcctctgttctcgtacttctttttctcatctctaaaatctcctctttaccaacagaaaatacaacacaagaaacaaagctttcacatttatgataatcacatgtcaagttatgcactattaaggggtggtatacacttcaataaggactataaaaaacaaaataaggtaacttacattaaggattcttgaaagagcaatctttgactggccatagaagtacccgatgccacctaataagtttccaacagcagccttaccaacagataaggcttcggaatccacctggaaatccactactatgataaagaatttatatccatcaaggataagcttctaaacaaatttactcaagcaaatgaaatttgagagatccaggacacatcaaaagacaaaacaagaagaataagggttgttttggtaaagaacttaatttaagggcttcttgaataagtatttatcatgtaagcacttgtatagtttttataatcaaagaggaaataggtttaaactattttcatataagttgtaaggttgctttcatgatattttggagaagttactgaaataagctaaaataacttatgaagataacacaagttgttttcgtaagctttccgaaacacttacactgctatatcataagataagtccaagtaagtaataagttcttccaaacacaccctaagtaattgaatttgagagaataaaataaaaaagaagaagacaaaggacaataaaattagtaccttcttggccaaattgaaaatcttctcaaacttctcatcaaattcttgttctttatatttcagtttattggacagtgaggtacctaacaatgagcaaaataacaaataaacaattacacactagcatgtagcatcctaatgccaattagaataaaataatctgtacaaattcggcagttctctttaaaatatataatatttaatattcaaacaagaaaacatcctaagagaaagagacaaaccaaaagccttttttttttggtcagcaaaaataatatatatatatatatatatatatatatatatatatatatatatttaaagagaagaaagaaacagtacaagtagaaaaaagacaaaaaggatccaagcaaacaggacctatggcagcctaattcatgagaaaaggcatgaattaaactgccagaagtctggctagatcgaaagaaaaccctcaaaacaggagaagacttatacattaagtcctcccctgattaaaaaaaatgtcacccagattacaagaccaaacatgaaaaagaatattgaatcctttttctaaaattttaatccacatccagcaggtaaatatggcttcttccataagcaagtttataaaccccaacaatgtacatcaatatgagaagcaagtttccaaagcaatgaccaactcgacaactcctacaacaatgtaaaggactagattttttcctcctttttgatgagagcatgcatatatacatgtcagattttgtacaaacattataaagaagcagagaaaaacctgtaagcatactaacacgctcttcttccctagaagtttccaaatcagttccagagattagtacaatatctgttgtgaaaggaaatccaccaataatctgcagcacaaataaaaaaattgagaagcacatatgaagtgaaaccgtaaggaaagatgttttcaagagtagttggaaagtggttgtgtgtgtgagtgagtaagacaaagagactcaaagattaaaaatgttaaacgggtattacaaagtgtacatggtctatttacctgaaaaactaacacatttggagaatcatctaatgagtcagatagctgcagtcgagcatgcttttgtatctactaaaacatgtacataaagcaaagatatcaagggaaaaccccaaaaaaaaaaacaaaaatccataaccacattcttgcattacatgaaaattatatatcatcggataaattgaattgaactgaaataccctaacctacttgtgatgcaagattttcctctacgagatcagacaaattgtgaaagtgaggtgtgcgaaatccagcataatgcagctgcaaatcatcctgaaaattattaagcataagaaaatgaatagcaggttaccaccaggcataatattacagataatcaagagataaaaatttctacattaaggcaagagaggaatgatttaaatgggttatttatcgatgaaaggaaaaaggaggactgggaattttatcaaggtagttaaaatattaaataatggcatatacatgtttgctataaaatggggacacttattggtttatcatattcttaaactatttcaaagactgaaacaggaattgtgggtgcttctttaaggaagtgtaagtcaatcacaagcagtaaaccataaaatctataaaaaaaaaaaaaatgtccaatggtagtacaagtaacagaatcttgaatgttcaatcattaccgttgatttcaaatgtagctgccaatctccaatatctgctcgagagccagatgcaagcaaagaatccacgtgaatgttcaagttttctctaattacatctagagcattaccagcttcatcagccaaatagaaaaagagctgggcacctctcccaaattcctcattcctcttggatctgaggttcgaccacaagaacaaagacactcaatagatgaaagtcactgaatagagctattctaagaaatgtagactcataaagggaaacaataagaaagatccacaggaaaattaagtattacttattatgttatgttataattaattcaggaaataagtcaatccaaaagctaacttaaaattaacaagggtgccatgagaatctctaacttcaacaaactggctagcatctacttagcaataaagaaaaactacaaaaaaaattattctgtcgcaatacatatatgaaagtgatttgaagttgataacatcactcacttatccatttgcacattaattcgaaccgcccaatctccaccataaccactgccttcctcttttgattttaaaaacccagtagtcaaggtcaggccatggtcaaccagcacttgatgtccaaaatcacgtccattgtgccttgtccaaccataagtacctaggtcatcctcatgtctgcaaaaatgccgcaagtgatatttgccatccttcacaccaatccacattaatccagccatcaaagattttggagtcctgaaatagaaataccacccaaaaaaaaagtgagaatgcttgcatgctgagtcaaatatcgtcgacatccgtatcctaaacacaatctatgccaaaatttgggcacaccagtttctgtgtgatgcacaatttgcatgcataaataattcaaattactcacaactcgaaatatatacaaaccctgcaccatcaacaacagtataaggctataagccttaaccaccaaaatagtctcttacttcataattccatttcagcgcaaacaaaacaaagctgagtctgaatataccttgtggtttcatcaatcaataaacaaaaaacacacctcaagcatacacacacacacacacacacacacacacacgaattgtgcttcagaaacggtaacatacctggcgcgaattccgagatacacgtgaggacgataagttccccaatacaaactctccttgtgctcaccttcaaactgcaacagcaccaaccaagtcattcttctttcttcacgcacgctaaaatcgtcgaattctcaaaactgaaaagaaaaagaatggggaaagttgaaagttgacctgaggaaggtccattatctttggcgcgggaaatggcgtgacggcgcgaggaagcttcggttccgttacggaattggagaggtggtggatcataaaccagatgatgaagaatgcgacgaagcagataccgagcagcactttgagattggcattgttgtatatcggaatggaacttccgtatctgcttctctctctttggcgattgaacggaggcctcttatgtcgaagagaatcggcgtcggcgtcggatctcactctgcttcgaacggtacttcttccacttccggtcatttttggcggatcagagattcacgccaccgcatgcatagggatttggagttcgagtggagggagtgtttgcgtagcagaggtttcggtgttaataggggatttcgcagtgtagcagtggagtttggaaggaagaatcagaaggaaggagacgagtgacttgaccgataatgggcacgagcaaggaaattatcgtgggatgaattggactctgctaaatagattatataaatttctaatgggaaaaattttatacacccagaaaaagactcatacaccattctatttttttaaatggttaaagtactctcgcattatacaagcacggattcgtgaattcgtaatttctttttaagtcatacggattggcccaatccgtacgtaagtttttttttaagttaaaaaatattttttcaaataatgacacatgtaagtttcaaacatgtgaccttcaggttattaacacaatgttttaaccaactgagctaataggtcaattatgctaaaaactaattaatgttgatacatataacattaaattttttaatgtatatttaatacacgtataagtttatataataaattttgtaacaattaattttgatataataattaaagtattttttatatataaaaatcatagataaataaaaatcataagtttaataaaaatttgcaggtttaataaactataaatacagatataatttttaatttaacttgtaaatacaaatataatttttattagacctgcaaatttttattaaaattatgatttttatatgtaaaaaatactttaattattatattaaaattaattattacaaaatttattatgtaaacttatacgtgtattaaatatacattaaaaaatttaatgttatatgtatcaacattaattaggttttaacataattgatctattaacttagttggttgaagcatcgtgttaataacctgaaggtcacatgttcaaaatctacatgcatcattatttgaaaaaatattttttaactaaagaaaaaacttactttggtgtataaagtttttcccatttctaatacactatatatttcttagaaatttatatattgtatttaacacacaaccacaacttgctgaagtttggactaacctggcccaaattcaaccttattttagtaaggctttttcttcttacactatagaattttcaacatacactatattgtaatagtgtataaccgaaaatacctatgtttaggtttttattttgaaattgttcaaaaccatcagctggtgcacgcttcctctactttgacttccttctttgtttgtgctttcttcttctctgtggtggtttgacggtggtggcattgctccggtttgtggtggtcaatgagttgcaggtggttggtgatcgtccttgggctgcgccgtcggttacccgtgagcgtcatttgatttgatagggtgattagggattgtggaatccgtggatatgatacgaattagtcattccataaaaggggtttggggggcttacggattggacaatccgtatgaggcatacggattacacaatctgtaagctttatacgaattgcctaatccgtaagcttcatatggattgcataatccgtaaactttatacggatttgtttgataaattgcttgaattgcctaagtttttcatatattattatgtttgatttgagaaattacaataaactaaattggtaaatgtgatgtgtaatattgatttgagggggttttaatttgaataattatcgtttgacatttgttttaagtttgatgttttgtttgtgttactttagtttttgcacttgcaatttgaatacttattgttcttgcaagatacctgggctatggaatatatcagttttctttctaaatacttattttagtttgatcattattgaaattatgttgaatttccactaatgataaacttagaaatggtagtttgttgaaaacttattggccattaggctatgtatttgttttgtgttattgattgttcttgcaagatacctggttgggctatattcattgttttgtgttattcattgttgttgaaagattaatgttaggcatagtgatacctgtgaggggtatacgtgtgatgtacttttatcagctaaccttgttgaaccaccatcaacaatgcgagtttcaattatgaatgattaatctcagcataacgatacctgtgtggggtatatttttgttttgtgttattcattgtcgttgcaagaaacctgtgtgttggctataactgtgttattcattgttcttgcagaatttggctattgttttaagtttgatgttttgtttcatttgttcttttattttgatgagtatgtgtgaaaagttcgtgaactgaataagctcttggattattattggtagaggaaatggtgaaaacattaaacttgcgtaaaaatctggagagacctgctgctgcagaggaaggcattgaacgccgtaggtctaatgcctatgctcgaagaagacgagcagttattcctgttgttgaggaaccagttcctcaggacgtgcaagttgaggctaacactacatatgtggtagatgacataggtagtaaatctgaaggatttccaggtggtcaggaagacccttcgattttgaaagggtatagtaaccacgtcgcccttagagtgtgggccggagaggtaatttgacgccaaggtaatttaatgcacatgtaagttttattttacaacattaaattattctagtatttttgttgttgttaaaatttaattaaaataataataatacacatgaccacccttaaaatatccaaattattaccaccggttattaattatatatgaaacaaataggtttttttttctttttctttctaatgaagtataagcgtataacaaatataaccatatttttatatttatatatatatatattaatcgttaattttttatattcttaatttgttgcaaaataacaacacattgatttattttttatacaagtgaatttatttcttatgttaatgcatgtgattgtatgtttgtgaccattagataattattgaatatttgaaattgaatattacacaccaaaaacaaaatgaaatttaatattaccgtgaaatttaaaatattaattcttaatggcaccattcattcacaaatcatatctcagcatgtaaaaatttctcaagcttagcatttttggtgtagttcaagataatctgtaggttctcttgttaattcatttttcttactgttttgtatctttgaattcttttattttagaagaaaagcaataacattacttagatgacaggacgccagctaatgctgtttttctttctttctactcgcttagaacttagacgaagtctaatatgaagtttaacttcttccctcatccgtgtactcccaattttatcagtaatgataggtttgtaacaggaatatatatatatatatatatagatagatatataaattaaataaaatcattttaaaattattattttttattttcttttttttaatctccttccctacaagccttcctgaatgctcttttatacgaatttatatgttacaaaataaaatttatagataaatttgcatgtttgataaattaaactataaattattagataaattaaactataaattaattattatatcaaaattaattgttacaaaatttattatataaaattatatgtgtattaaatatacattaaaaatttagtgttatatatattaacgttaattatttttaaacataatgggcttataaaaaaaaacttacggattggtccaatccgtaagattacggattcgtcaatccataaaaaaaaactcatacggattgcctaatccgtaaggttcttacgaattcgtcaatccgtatgaattatgcggatccgtatgaaacaaaacatgtaaaatagtgaaggatattttggaaatttcactgttacgaaaatggtgtattagaaaaacgaatggtgtaggaagcaacattctatttattttgataatgatgatcattagcggataagtaaaattacaaaattaaatatatttcttatgactattatatatcatgttaaaattacaaaacaaaacaattttttatctaaatattagattgcatatcatgaatcattttgtaaaataattaaattaaatttacttgaccgtatatcatgttatatatatatatatatatgataaatatgattatcataatgtaataaaaaacatgaaaaaataaagaacaatactttaaattaatttttttaagaaattgaagcgtagtaacaaaatggcaccaagataacaataataaaaaaatgtcacctatataagatagagcaagttacctttcttaattcatgaatcatatccataatgaattctaattaacaacatattaacactaaaaatactaatatagtattttgataatttacaactttaacatcaattagcgtcattagaaacgtaaatgtgatattttgataatttacaactttatcactagctcttgtaaatagaaaagtctttcccatttaaacttttttaacactaaaacagtaatatagtaatttgaagatttaattggcatttagttttgtaaatattgaaagacataaaataaccaaatcacacaaattgatagtgttggtttggttgagaggtttggggaggaggaggtaaaggaggcaatatggcaatgcaagtgacaagttggaatccatatgatggagagatctaaaaaaattgtgtgggggttgagtggtttaagatggtttgatgaaggactagattggaaaatggaaaaaagggataaaataatttttgttgtgatgcataagagggagagcaaaactttgccaatttatatctcatactattcctcattttattgcaaaaatttgacaaaattgacaatatgggaaggtgggaaggagagacgtggagatggaaatttagttggtgtaggaattatatttcttaggaagaggacttgcaaagaaagtttcaacaacttgtatcaagtatgggcattgataagaaacggttggatggttggaggtggaaacgaaatgtggatgagtcttattcagtaaagacaatatataatgtcattattgggaatgacaggaaccaacagacaaacaaaattgttgttctatatggaaggtaaatattcctccaaaagtgatcttttttttttgtggagattgtttttgaacaggttggccactttggacaacttaaaaaatgtgagggtagccgcgaaaggctctatattgtcttaccattatcacctgaggagaacttttggcaaaaacttgggtctgcaacttctgaacggaacacaatctagtgtgtgatggtctgacacatttggaatttgtgtaatgctattatttttggatgtgtagtttatgttttgtaaaaattgttggaccaaattcttttcacgagctggtcatggttgaaaaatagttcgaaaacatttcaattttcatttgcagagtggtctctgaatacggttgtctgcttatacagatcttaaacatggtgtggaggcttggaataatggaaattcaaagggtgataggaggagtggtggccaacaacttgggagaggaggaggattcaaacttgataggaggagtggtggccagcaagaagaagcgagacatcagcgaacagaagtgagccaaacaaatttagtaaaacgcaattttggacagcaaatcaaccaaaattaactcctagcagcacagagatgtgtgaaatgagaaattgaagcccaatctagaccgaacgcaaacagaagcatgaacaggaacaatcacgagccaaataatgtcgtgcacggacaagaattgatgttgaacagtaacgaacatataaaggagtccaaaccagcttcaatcagcacagacaacaccaaaagaaagatccctagctcaaaagaaaccaatcaaactcgtacgaatgaacaggagcaagcgcaatgaagtttgcaatcgtaaatcagatacgcatgaacaataaagaaaattcaatcaagaacaagactgaaacaaacaggaaatctaaacagaacttgtgagattgaacatgatcagtgcaaaatttttgctgttgataccatgttaggtaaaatgaacgaaagagagagagagagagagagagatggacagctgaatttcttttatttcgaaagaatgaaaagtagttacaaactgtacacgtgaggtatttataacctcttaccactaacttgatgaaaatacgggcttctctaaaacaaccctgacaagttggagagcagtatgattgtgtcctatctccacttctttctatttaagttgaattgagcatggttaagtacgtgaagaatatcctcatattttcagacatgattaagaaacatgcattgctattcttgcaacggtaagcaaactaaaactgaacctaaataactagacatttccatggaattgcagaaattttaaaaatcttaaaaatgaaagaatttgagataataactacaagtatacgaaaaaaaaaaaagataccttttttatatgatttccaaaatcaaagtaagcaccatgtgcatcatcaaaatgcatctgtatggtcatcaatcacaaattaggcattgcacagttatggtagtaacaaattgactctgggtcaccatgcaaacattaatctgctttcaattttcttttctcaaaaacatttaaaatagaaagaaaaatcagattattttctttatgttactacatcaattatccggactatattcaggaatcacggtgggaaacttcaattgctaaaagagaacatgtgaaaagattccgtgtacatgtagagtgtttatacttgaaggtttcatgcatgtaaatgcagcaggggtccttaaataagtcaacaattcactttaaataagtcaatagtctaacttggacacaacatcaatccacattaatcttttatagtgatcaattagtcattttctttgtaaaatccatgcccaacactttttacgagtccgtactttgtaaaatccatggtattgtaagggcccttgactagaaatctctaaacattatgttacctttgttttacatgaaataatctttttatgttttgaactctttgagctcactagtctaatcataagatatgctcccttactaattgcaacgaaattacttgtttataatgaagaacttcatgcctcttatcactaatttattatcatcatcgagtcgaaagaattttagaatcctgccttctgattaccaatgtagtacaattggaaatttcctggaatgttgcggtagcttctgaaaagtatgaaggtggaggaatgttttaaccccgaaaatgtgtaagaggatctttgatggtgatgcctaaacacacagatgaacttttggaatgataactttttgcctccacttatttttgttgacagaacttttaatttgaaatgacccatacattatacattattattgacaatttgactcccaccaagggagttggagggttattatacattgttgcagtatgatagccttatgagaaattagatgaccatcgtgtaatatgctatgaagatcttgttggtttgattactccacagtgaataaaaggtccagtgcttgggtaacgtggtttttctaaattatgtcatattcttccgccatgattaatactacaagtgatgtccagccggtaaatggatgagacccttttcccttaccgttattctgatcgtactgttcccacaaaaatccagtttgttgataattgcgtactatatttctgcagtaagatggcaattattatttaaaaaccaaccaatatcttgaaacaagattacaaaggtaccaaacaaaatcaaacaatacctaattaaattgcttctcagttctttgtagatagctttagctctgttctgatatggtccattctctacaacattcaccacaaggtatgaatgaagtgaaatatttgcagatatttggcctaggccagttcatattacctttggagtaatggtggagcgctgaaagaattctgtgattcatgtttatccaaatttgacctctccaatatggaccctcaagctcagagttgaatttcatgtacaaggaactgtgaaaaataattattttttggttaaccataagcaacataagctgaataagaccacacaaattcaatccattaaaaatgcatttgagcataggttgtaatataccttgtcgtggcaagcgatcgtagtccatattcagtccaaaagagactgtgatttgaaatgagttcaagctgcttttccagaatccatgatccctgaatgagacagtcataataaaattatgcatatggagttattaggttgacttaatgatttaaggaagaagggaagaggaaaagattgtgggtttaaatgttttccactaacaaaaactaattaacaactaacatttgtccgtctataaaataaaatatgcatctaattgtgaagtcagtcaagcaaggaaaaatttctcagttcttcttagcataaaaaattcatgatattgagaatacatacattacttacagatggaatgatcttccccatgaatgggaatagactaacataaccaatgtgaggaaccaatctcaatacgggcttctctaaaacaaccctgacaagttggcgagcaggatgattgtgtcctatctccacttctttccatttaagttgaatctagcatgattaagtacgtgaagaatatctcatattttcagacatgaataagaaaccatgcatagttattcttgcaacagtaagcatactaatactgaacctaaataagtagacatttccacggaattgcagaaattttagaaatcttaaaaatgaaagaattcaagataataactacaagtatactaaaaaaaaaagataccttttctgtatgatttccaaaatcaaagtaagcaccatgtgcatcatcaaaatgcatctgtatggtcatcgatcaatcacaaattaggcatggacacagttatggtagtaacaaattgaatctgggtcaccatgcaaacattaatctgctttcaattttcttttcttaaaaacatttaaaatataaagaaaaatcagattattttctttatgttaaactacatcaattatccggactatattcaggaatcacggtgggaaacttcaattgctaaaagagaacatgtgaaaagattccatgtacatgtagtgtgtttaaacttgaaggtttcatgcatgtaaatgcagcaggggtccttaagaagttcacgttcctcaatatgttaattaataataatgagcttgaagaaggcccaaatgaagattacactcagatgagactcattttcattatttatatttaaggaaaaagtcaggcaaagccttgcttttcaaattggaacacttgatcttccattttggataaaagctcaataaataactaaataaatagtcttctaaataaagaaataaaaaagttttcttttccagaagagtaatttgttttccatgttatttctagttctatttattctatagatgcatacactgttctatttcctcttttttcgtcccttttatttctctctcctctttatcttcacttgttttgctcctattccagtactgtatcaccaacagcaaagaagtgcaacaaccctgaagaaagggagagagggagcaaaggtaaaatacctggttcagtaactcgacatctgatagcaatttagcagtagaaccataattctgcatcatttcatacattatgtcaattattttaggttatttaactttctgctgcctacatttaccctacttgatatctaaaatttacaatgcataattacaatactgttgaatttacttttcaaatttatactttgccttgtttagtttccttattcaacaactcttcaatgtattgcagactatcggttgcaagtaacatccaacatctaagatccacgtggcgctcatctgcacttgggtgtgaagcacgtggataatcatcaaatccagaggacagtgtctgaaaatgccagaaataatgtttgttaggagcaagtgtcttcatcaaagacaatgaacaccttgtcataatcaaccagcaaaacaccgatggctgtaataagtggtgcttgaatgtaataatagctcaaacatacctgcaagtgagaattcaggtttcatgctcatttttttggaataaaaaagtcctattattgtatcctattagtaccaccaaataaattgaccaccgatgccaaaaagccaaaaagtgacaagaaatctacaacaatcgtgtttgcagctttatgcttatgtaggttttggccttctgtaatagcaatctttcaataaatctcatttgtggttgccttaccattagcttctttttgaagcatgccaatggttgttttggtcaagttaatttgctgggctatctatatagttcagattgaaattgaattcacagaaagattaaaaataaatataccaagaatgcatattagaaccttgggacttaattcatatatagttctattgtttcgtccatgccaatagtagctactcatctgtttccctgataataataaaagggaggtgggggtcagaaagaagcaatctatttccagtgctcaatcagactacacgtgcattatagagtatacctgactgagtaatattgaaccattggaaccatgcttctaatcgaacaaaggcacgctccaggaacagagagatctcagttttatccgttgcagtaaactcattattcttcaatccattaattatacctacaaaaatagaattttaaccactttggtaagaattttttttcgtggtgtggcgagcagagagatcaagaaatatacagaaaaaaagttctgtactgcttcatagctaagtaaaagagggggcaataactttcatatacttgcattggatctatgtcccatataaagcatttttccacatttcagcagcaccaagatatttcaacaagtaatacatcaccaaactaatgttaaccatatttttttacctaaagatatagttatagatataattacttcatacaaattgtcaaactgtctccataaatttattactcggaaatattgaagtatcatcaaatccagatcaattatgcgtgataccaaagatctagaacaagcgaagttacaagggtatgttatcacagtcacagaagagacaaaaaaataaccaggcaggaagctagttgctaaagtatcgtccctcaagctcaaggaaacaaaaaaattaacatacacaaccaagcctaaagtcatgctagctcgaactcattaatggcatatatgtagccttcttttttaaataaagattctcataactagaagaaaaaaaggataatagaaaggaacattaacatataccacttaatgctaaaaacagagttggaggatttccatttgttggatgctgaggaacatattcctctggaacccgactgcaagtgcagaagaatctaagtcagtaggacagctaaaaattttacatttactgcaattatttgaactaaatgtttttactacacctgagtgcttcagccccgagaatttgttcacgtggtatccatccatcagcattcatcaaatctaaccagtgtccaatgatatccaatgaaatatggatatcccaacgcctggttaatgtgaacaatataaaaaaaaacatatttacagatcatatattatttgtttgctaaataataccagtaagtcttgtgcggtcaataaaactgtacttaaactgaatttcaaacaagacaaatgataatgatgatagtagtagtggttgaggtcatgaaggatattattagcacaagaaactaaccagattataagttgatgaaaaccttcatcccataaaaatcctcttggaaaggaaggtcgacatggtacagctgtgtaaagctccgcaggccaatatggtatataatcaacatgctcactaagctgaaaagggaaacaatccactgcatatctgcccaagttctaaattgatgacagctaattgaaaggtacaaaggatagaaatagctatacacagctatgcttatgcctatgacatactcttcaataagaactataaataacaaactacactaccaaagtaacttacattagagattcttgaaacagcaatctttgactgaccatagaagtagccaatgccacctaataagtttccaacagctgccttaccaacagatatggattctgaatccacctggaaatccactactatgataaataatttgttaacttctaaatcaatttactcaactaaatgaattatgaaagattcataacacatcaaaagacgaaacaagaagtataaatcatttaatatgagatagttaaacaaacaaaaaaaacaagtcaaaggacaataaagttggtaccttctcagctaaattgaaaattttctcaaacttttcatcaaatgcttgttctttgtatttcagctgattggacagtgaggttcctaacatcgagcagaagaacaaacaaacagatacacaaggacttagcatttagcaagctaatgtcaatcaaaataaaatattctacaaattcaataaaaagttgtctcgttctccttagaacatataatgtttaatgcaaaagaatcctgagataaaccaaaagttgttaaactatacaaataaacacattgaattcagaataaattatagaaataatttggtttttaagctagatttgaatacaaacacagggttttcccctaacacggagtttcctccttcaaaacaccagaaaaagcaatccgacatcttaattgccttctacaagtctgtcacacaacctatatatcactataactgtcattaatccgaaattaatataaaaataaatgcttaacaacttcctaatacaaaattatagtagcctaattcaaaacttggcctatcaaaagccaaaagaaataaaactaaacacataagcccctatgtcgtccttcaacatgcgaagtaggttttcagagcaatgaccaactcctacaacagagtaaaaaactaaaattttatctgcttttacgtgaaagcacataaatataaagcgtagtttgaacaaacactataaagaagtagaagaaaacctgtaagactactggcacgcttttctactgttgaactttctgaatcagttccagagataaatataacatctgttgtgaaagaaaatccaccaataatctgtagcatgaataaaagaatgagaagtgcatatgaatatgataggaaaaccatgatattatccctccaggaccagaactttttgtttcagaaggtgaatctatcaaacttgatcagccattaacaagtaatccaaatgtgggtagatttggtcagggggatgcggaaatagtacttcaagtttgaagagatgaaatggaatgggatatactattcaattaagctatattcaataggagaaatagagttaggtccaagtcctgtgggcttgcctcaactaatgagactttgtaacaaggaaaattagtgacaagttagttagtaaattatactgatataaatagaatgtagaaagaaaaaggagtcccttttaattggatatcggaaatcattattccatgaaagaattcaccaataaagatagttccattctttctctatatacttgtattgcctgatacagttccttagagaatcttagaaaagtgtaaacgctgtattacctgaaaaactaatacatttggagaatcatctgatgagtcagatagcagcaatcgagcatgcttccttatctacaaagacatgcacaaaagcagagatatcaaagcaacacccaaattaataaataacttccataaccacatgctcttgaattacatgaaaattatatcatcagataaattgaattgaaataccctaacatacttgtgatgcaagattttcctcaacaagattggacaaattgtgaaagtgaggagtgtgaaatccagaataatgcagttccaaatcatcctaaaagagaaaaaacataggaaagtgaataaccggttactaccaggcataaattacagataatcaacatagggcaagagtggaaatggtttgtatgggataattaaaggtcaaaggaaagaggaggtatgaaaagtttgttataggtagttaaaatactaaataagggtgtgttacatgtttgctttaaaatgcggagattcataagtttagcatattctttgactgtttcaaagaaggaaacatgatcgtggactcttctttaaggaattgtagtatgactgtatgattaattaaccatgaactccaaaaaatgtagtacaagtaacagaatatttaatattcaaccataacatcacttcctagcattaccattgattttaaatgtagctgccaatctccaatgtcttctcgagagccagatgccaccaaagaatccctatgaactttcaagttttttctaattaagtttagagcattaccagcttcatcagccaaatagaaaaagacctgggcaccgctcccaaattcctcattccacttggacctgaggttggaccacgagaacaaattccctcaataaataaagtcactaaataaagcaatactaagagaggcagaggactcattaatttaatcaaatttgtttatcctaagaccccgtaggaggtttttattttattatttttctttctattttgatagtttgaataggtttatgcatttatcaaaaatatgaatggttcactcgtacaggtcaaaaataagaaacttgagccggaaaattaagatcagtgtttttattttatgtgttgtcattcgtcttgccttacttcaacagacctgctaggatctactttactataaggaaaagctacaaacaaaattgtttagcctcaatacatatatgaaaataatttgaagttgataacatcacttacttatcaatttgcacattaattcgaactgcccaatcccctccatagccactgccttccacttttgattttaaaaacccagtggtgatggccatgccatggtcaatcagcacttgatgtccaaaatctcgtccattgtgcttagtccaaccataagtactaaggttatcctcatgtttgcaaacatgtcgcaagtgatatctgccgtccttcacaacaatccacattaatcctgcaatcaaagattttggagtcctgaaatacaaagaccaccaccaccacccaaccaaaaatgaaagtaagaatgcttgcttgcttgatgagtcaaatgttgttgaccactttctctatgatgcacggtttgctgatataaatcagttagatttcatactacacaacacattcattataattagttattgcataaggagaaaggctaacaacatagtcttagagtgtatgtcagaaagtacaatcctcttggattaagtgtgaaaaatatttctaacaatcaattattgttataattaattatgaaaataagttttaaaattagatatattagatgaaagtaatttgaaaatattttgttacatttgaattgtttaaaaactattttttatggtaaaattagaaaaataatataaaattatttcaactaattagttttatagttaaaatgattaattcttgaaaataaaatagaaaaacaaatgcctgtttggtttaagcaaatgatttttatttttattttctgttctatttaacttttgtttatattttatttctttttatatgatttgtaaaaaaaagtaaaatagttaaaagtgaaaataagaaatgaaaaaaaaaatcaaaataaacaaacccggccaaagtaacttttaatcataagttctaaaattttgcacctaataatgggaaaaacatcatttttataatttttccaaacaattagattttcttaaacaaaatgttttaaaccttaaaaaagtttctacaaaattaatcatatccaaacatccactttgagtgggaaaaaataagcccaaaacatttttaaaaacaaaattatatgtttgacaaaattatcaaaataaagaaaaagttgtttttaatataaaatatttactacaaacaaaattttaaagtttataactaaaacgtatcaattatttattattaaagttttatttttctattttatctcaagcaattaattaactaaaatgtaaaattaattattacaaaatatttcaatttattttctaatttcattgttaaaaaaggaatttattaaaaaatttaaagaaataatttatttaaaatttattcctttttaataattaattataaacataactcaaataatgttttttagctattaaaaaaatcaggtctgtttcactacagtaatacagtgtaaagtaagaaaaatatttcatggatacccatgctataatacatctacatttcatgagagagaaaaatataaatattataaaatttatgatatgataaaaaaaataaaaaatattagtagaatgtttaaaataaatgactatttgtatataattgctgataaagaaaatactcaaaatagaatacctggtacgaattccaagatagagctgaggacgataagttccccagtacaaactctctttgtgctcaccttcaaactgcaacaacgccaaccaagtcattcttctttcttcacttcacgtacgccaaaatcattaaattatcaaaaaatggaaagaaaagaaaaacagcaatggaatacctgaggaaggtccgttatctttggcgcgggaaacggcgtcacaacgcgaggaatacgatcttctgcagctgaattggcgaggtaataatggctcaaaaacaagacgataccgaacacaactttgttattgtcattgttgaacatgtacatcagattgaagcttcggtgtttgcttctttcggaagacgatctctctccgctgtgagtggttcttcttccatttccggtcattttaagtgcagacagtgtttgtgttaactgtttagcagggtaacgtagcggaagttcggggaaggaagaaacgagggagtgaagtgaagtgaagcaactttttttggtacttcaaataaaattctcatttcgataaatacaaatatcttctacttggagtttgatgcatacgtaagaaatgcaattgaaaaagttaagcttttttcttaagagtttaattcgtaagtgtacaaccaattaaaaataattgttggtaaaactttatgataatcattatgaaaaaatgataactatatttttcttgcacaattattacataaattatgagttttttttttttaatttggataaattagaaaactatatactgtaaaagacaaatacaccattattaattaatggtgaaaatcatcaggtagttaattcaagttataacatattcaatttccctgacgtaatgtcgttggttcaaatttgtagaaaactgagataaatcgatccgtttcattttatatgattcttaagattttggcataaacattaaaaaatgtaattaatattttgaatttcataaattatattatgtcactttctaatatactattgtgtttctaattaattacatttttctcatttattacacaataataacttttttatcttcaataataactattcttgctaagggtattccatgaaaaatatttaatgtttcattattttttaaaacaacaattagtttgtaatttttttttttaatttaaacgtcatcagaaatgaaaccgaagaagctatattatagatgtttttaactcaaataaaaatttatgggtgatttagacaaactctactgattacctataaaaatatttgggataacaataacaaaaaaatataacataaagaataaaccaaagttaatgacaaaaaaaaatagggtggaatcttccttttatttttttactttttttttataaatcctttttatcaataaaaataatatcattagcttaaaatagtcatattttgacatttgccctttctgaaaggttagaaaaagaaatatacaaacattttggcatttgcaattaaaaacgttcacaaattcaaaaagagttggccttcggtgtggtcaaagagatgcaggcaattacaattacacttcatgttacttattttacttgttaaatttgtttatccactcttacgaataaaatagagtcaccattttaagatgaaataatttttaattataatattgctttaagacatgtaattttatgttttttaagagattatatattcttcaatagagagtaagagaccataactttccttacattgggaatgattactatataagattgtttctatttatatacaaaattaagtgttcttaaatttaaatatgattaaactgaaataataccgtggcaatttatttatttatttatgtgctcgataaaaaatattactatttactattttttaccttttatatttatttaaaaaatttaattaccaagtatacaaaattaacactatacgttaaaaaacaagttgacttttatatatatatatatatagatagatagatagatattagaaacaataaaatcaaatgattcaatgaataatagaatgagatccacacaaaaattttcaagttttagtcagttagtttgaatcctactttacaaaatattttaagttttaatgactctctcgttaggtaagacttgttacccaactttttagtacttgccattaaatgttgttgttgtgatattgaggccttgttgtctcgtgataggagtgagtcgcacttcaaaagaaacaaatgagtgtgtggattgattgactaaatttggaacaaaagagatgtttcattttaaaatcttcgaaagttaatctcctaaattatgtctatcattgaacttgccttctgatatattgagcgaaacttatattagagtagtcttttgtttgtctttcttctatcaatctagtttttaattgtactttcgttaaaattgagatcttcaaacgaagaagtcggtagtgccaaaactcttgaaaggaatgtaaggtaaggtgacaaatataagaattatcatatacccatctcaacattcttgaaaataaaaattttaacaaggaaacaaatccaaccttcatatagaaaataaagccaccaacaagaaacaataaatgccagacccgaaagaagaagaaaaaattgaggtaatcatattaaccgtagtagttcaatgattctaaataaataataaataaaaaatttccttgaggcattctatcaagcatatgctacagtcgaagagtctacccatgattctaaaactttaaaaagaaaattgttatcataattataatttcccaaatgaacattatttcactttatatgcatgaattcagagatccaaatccaaacaaaatctaattgagcaatttaccattggatttcaagtacgtctaaaaccagtagggaattaaagattggatcaattaaatacataaggtcaagaaaggttgagttcaatgcacaaggtaagagtgttgctttatacactatataatatttctaatacactatatatctatagtgcaaatccgaaaatgcccttctcattattttgcagaaaatccgtatgcacatcccttggcaattacggatcaactaatccgtcctatcatccttggccaattacggatcatgcgatccgtgctctcatccctgccaattacccattttcataaattaaaactagcaacatagcccctatggatccaatgatccgtatgcacatccttggcctaataaggatcaatcaatccgtgtgtgtatgctggcctattgcagatcaaatgatccggacgcgcatcattggcaattaggcaattactaggcctactgcggatcaaatgatccgtacgactgtcatttggcaattacggattcattaatccgtgcccatcatttgaccaattcggactactaaatctgtgcgcattccatggccatcatttggtcaattacggatcattcaatccgtcagcattcatggcctatttccttgcttagcacggatcaatggatccgtaagcattccttgcttagcactgattattcaatccgtgtgaaattcattacggattattaaatccgtgggatttacacggattcgttaatccgtaacatgacatgaccaaactggatgcattgatccgtattttatacactataccaccatcgaaacataactttactcacccagctgaaaatggcatctccgacgagtcctgagctcaacccagctaccaccgaccacgacctacctcctccaacaccaacagctccaatgcacaacaaaatcgcagcaagggaccaagcaaaatggaaatcgcagcaacggagaaagtaaaatggagagcacacagtgataagaaaagcacagaataaaaacaaacaaaaagggcagttttggcattttaaaaaattatatagtgtattagaaatattatatagtgtataaagcaatactcacaaggtaaagagtgaggcttaacctgatggtacgaagacccaaagaggatgggagcatgggccttgatagtacgaagacccaaaggcccagatctctgattgtgtgttttctcttaagtacagcacaaaacccaccaaaacaaattaattatgactccacacgagagattttacttgtgtttaaaaccataaagatatttgtttttgcttgaaaaaatctagatacaataactaacagagtaactaagatatcaatgttagttaatggaattgaaagtgatattgagtgcattttttaatacgtgtttgtaaaattaattttaaattaatgtgattttataaaattgattttaagttaagttgtaaatgttaaaatcatacggattgcttgatctgtaacactcttacggattgccaaatccgaatgccctccacggattccataatccatacgctgcacaatccttcctacagattgtccaatccgtttcctacccacggatcattcaatccgtacgagtccattttttaaaaatctgtgaaaattggcataggcagcagcatgtaacagcttttcaacaatgttatggttaatttgagaaactacaatggtgtatgtggtatgaaatatggattataagctttgtttaattgtgacattaacttatgaattagtatgttatttgagaaactacaatgttgtcaaacaatcctaaacctaaatagtacttcagtttatggtaagcacaaattcataattgttttctacatagtcattaggatcgctaatcagtattttgttctgcatcaataccctaaatcattgatatagcttctgcattgctttgggtaatagacatatgagtgttttttgatgcaggtcatgcaacatgttagcaaacaggatgttagacaatgaaatataaatgaaaattaaatagtcacttatgaacagcaaaatatgcctaatactgagttcaaaattcaggatttcccaattgccaaaccaacaatcagtgcttatattcaccacatttttgacatgaatgcatggattatcatttggctgatgttttaagtttgatgttttgtttcttagttatgttactgtgacgactacttacccattgtgtgcatgaatatgtgttggatttatttttgtgcaggatatggtgaaaacattgaacttgcgtaaaaatctagggagacctgttgaagcagaggaaggcgttcaacgccgtaggcctaccgcctctgctagaaggcgacgagcagctggtcctgttcttcaggaaccagttgttgaggaaccagttcttgaggaagtgcaggttgaggcagacacaacacatgtcgcagatgacatagttagtgagttggaaggatttgcaggtggtccggaagaccctaccattctgaaaggctttggtaaccacatcgcccttagagtgtgggccggagaggtaatgtgaccctgaagtgtatcctataatgatgatttaaatttaaaatttgatgtcgtataacaacttttctttcgcaggatcgtcctgagcttaagctggcctctcatggacgtaaggttgcgaagtttggtccccccgcacctgagatcgaaggattggtcgcttgtactgggttaagcccactggtttcagccttaattgatacgggagaccggggattgatatccgcctttgtggagtggtggcacccagagactagtagttttcacctgtcgatcggggagatgaccctgacattagatgatgttgcttctctcttccacttgcctgtgatgggagccttctagacctacgatgtagttgacgtgggggaggccattacattattggtcgacttgcttgatgtgaccgtaactgatgcgcatgctgagaccgaacaatgccatggggcatatgttcgactctcgtggctccaagacttgtatgctcagaagtgtgaggcccgacagtgggttgtagcggccagagcatatttgctccaccttgttggttgcacactcttcgcgaacaagagtgccacgcacataagtgtggtattcttgaacgcttttcgggatgtggaccaagctggagatttttgctggggtgtagctgcactggtccacatgtatgatcatctaaactacgcctctcagcatcacgggaagcaccttgctggatatatatcactgttacaggtaattgtaaaacattatctaagttaactattattatgacatcacctaagtttactaagttcaattgttatttgataccgcagtactggatctatgaacactttccgaccatcggaagtgtgagtgctgatccttattatgatgagaggttgccctgggcctgccggtggaaagcttctaaggctttaccggttgcaacctacagacggcgattggataggttgaccatggatgacgtgtgctggatgccatacgtggaccatcgttcccacagacagttcgagatggtttcgctatttttaggtcaccttaggtggggaccacatattgtcagatatatgccggagagggtgatgaggcagtttggttttgtccaagaaatccctgatttccaccactgtgatacgccttcagcagaggaggttgacgacatctggactcacttcgccgaccatcttgtccccactggagaccttgtcatttatcccagccaatgcgtcagtggctacatggagcgattttatcggatatcccatccatttgcccgtccgccagaggttggtgagcctagtcgacagccgactcgagtgacccgtgtgatgcatgatccccctcatgttgatggcgatggatgcgttggccagacaggtccagttcagccaggatcagatgtcactgacatgccccagcatgaagtggtagaatttcctataaacatttcttttacttatattttaataaattgacacttatcaaacacctaccaattttcatatgcaactgtgcgagcccatttcaatacgtcctcacgggaatcaaacacctaccaaaatggataattcatttttaatcaactaaattcattcatttaacaacttaaagtaaactcaacttcatatccatacctgagatgtactgaaagctgcagaacaatccacaaaagaattatcattttctggggcatcattttcttcttcaatgtcctcattcataatatactcgtcatacataacactgtcatacatccactcctcgtagttcatcttcacaaaacaaaaaaagattctaacatgcccaaccgacaattacgcaaactcaataatatttatcaataatgcattcacaaataatcacaaattacgttgaagcataccatacttaattatctaatttatccatactcattcatcatcaaacttttcaactcataaacaatttactttttaataacctattttaaatttttttaaattatttttcctttttttacaaaataacacatacggattatgtaatccgtatgtatataggtaatccgtatgatacatacggattacataatccgtaatagtaatacggattatgtaatccgtatgcatcatacggattacctaatccggaaatgccatgatattgcctaatccgtaagtatcgtatggattaggtgatccgtaagtagcaaacggattatgtaatccgtacaatacttacggattacctaatccgtgtgctacttacggatcacctaatccatacgatgcgttaacagcagctcttacctttttagaccaccaccagccgccgacgaccaccgctaaccaccaatgaagctccgacgaagctcaaaacaatggatgcactcacaaagttacctataccagcagccacaacaacggaatcgtaaagcactgtgcaaaatcgacaactgagttgaaaaagcatggaatggcttaatattgtgctggaagggtactttggtcattagcagaaatatatagtgcatgttgaaatttatatagtgtatgtagaaattcccaaaaattggggttcatgattggacccacgaaactggttgggcttacttacttgtggggactccgagaaatcctgaacatgctcctagtccagattctaaacattcattatgctgctacagtcacaaatagatatagaccatgagtatgagtatgagtataagtatgagggagtgtaatagacaaacaaatgaacattgtggatttcaggggccatgcacttgtagttagctggattctttacttcccagtggtgttgtagctttcatgcaaagaacgtggcctctattacctctcttgtaggagacaatcacgtgccatccatgatccatcattaactccattctacaaagtaggtcatgctattttatttctattttttattttattgatcttggtcaatgaagataataataacgacagagttttagaagttcttaattaatttatgcttttcatccaaataaggggaatgtttacctgcattttagtaatgattgccataatattcctcaaacgaagtccacacagtttctaaatactcgttaaatgataacttgatattgcttaatccttttagacagtttaagcttaatttacaccatcattacaaaatcatacaatcaaattggttaaagtagaaaggaatgtgaaattattcaaattctgccaaattattcttgatcgttgatacaactatgtttctttcttctttttttttttcttaaataaaagggatgatgtattacgtactaaggtgagttgtggagaaatcataaaagcagtccgatggagaggggcagatgctaagggggacaagcgtgccccggtcccttcccttaatttttttaataatatatatatatatatatatatatatatatatatatatataaacgtcatacattaatgggaaaaaacacttgattagatttgttctcttagatatattatttgtctatgctcaagtaggattcgtactactagatttatccacaagtaccgaaaattaacatacatcaacagtgttttatattatcatcattatgatgaaaaaacttacttctacaacacccctttaaaatactgctcaacaatattcttacactttcatatatccatttttctttaatgataaaaaaaaattatagatattctcatacgacatctaaaaaaacgtattcaacactaactcatgaaaatagaatatttgatgaaaagatctctagtggaattttacaagtcaatatttggtatgaactctcctaattaaagactctatcattcaagtcgatcggcatttacaggatttctaaggtaaatgaattagagaatgtgtgtaacttttgccttttatgttagtaacgagcacgagcttttgagttggtactttttgcatcatgatgtgtggattaagatgttgggttgcttttcacgagatcatatattgagtcttatggttttggagtcaaacaattttgttttattttttctcttttgatttcatgaactgaagtgagcctataataatagctcagaatgaacagcatctaacttctatgcataattgttctcatcaatcaacccactatctttgaatttaagactcattttgtattgagaaccatcaacagtttaatcaccactatatctaatataattaaaataaagtttaaatatgttggagatctctaaaatagacttgaattttacaactgatctttgaaaaaaatttcttttttgttaggtccctaaaacttcaaaaattttgtaagagatccatatcgttagtctctgtccaaaacataatgatgtgtccgttagttagatacgtcaataatataagtatgaagccacttcagacgtccaaacgggtgaactacatcgataccatcttccccacctcctcccccctcctcggttggttctccacctgccgttcccccctctctctgcccctccattttttttctttttctttctccctttattgttgtccctttcacctcaccaactcctatagcttcaacatcgacgtgttcttagatctttaagatatttgtttgggtgaaaataacattttttaactagaggtatgaagagagccattgccttttcacatttgtggttttccatatcattctctgacaagtgctttagttgggggcaacggcttcggagtggatgtggtgacgatgaaatgacattgtgctcacttgatctggttgtttcgacgtcatggttctcctactctacctccctattgtcaatttggttgtttcacaaaagctaaaccctcaagcaaaagcccctttttcagaaaactccaatgtccagtaacatctcacacaggaagaatcgatgtcgatgcagatgttgctgtgatgttcaatctttttcgttgatgggaatactagacgtagagcaagagatagaaggagacaattacgtcgatgcattcacgtttattgtcgtgaataggaaaaaccttgcaggatgttgcacatgacaatgaacgatcccaatgtcaccggcaacagagaagacagagataagaggacaaagggagaaagaaaaaaggtgtaaaaaatggaggggtagagggcagagcagcaacacgtggagaaccagtcaaggagggggaagagggggaggtgaggaagctagtaatggtggcgaggaggaggaaacaatgtagttcacgcattttgacatcgttattgttgacgtgtccaattaatggacacgaccatagagatctccaaaatttttgaaattttagagattcaacaagaaacaaaaaaaaattctggaatcaactacaaaattcaagtatatttcaatgatctctaaaatatttaaagtttaaaataaaataaaaatatttcttcttcttcatatattgaaaaagcaaattattaatgcattttgttagaaaaaggttgctagttaaatgtataataacatgaaacgtaaatattttattttacatggtacaattttgagtcagctttatttttaaaactaattatttattatttataattaaataaaccgaatctagtttcctacatagaattttctctactaaaataatttaatgaaaacaatttccgtattatataagttctaacgtctaagtcaactaagtgacttctttgaaaggaaatatcagtcggccaacaagtacataaacaaatatctaagtttatgccttccaaaggttggtgatgaatcgctcacacggataagggttggttttcatatatatttagatttttcagccacgagaaaaagatttgcttgtttgatacttgtgataggtgaatcagaggaagagtcgttatttatttggaatctagtgacgttagattgtgatcgttaatctataatataacataacaagtcatgaacttgattatttgggtacaggtgatcattttttaagcaacggaggaaatcttggtcgtaaagctttaggtaatcatatcgttcacatgaacatcttaattcaaatatgctattgtggtgcttaaacatataaaataaatttgttatttaggtataacgtgaatttgtggtttttatttatttatttatttatgtccagtggttctgataaaaaaatgttcagaggtttaggagttgatagaatttaatgcagagagaattttagtatttagtaaggtttttttttttttttttttttctggtgatatcaataaggtcacccagtttctcgcttctcataaacatatttgaagcattgatgaaaggtgaaaggttccacggcgtggatgagttgctgactcattcttcaaaagccacgcgatcagattcccgaaaggattgtcttgtgccagaactgattgcactaggagaagaaaatcaattgtttattcccattccctttttttaagtcagggattcgtttaaagccttttgctaccattacaacaaaaacaatgacatcagattcataattgttgctataaaacttttctacaagatgattatttttattataagtaaaaattaaagataaataaaagatgatttataacaatttatatattttattcaactaattaaattagattttttaaattttatacacgttaatgtaagtatatgtttacattattaaaaaaatatttagtgttattattattattttcattttatcattaagctaatatcataaactacatatataaagtaaatgagaaaaacaaatcacaacagtattagagaaagaaaaaaattgcaaaaataatctaagaaaatgaggaagatgtaagtgattatcaaataaatccaaacgatttttatttatttatttattattattattatttatctacagagtaattcagataaaattactagtctacattctacaaaaattttggtcctcttacatataatatagtccatatctataccaataaatataattgagttctcaatacatgttattattgtaagaggatatctaggttcaatttttataaaatatacattttagagagagatgataaattttaaatatgactaaattttgaatcgatgattaattctataactagttcaaagagataagacttatgagaatactttgaaatctcatcgaaaaatcaaagaacaattttgttaccaaaagaaaagaaaaatataatgcatatgtactcttattatataataagtcatgcaaaagacactttgtgtcccaataatttttcaaaagtaaaaataaaaaaaataataaaagttaaataatactaggttgtttatactatgtgagtgaagtgtgaattagttgaacaaaatagttataggaaaattattttttaaaaaaaagtaattattaagataatgtggataaaaaatgtatacatcaaaaaccatatcttttatatatatatatatatattagttatatatgacaaaaattgttttaatttaatttttttttaaaaaaacaaaactataaaatttagaaatattaatgtaataacttaatactagattataagaatattttgtctatacatacacaaatctgattttttaatgcaaatgcaacaaaatgatcttcgttcaagacgtcaaaataccatttgaaaccaaacatgatagcaccatgtcttttttatttaggattgcaccatgttttagacgattaaacatgctcttaataattttggtcaacaaaatttctttcgaataatcaaatgtatttttctgacaataatttgttcgtcctacccataaataccttttaaagtctttttactaccccttgttataaaaaaaaacagacaaactttttaccccttcaaatgtgtctactccttttctatcgtttcaagtttttaacattttttttttggtgaattcaagtttttaacattaaaaacaataactttgaacttcttataatctgtgtaggtagacgttacctaaatttttgagacattgatttggtgacaaaatcttataaaaaactgagagatgaattaagtaactaatttttttaaagaactaatgtgatgacgtttgtaaatttagaggactaaattaaaagttttcttcataatccaataaaaatgtaattcttcaaaagacttcttttaatgattttgtattaaagtaataacgcatttatctttaatatataagtgtgttaaatttatgaaagtttatattaaaataagaactgatatattattaccttctcacattatactatttattttatcttatgaaatagtaaatatttgtgtaagtgttctagagaatttatgaaaataatttataaactacccataagttgttttaatcttattttaggaatcttttcacgataatttatgaaaaaggattaattttatatgaaagcaatttaatcttatttttttcatttattataaaacaatttatacatatatatatatatatataaataaaataaaaactgtgtcattacatgtttaataaatatctaaacagaaaaataatactactccactaaaaaagaatcttgtaagccattaataatcaaagcattcttacaaaactagatgttagaagtaatcatggcaaaagtatatttgaatttgaatttaaatttgaacatgaatagtaaaaatgaatccattgaacttcttccaaatttgagaaaataacagggagggacaaaactgtaattgcggaaaagtcatgacaattcgtcaattccgctgggggacaaaaacaacgcgaaaaggtcggtcggcaactgtgggccggaattgaaccgggggagataaaagcggcgcaaattctaactcttctctttcaaaaacaaaacccatttcaaaacgtcttgtaaccaaaactaatctcaaaacaaattaattaacattaacaataataaattaataattgttcatcctcaaacccatccacccaaacaaaaaactcaaacggataacgcaatacgtaagactcttctgagcctttatatatgggagaattatttatctaataaaggaatttatatttaattttgatgtgttaaattcttttgacccattataaaagaaattagtcggagtctgaaacacctttagtgtatgatccacaagactaaaaaaaataaaatcatccactcaaaaaataaaataaaaaacaaaaatagacactttggttttaattcccacttaactaacaacaaagtttcttaaaattccactctccaataaccatatcttcttcttctctctttctccctctaacttacttctcactgctctatccacactcaccctccgattccaacaccaataccctaatgccgctattctccaactgtttttttcttcttcttcttcttcttcttctttcgttctctctctctctttttatatgaagcctccttggctgtgatttttacttattactattatttttcagctcggtatgtcgttttgcttctaaaccctaatcctaatcctgcagattttactttaatttgttttggtgaaagttctggattgatgaaactgctgtatcttttaaaatcagtgttctgcttctgatagattgcgatgtttgtgttgtttccaagtgtgttttgaaaatttagcgacctttacaatctgtcctttttttttttttttttttttttcttgtggcctattattcagttcggtagaaaagtgttgcgaaagaagaaagaaaaaaaaaaaaggttgtttgctattttgggaaaaaaattgagggcatggcaaatctaatggctgcttggctttttttttttttcttttttctttttcttgatttgctagcttggtagccgttgtttgtttgtttttattttctctgcctaaatggaataaccatgcctgggatatcatgatattttataattttataaattatgctctgcaagtaaaacaaggttgaatttgttgttttctgcttcctgattctttcaaagtttactgaaatttgattcgtgtgtttggcctttagtgatttactctctgcttacttcataataagtcttgatgtaaggaaagattagagagactgattgtgttttgaatttcgattctgagctgattttttatcgttgttttttttttttttaactttctttccttccttttcctttttggttctgcagctagaacagtagaagattatttggtacctaagttaacgaagaccgtgactgtgaatgatggatgttgctgaggttgaggaaaatctgtttgccgcaagtgatgccaaggtatgatcatgtctttgattattttgtatgctgttttgggaattgcttttacagcgtgcacagtcctcatgccaaggtttaattgaagattcaaatctgttttgtattaatttctttatgttcttcatttaattatgtaggaaaagaaaacccgtttctttattattgttttcctagttattgtatgcattcagctaagaaaacagttgaacctgtctaccttttaaggtgcatgaacaatctttttacattgtcatcgtatctgctatttaagccaatgtttttcattgctggcctaatgaaaaagaaaaacagcaaggggatgtttgagttctgtttttcttgctctgtttttttttgcatttgtatccaattcagttacaatttatttttattgtctgtaatgtagtctgactaatatctatctggtttcttatgcagttacatggacagatgtgcaagactctttctataatatattgcaaagtattgtctgtatttccttctttagaagctgctaggcctaggagtaaatctggtattcaggcattatgttcattgcatgtagccttggagaaagtcaagaatgttcttcagcactgctcagagtgtagtaaactttacttggtatgatttatttcttctatagttttatttgctgattatgtttctgagtacagtttttattttaccttatcccatgaagcagttatctcttcttggcgggtaaaattatttaacctgaaatacatttttgtaaaatatcttacaaatgacattaattatgatgcaggctataaccggagattctgtcctcctaaaatttgagaaggctaaatgtgctcttgaagatagtcttagacgggtggaagatattgttccacaatctattgggtgtcaggtaatattactcagcagcatggctgatgctgtaaacttttttttctccttgtgggtggtggtggttagttttaggttcatgatccttttattataatattatgtggagggtcttactcattcttgccaattgctgttgtgatcatatgaattctaggccctattgtagatgttttattttgttattccaaaataattgaaatattgaatgcaccttgattacattactctgggtttggttttctgtaacactggcctttgtatattcaaatgcacaaaattctctccttcttgttatcattgtcaatgttgaacccagtctgaggtttgattgatttcctcttcaggttcaggagattgtgaatgaatttgcaacaatagaatttgcacttgacccatcagagaagcaagttggtgatgacttaattgcattgctccaacagggaagaaagtttaatgactctaatgacagcaatgagcttgaatcttttcaccaggctgctactagacttggaataatatcttcaagaacagctcttgccgaaagaagagctctcaagaaactcatagaaagggctcaatctgaggaagacaagcggaaggaattaattattgcatatcttttacatcttatgaggaaatactccaagttatttagaaacgagttctcagatgacaatgattctcagggttctgcaccttgttctcccgttcagggatctattgaggatagtgttcctggtagtcattgtcaagcctttgacagacaactttccaaattcagttgctttaattttaaaccaaatattagtaggacatctgggcagctgcctcttccacctgaagagttaaggtgtccaatatctctgcaacttatgtatgatcctgttatcattgcttctgggcaaacttatgaaagggtttgtatagagaaatggttcagtgatgggcacaacaactgcccaaagacccagcagaaactttcacatctttgtttgactcctaattattgtgtcaagggccttgttgctagttggtgtgaacaaaatggagttcctattcctgaaggccctcctgaatctcttgatcttaactactggggattggtattatcagagtctgaatctacaaattcaaaatctgtcaatagtgtcagctcttgcaagttgaagggtgtccatgtggttcctttggaagagagtggtatctcagaggaatctgtggaaaatggaactgaaagtgtttctgcacaagaggaagacactgagcagtattttagctttctggaagtcttgactgaggggaacaattggaggaagcaatgtgaagtagtagaacaattaaggctgctgctgagggatgatgaagaagccaggatttttatgggggctaatgggtttgttgaagctcttttgcagtttttgcaatcagctgtgcgtgaaggtagtttgatggctctggaaagtggagcaatggctctcttcaacctggctgtgaataataacaggtctgctttgtatttctagttttaatcattaagtaaaagtaaaactgcttttcatatgattacaaaatcaaaataattcttgatatttgagattgatatttgagaatcacaaccttgtgttttagccaaagccattgatgatcaaaactgatcactgagatttgcatagtgctagtggatgtaaaaaattgatcactgcccacattgaattttgttcgttcagttaatatgttctaataataaatctggcttaaatttaccaatatggtagagttgatgtttcattagctccttctaaattcacataacttttgtttttttttaacctctgcaaactattaacttgaggttgatctttacttttcaacagaaataaggaaattatgttatcggctggagtattatcattgttggaggaaatgatttctaaaactagttcttatggttgtacaactgcactttatttgaatctctcttgcctcgaagaagccaagcctatgattggcatgagtcaggctatccagttcctaatccagcttcttcaatctgacgctgatgttcaatgcaagcaagattctctccatgctctctataatctttctactgtgccctccaatattccatacctcctttcatctggcatcatgagtggcttacaatcccttcttgtaggcgagggggattgcatttggacagaaaaatgcgtagctgttttgataaatttagctacttctcaagttggaagggaggaaatcgtatcctctcctggactcattggtgcattggcttcgatattggacaccggtgagctcatagaacaggagcaagctgtctcttgtctcctaattttgtgcaatagaagtgaggaatgttgtgagatggtcttgcaggaaggggttataccagcattggtttcaatatcagtgaatggaactccaagaggtcaagaaaaagctcagaaactcttgatgttgttccgagagcagcgacgagacccttcaccagttaagacacatcagtgcccacctgaagctagcgatttgtctatgccgcctgctgaaatgaaaccgctatgcaagtccatttcaagaagaaagtctgggagagcttttagctttttctggaaaaacaagagctattctgtataccagtgttaagttccattggttgttgtaaatctgtgttagcatctttacttttgtggccctgcttttatcctcctcccgtggggtgctgcttatttttggttcaaagcgaagaagatatgtacaggcctttgtaatttatggattttgttttcttctttcgctttcctctttgtaatatcatttttccaagtattgttgtttttcttttctttcttttttatgttcgagggtgtttatatttcaatggggcttcaattcttaggcttaccattttgaagttaactgtgaataataatatcttaaggtgtttcttggtgaacaaactataaaggtcacacaatagtagttagtaaagagtgcaagttttcttagaagctagcggatgtcgctttagccattagtttcagctttaaacagtcatgcttcttctttggtccgtgtttcttgattgctttaccgcaattcttctcaagtaggatttcttataattccttaaaaaaagatgtcttatataattcattttgaaacaccataaacgtcaagtaattaactatttctcatgaaattaaattaaatttctcttataattatactcagtcacttgatttatcacagtaaaaaaaacacattatagaagtcactaaaaaaaagtttaagagcctccaaaattgttattaacttaaacaaaataacatccattttgcaagtatcatcttttttttttgtcattcatttttattatattttataaattcaaattcatcacttttttttataacagaaacatatttttaaagaaaaatagtaattacaaaatgtaatttaattttttcttaataatatttcttattaatattatgtatatatcttatctaaatctaatctaagatatatacaaatgtgaatatacatataaagataatattttgaaaaacacataaattaaataaatattcttataactatttatatttatacaatataaaactgtaataaataactataatgtaaggtaggaattattaactataatgtaaggctagccttttacaacatttctaaaaaaataattagaccgcggggtggtactcctttaatttgattgaggaacatcacgctcagtcacttgcattacatctttttgctttctcgagaggaatacgatggtttctcttcccatagttcaatatgaagagaaaatcatcgaaactgttgagcgcaaccccgttgtcgtcgtcatcggagagaccggttccggcaagagcactcaactctctcagatgctccaccgccgcggctacggcaaaatcgccgtcactcagccccgtcgagtcgccgccgtctccgtcgccaggtaactattcttcattttcactgaattgtgcgtaggactcctcgcgtcgtgtttccgtttctcactaagacgtggccgtttaaatcccgcagacgagtcgcgcacgagctcggcgttcatctcggggaggaagtagggtacgcaattcggttcgaggataggacttcgcacagcacacacataaagtaattgcgttttcgttttttattattccattgacttcacttggttttattttcaaattgtctctgattgtggttgatttgattgaattaaggtatcttactgatggtgtccttctccgagaaagtttagctaatcctgagttgaatgagtattctgtgatcatattggacgaggctcatgaacggagtttaaacacgtaagattattgaatactgtgtgctcttgttgttgtcaagtgtttggtgtacaattgttctgcatgaaactttttatgattggtgtgtttattgtcagggatgtattgatggggctaatgagacgcttggtaaaaatccgttcctccgatctcaaggttttgatcacgtccgctactcttgatggcgaaaaagtatctaagttctttgccgattgtcctgtattgaacgtcccgggaaagttgtatccggttgaggttctttatagccgtgagcgtccctcaagctatcttgagtcttcgctgaaaacagctcttggtatggcatggaatttgaaccttatcagcgtgttaagttaaatgtctgcttgggtcaacatcaacatcaataacacctttaatctaagttaattgggatcaatgatagatgaacacaatgatagatagatgatgttgaaaaaaaggaaggtaaaagcaaagaaggggaaaatgagaggggagatgaagagaaaaaagactaaaaagagactatctaaaacttagagataacaatgggtctaaccctccaccaaatttataactttttttcattcgatcctaagacataccgtccatcaatctatatctcactccattaagtcttgtttaattacatttcctcacgtaagtttcggtctacctctacctctcttttgtcgaactcttggtaacaaacttttgtttttatgggagtatccaagggttgtctcattaaagtgtccaaaccatctcaatttatgtttcctcatcttttcactcaccagtactactgttctctttcatcgaatatcttcattttttattttatccatcttcgtataaccacacatccactttaatatcgtcatttctgctatgcttattttatgctgatgttgcctatgtgttggtcaacattcaactccatataacattgcaggtcttacagttgttctataaaattttccttttagcttaagggaattttgcagtcacacaacaacccagatgcgctctgtcatttcatccatcctgctttgattctatgatttacattctcatcaatcccttcatcttttagcaaaattgatcacaggtatctaaaaccatctttctcggataactcttgatcaagtagatgcacggggtcttgatgatcatttcttactagtgaaaactcacatttcatatacccagtcttgctctggcttaacgtgagtcttttagactccaaagtgcttctccacaattcaaatttcctattaactccgtctttggtctcatcagtaagcacaatatcatatgctaaaagcatacaccacgacactttttttgaatatcttttgttagttcattcatcactaaagcaaagagataaggactaagagctgaaacttagtgtatatctaccgtaataggagaataacttgacatttcattacaagctttcacatatgtggtagtcttatcatacatatccttgattgcatttatatactttaatggtacttttttcttctcaaaagtccactataaaacttttcttgggactttatcgtatgctttctcaagatctatgaacatcatatgtaagtctttcttcttttcttgatatcttttcattaattgtcgcattaaggaaataacttccacggtacatcttcttgacataaatccaaattgattttacagaaaccttggtctctgtcctcaagcgatgttcaataactctctcccacaatttcatagtatcgctcataagcttaatgcttctatagttagaacaattttggatatctttcttatttttgtaaatagacacaaatatacttttcctgcaagcatcatgttgtatactttgcttgcttttgtatgtaaataaatttgccttggcatcatgtagttattccaatgctatgtcaaagtgttaaatgtttgccttgccctttgcttattgataaaaacttatacgagacatacctattttttttttccgttaaggtaacatttccttaaaactggtattggctcttaaaagataatggccatggttaaaattgtttcatgtgagaacataagctgctaagaggggggatgcattttaaatctgaattgggaaatctttcgttcatgacttcatgttgatgtaaataatcacattcacttccttcagctcctttactgattgaatggcttgtaactctgcaagtagaaagtcaggaaatgttgtcatattcctgttgttttgaacacattccgtttcagatgtattatttcctttagttgtatttttatttttatttctagtgattgactaagtattggttttgcagatatacatatttgtgaaccggaaggggatattttaatattcatgactggacaggtgaacatttttgttatgtgctatttatcgtatacttttctactccacaatttaaatcttagtatgtattttgattataacttatttaggggaaatagccccttttctgttttgaagtttcccgagatagatttcctgtttctgtgtgtataagtatttgttttccagaactaacctgtatcctaaatccctcgatttctgatatgatgcaatgcaatgattgaacatctttcaatgatcttcatgtaggatgacatagagaagttggtatctaagttagaagataaggttcgtgctctcgaggaaggttcctgcatggatgctataatcctccccctacatggttctttgccccctgaattgcaggcaagtagttactcactctaggttccaaatacaatcacaattctataaactgatgtgatgatgcatgctgatacttcagataaaagaaacagcaattgtgagaatatttggaaaggcattttaatttcattcttatacataattcttagttttctttttagttctgtctataaaaaacttgactaatttgcatttgaagattgttgctggcttaggtgtgaaactgccttgagtgtatttctcttagttcattcctcttttaacttgttgcttaccttgtttgctttgtattacatctcaaatgatatttcttagcttgcaattaacactcataattgttccttttcatatgggggaaaaccttaaatatacaatggttggtgtttgagatattttatcccagaaaataaaatttgaggcattataatttttttggtgcatttgatactcgtgtgtaaccgacttcacctagtggggtaaggctgttgttattattttgtcgttgaaactcatgcatttattatttaatctttcaggtgcgtgtatttagtcctccacctccaaattgtagacgaatcattgttgcaacaaatattgctgaaacttccttgactgttgatggtgtagtgtaaggacattgattcttgattaaatattgttattttatgatcatcatgaagataaattattgtgtattattattgttgttgtaattgctattattacttattattataattcaaatgttttttttttctctctctatagcctattaattttcatcttaaccagagaagagattaaaagttcgttgaaaaccaaaatttcctgtaatacatttattgaataagtactgaagttcatgattaagctattcctgtaaaagcaatgtcaatattgcttaatgttgcacccagacgagtatgaaaacattgttggcaaaataatagtgagtgcttaatatataccacaggcctcagctggtgatgcattctatttctttctgacaaaatttaaaaatcacatgcaacaggatgtatcattgctttaacttattttttagattgcatatgttttgaggtatgtaactatgcagtttttgtaacgacaattaatttaaagactaaataggggtagggggagataatgacatgtagcatattatgagatgcaactattgagacaagtcagacaacaaaccctgctatttgaattcacctattgtgatttggagtgtttttcagtcatttactcctttagatcaagcacataaacttgtcttctcatagtttctgaaactgtttttaattttatgaattttaggtatgttattgactctgggtatgtgaagcaaaggcagtataatccatctagtggcatgtattctcttgatgttgttcaaattagcaagtaagcaattaatagtttggtacctcgttgtggccttcataaatttttaaatacccaattcagtagcggtaagatgatttcaaataattcatgtgcagagtgcaagctaaccagcgtgctggccgagctggacgaacacgtcctgggaaatgctaccgcctatatccttcccgtgtttacaatgatgagtttttggacgttacagttcctgaaattcagagatcttcccttgctggcagtgttctttacttgaagtcattggacctcccagatattgacattctaaaatttgactttctggatcctccatcatgtaacatactatcttgggaatctttttttgtcatctcaaacattttaattcctttttatatttttgggggagggggtcggtccttatattagtttcttgtagtttcaaatattctttatccttgactagcagctagcaagttaatgagttttgctcaagtttactctggtgatttaataactgggttttctgcagctgagtccttacaagatgccttgaagcagttatttctgattgatgctattgatgaaaatggtgcaattacaagtattggacagaaaatggctggtacttgatttctttctttacattttagtgttgaatttttaatatctgtatgtagaactaacacattatgtaacattgttatcttcatcaagattttgataatggctttcactagtttaccatatttctgtctattattttcatagaagtttctttctgctaggcttgacatgaaagttgtgcttggtgttgaccataaaatttattcttttcttacccattcattttcctaatcatgtgtacttctcttggttccctgagttgtttcttgattctatgcagagcttccattagaaccatcgttggcaaaaaccttaatggaggcaaacaattatggttgcttatatgaggctttgactgttgctgccatgttatcagctgaaactacattgctaccagggcagaggtggactagtctgaactctgaagtttatatagatagatagagatagagagggagagaaagagaaagagtaggaggatcttatcatcctccacgttttcaattatactgaaaaggctactgtctttcaaataaatccattcttataaaatgtttaacaatttacatacttgtgaataattctactatcagtgaacaaaacaaatgaaaaaaaaacaggaacataggatgatgtgtatcttgtgttttaccatgacgaggcttatacgtttatacatcgacaaggactgagtaactgagcagtaacaaaactcctttaatgtgcagaaagactgagaagaagaggaaacatacaatatctaaccttcctgatggctccggattgggtgatcacattcaattgctgcagatatacgaggctgggatcaaactgattttgacattggctggtgcaaagataatggcttgcaggtacctatatgtgatctagtaatgtcaactgtcaaggctgacataaatttgggactgagcttttgcaatgtagtctgttaaaaatgtttagctagaaggctaatatccttgtggaatatttgtcttcactcttcacacatttgattcagatatagtatcctttaaagaaaaattcttatgggtcattgtgaaagacgtactgttatttcttgattataatgcatgcttgcatttttattttactgtcagttatctaaaatttcttgtcttcataggagagccattctaaaatatgaagtgatattatgtacatatggatcttttgtatttgttcaatgcataatatatgtgatcattctggaataactgattgaaggtgcgagggatgttgtttgtcagagacgtccgtaagcagttatcccagataatgcagaaaatatcaaagggttcgtattccacaatcttgaggaatttacctgtataaagtgaataataatatacttttacatgctgtgataatgtcactacactagtaaaaacgaaccagcattttgattttgacacattcatatcctctttaatctttttattcgttaattttaattgttcttttccttttgccttgccttcatccttattgtgttgatatgagcttgtttgtaatttgtataggattaatggggtcaaaactcttaagttttggcaaaactattggtttccactatatctatcatgttatgtatgttgtttcctccccactttacatattttttcaatctcgcaataggaccactggatgtaagggaaagtgggaaaagagaagagttcaggcaggattatcgaaatttgaggaaggctttatgtatgggctatgcgaatcagctggctgaaagaaagatgcatcacaatggttatcgaactttgggtttccaagctcaagtagtccaggtaatataagtttctagtcactattgcatgtcaccattacttttagcagctcttttgattcatgttgtgttaatataatatctcctttaagttttttcctaaattcttacacttttactgtgaagtccatatctaagggtgatggaacttacagaaatgtcccaatgaaaaaaaaagtctatgtactgtgaatttgtggaagttcagaactagtaactagtctttgtgaatttcaaccgaatccttggtttgtagatacgttaattttctgaatcttctatactaggtgcatccgtcatctgtgttgagtcttgatgacctggggaagttcccagactatgttgtgtaccatgaactaattgcaacaccacggccgtacatgagaaatgtatgtgctgttgagatgagatgggttatacctattattaaaagctcaaaaccctggatgtgtacaaattaaggtaggtaaatatggcatgtgtggacagtttttttttctttttcattttttgggtgggagggggggctatgatcattgatggctctaattcctttatctgaagcagtggtggtgttcatcatgttgaggaggaacctgagaaaaagcttccagatttacccaagaaggatgttgaggtggctagtactgctgatcaccgtgaaagtagaatccaagctgctagagaacgatttcttgctcgtaaaggcaaaaatgagcctgaaaggatgaagaggtcaaatacactagagatgatcttggcttgtcaggcattttattaggtggtatagttacctgaaaggatggaagagtctggatgagctgatgcttttgagttttccacgttgtcacaacaccattttcgtgctatgatgttatctcagcttgatcctcatcagttgtctctcgcaaacattacaagatttatcacagaaacctgagatttggtctcatactgttctgataagttggttgagtggctgaatgcatatatactttgtgctcatgcttttggtttgaaatatacccagaagaagaaagaaaaaggaagaggaaggaaagaggagacagaaagtagcaaatccccttgacaagtaaatgttaattaaacagttaagggttttgaaatgcaatcgtggttactgacatctgattgagataattacctttgggtggcacactttgcctgatagttaaattacatttttgtttatattgaacccgtttagatggagataatgcctagctgagattgcattgggagttaaacatacaaaacattatggtagttatgtatatgaaacaggatcaatctttgtctaataggtgttggttctcaacctgatgatcactaattcaaggtgtctggacatcacatataatcaatgattaaaaaaaaatgaaaaaggttttcaatttgggtcttagtctaaaaaaaaattggattataatcaacgtaatccagaaaatagaaatcaaatatatttgatttctactatttgagaattcgtccattttttttttaatttcatctatttaatttgtattgattctaatgaatctaaaataataaaaaaaaacaactcttattcttttagattttggattcttttacaatccggtatcataataagaaaagaaaggggaaagactgagttgattgtcctctaacgatggcatattctttgctttggtgtattaagatttcaatctttgcgtatctcttgtcatgtttaatcacgttagcatacataccatagcatatgcaaaaatatttatgtttataaaaaatctttcctggccagtgagggtgactcaaatgataggatcaagagttatttagttcaactaatgttgattaagtttagcggtaccgctgtgggtcaattgtaagtacttttatacattagaccatattaaatggccatgattaaaaagtcatttaaatttgattcatacaatatatggatgattggaaaatgatttatatgcagtagtatatatatatatatatatatataattttttacaataattaatactagttttcactttatatatatatatatattataatactagtacaaatattattgtttactattttccaatcgatcagtgaaggtcaattcaaatggtactactgtattaacaggtcaattagaaatttagaagtatttcatagactggattgtcatggagatttatgttgaacttttgactttagtgatatagtacttctttttacataaacttttatttcaaataaaaaaaggaaaaaatcacgtcattactactatatacggttgtacaccatgcattgaaagtagcaaaacagactcacgggacaatcgacagaaccgcgtaacacgtagaaggagcccagaatgacgatagagagatattttgtcgatgcaatgtacgttccaaagttgataactagcgtacagaattaagtatgcaacagcaatttcaagtaagagaatttttatgataccttcatgaaaatgatatttaatgtgaattaattacaaagcgtttatcaattactaactttataataataattttaattttcaatatagttaataaaaaagcttcacaagtcagcttaataattatgctcatcattcttaacatagtaagtagtaaggtgtttttttttataatcttttttatagaaccacgactttctttgatttaaataagattattatagacgataattattttgagtacttaatactttatattgcttcatgttctaagctcaaagtcaagattcaaaaatcaatcttgtatcaatttattttttgcacattatttaataaacaataagtttgatttttggacaaaaggagacactactcattccgatgctttcatttacgatagagggtccacacacttgcatgcagcttctatgccaaggtggcggcttgtatagctcctatattgcaaggtggcacttcgtctatatagtttctgctgtcattgttgacaaggggaaaaactttctgctttaagtaagaaccatgaatctcatactcttctagtcttctgactctctttgtttcatgaaagttaatgatgatatagtataatcactatactatcactcaaatattcaggatctagttatcattcttttccccctataaaaatttcctttgagttttcagcttctgttccttaggagtttgaagttttcaatactgaaaaatgaaactgactccaagagaggtggagaaactaggccttcacaatgctggctaccttgctcagaaacgtcttgctcgtggtttaagactcaattattctgaagctgtggcactcattgccacgcaggtacttgcatttgtatatattttctcttttttttttggtgattaatgattatctaacttgcatgcttttttatttatttattaatgattatcttccttgcatgcatttgtttttatatatagattatggaatttgctcgtgatggtgaaaagactgtggcacaactaatgtgcattgggaaacatctattggggaggtattgtatttttgtatatatatatattatgtcatttttcatcatctcattctcaaaccccatgacatatatatatgctttagataagagtttcatcgaagtatatgaatggactccatcttcttttagtcattttgaactagaaaaagctgaatgagccattttaaacaggagacaagttcttccagaggttcaacatctcttgaatgctgttcaggtatttgtctcactatggaaatgtagctattatctaccaataaaagcactctcactaatggctttgtagacattacacgaagtctcattagttcagttactaatgacaatctttctttttgcccgctataattcaaactacatatttttttcttatagaaagtgttaatatatttcctcattatttaatctatgtattatggatcttgaacttcaaatggataagtgtatctccaattttgtcgttatttatcttaggactctactctatccctctgattataaaattttgtagtcattattaattattattacctgtatttatttttaatataggttgaagctacctttcctgatgggactaagctggtcacagttcatgatccaatttcgtgtgagcatggagatctagaacaagcactatttggttcttttcttccaggtttgcttctattatgatcttgaaaattgataatttgttagttggtatatctctctctctgatgagtgtttccagatgtgatcatgccatgcatgtactttgaagcttcgcttaaccatcgcatcgcttacaaaatgcatcttttattatattttattcttctgtatatttttctgttttggtttataatcaacattttcattgtttattgggaaaggaggaatctcttgttttttctattttaatattgaattatgagaggttaaaatatctatgaagtgtaatttgaggctaaattttttgataaaagattattgactagtcaatgatggtcagccatctggtttttctttttaaattaaaatagcttgaaacatataaccagtcactacattattccaaaaagctaaatattcctccaatatgcatatggtttgaaaacattcactcctttagtgtatagtttgtatggtttcatgttgaaattgttgggtaccgagcaatccacaacaatcgagatatgagaaagagagaaaggggaagaaaaaacaacacacataatttacctgattcacacactgtacaattgcactcagattacaaggaaatatataaacttagaaatcctaagcatatagctattatgggcccaagcaaactaaaataataaaacacgagccaacaacagtactaggcctcgaaaaaaaagtttgggggcgctgcccctagccccccaggaaactcccccgggccctcgcctgctcacccccatgcatatctgctgatggcatagtatgagccatatcaacaaaaatcacataacacacttaaaaaacatgaaaaagtgaaatctatatgaagttccttcgtgttaacatgaaaatttgacacgattttcctaaaactgatgcaaaaccaagcatattatggttatggatatgcacaagtacaggtttattctgtaggtacattagcatttctcttgattgggaggaaaatgtgtttgcagtaccttcacttgacaaatttgctgagatcaaagaagataatagaattccaggtgaaataatatatggagatggaagtctagttcttaaccctggaaggaatgcagcgattctcaaagttgtcaacaatggagaccggccaattcaggtgtttgccttatattgtctacaagattttttccattgtcttgttcctaccaccttaacattttaaacaatttttttagttttctttatgcattaaaatgtcaaactgatttatacaatttaaaaatgcccaagatttgctattgttacatgcatggctgcagcttctgaatgcagtgtgataagctgtttttattaacttattgtagcgtatgaaataatgaagtgatgttaacgactgctttcggtttgtctggttgttgtttactggttcattatttgaggatttcatagggtcctctggagactaaaatctgagtatgtgcatgctgttggcctttttaattcaagtgttgcaaatgtagacaatttttttcatcttgtgtactactgtttcacaaatcagaagcttttgagttttttcttgtcagaccaaatattgttacaattttgaaacttgtcagaataataaattttaggagttcaaatatccaaacaaatttatttcttgttagcttttccaagtgaattgaagcaaacattgcctaatagttatgaaaatttcaggttggcagccactatcattttattgaagtaaatccctacttgacttttgatcgaaggaaagcatatggcatgcgcctcaacatagctgcaggaactgctgttcgctttgaggtgcaattctacattgctgcaagttatttatttatttatttatgacatgttcaacagttgaacacttgaacttattaatttaataggttctaaatgattaaccacatacatatttgctcttaaaaagccaggggattgtaaaagtgttaagcttgtaagaattggaggtaacaaagtcattagaggaggtaatggcattgctgatgtcaagttaatgaaaccaatcttaggaagcaatggaggcagtgtgcaaacggggatttggacataaggaagaggaagatgcaaggtttatcatttgttactgaagtacttgttatatacctttgcttacatctttaactattccacatttgagaataaatgaagatttcttacctcaaatgtaaatttcccagtgaaggtattactggtgaccctgactgtccattcaccacaatcattcctcgtgaggaatatgctaacaagtacggtccaactactggtgacaaaatccgtcttggcgacactgatttgtttgctgaaattgagaaagattttgctctctatggtgatgaatgtgtttttggaggtggaaaagttttaagagatggaatgggtcagtcatgtgggcatccacctgcaatctccttggatactgttataacaaatgctgtgataattgattatatggaatcatcaaagcggatataggcattaaagatggtctattgtctcaattggaaaagcaggaaatccagacatcatggatgatgtattttttaatatgatcattggggtaagttcccttccaaaaatctgaagcaattaactgaattcatacaccattatcttgacacaacttatttgcatgtcattatatcaaggctaatactgaagttattgctggagaagggttgattgtaacagcaggggctatagattgtcacgtgcattatatatgccctcaattagtagatgaggccatatcaagtggtgagttttacaactagaatcaatttataaagaaagatttcattacagggtatcttttaaatattaacgaatggtcaaggaagtacaggttctcttactttctctcatgaataataaacactcccaatctttggttaaaggggagaggaattccttcttacatttctcacctcatctccttttccccatggtagatatcagcctatgcagatgaatttgatggatttaatgagtccttttgtactttgtatgtaggcatcacaacattagtgggaggtggaaccggaccaactgctggaacacgtgccacaacttgtacaccagcaccatctcagatgaaactaatgctgcaatcaactgatgacctgcctctaaacattggtttcactggaaaagtgtgttgcctttttgatatatcttctgtttatatgtcttgtttttcttggcatattgcaaagttattttttttgttccttgctcaatgttatgtgatggatttaagacctctctttcttcaaataattcaattaactttctattggttgctttagggaagtagttccaagcctgatgaactacatgaaataatcaaggctggagcaatgggactgaagctgcatgaggactggggaagtactcccgctgcaatagacagttgcttgactgttgctgatcaatatgatatccaggcacaacattcttcattacattttttttgtaatttttatcaatatctgctgctaacttttatgattacagattaacatacatactgacaccttaaatgaagctggatttgtcgaacatagcattgctgcatttaaaggaagaactattcatacttaccacaggtataatactaacttcaaaattgattcccccttataaatctcagacatgacatgtaaattcaatctataggagtattagtgtagggaaagcagctaacatatatttataatccatcatttttctattgttattgaatatgatttcatctgtgattaataggtgatagattaaaacttatgtctttcctagaataaattttctcacttctacaaatgccctatgcttatggatattgctctttcctttgggaatgatgacttggacatggtttatactttatgttacatattcacttcttgcaatcacaaatggaaatggaaaacacaatgcagcttttattttctggtctaagttgtattggctgattcttgatgtttcatattgtttacttgagcagtgaaggtgcaggtggtggtcatgctccagatatcatcaaagtatgtggtatgaagaatgttctgccctcatcaacaaacccgacgcgccctttaacagtcaatactatagatgagcatcttgacatgttggtaagatataaatctggtagaggtactaatgatgtgcattgtgatgacatgtggttctcaatttagactttctatgacatgcagatggtctgccatcatctgaatagggatattccagaagacttagcttttgcatgttcaaggataagagaaggaacgattgctgctgaagatattttgcatgatattggggcaattagcatcatatcttctgattctcaggctatgggtcgagttggagaggtttttattcaagctcagccatctacatatgattttcttcctgactcacctttattataatgaaaaatgaaaaaataaatatggtgcttcatacatttgtctaagtgttgaaatgaaatgggtaatgtgcatgtggcattttcacaatatgttttcttttaagatctgttactgtgtcatctttatgtgttgtgtccaatacccccatttgtttttttgtagttcactagtactagtaactattggtgaaaatttagctttttttcccctttttgaaccctcagggtttgataagttgcattatttcttccttaggtgataagcagaacttggcaaactgccaataagatgaaggtacaacgaggaccactccagcctggtgaatcagacaatgacaacttccggatcaaacgatacattgcaaaatacactataaatccagctatagcgaatggtttctcacaatatgttggttcggtggaggtatatgtgatttttaaatgtttaatgcatgctcaatatatgcattaattttctaggaaaagaaaaaagaaaccctgagatttccttttgattaaataacttattgtatacaatgtgctttaccatttaactgattaaagtacaaggtcactgtttcatatttttttgtcaaaaaagaatgttacactttggcactttgccatagcctatgacaatctcattcaaaatgagaggagtgaaacagaaatgcagaaattactagtgatatttcccgtgaaaaagcaaggttgcaaatgtcatcaatacttgctgacctatgttggccattggcctcttgtttacctcaggaaagaagcatgcacatgttagttggtacttggtaagaatttagtggattagataagttcgtagtataatttatgagtagtgctataatagtgaatacttgtacttgcttagctattcacgtggctgcatataagttgtttaagcagttcttattgaacatttgaacttgaactttcagtttttttattttttattttttgaaaagttcagattgagaaaaatgaatagttaagcatataagctactatacaagtcggttttctcttctctcataatttaacttcaaacttaacatatcagaggatagctataaatctgactctaaaccttctaattttagcattatcatctagatcactgcatttatgtgcctaactttgcaggtgggaaagttagctgatcttgtgatgtggaagccatctttttttggggcaaaaccagaaatggtgatcaaaggtggggtggttgcatgggctgatatgggtgacccaaatgcaagcatccccactcctgaaccggtaaagtttttgtatctagctaactagtttggctagagtttttaagtagagtgcctcttgcttagtctttttggtatttagattccttaatgttgttctatatttcctgatttgaccataaaagaatttaattgcttatactaatggagtctattttagttttcttaagggcacacacacctcacctcacatcggctaatgcatttaggaaaatgaaattggtgccaaacttccaatctaagattcgaacaccaagcgtctcgagtaaacgcgtgactgaaaattaaaattatataagatttgcttaatggtgacaacggtcaaacgtattacactaatgatgataaacttttcattacttgtttcattagcattcagaatcaatttcatgcaccattgcacaagttctaatgtaaaatttgtggttgagactaatttggacacacacctcaatgagattagaaaatctatattactaaaatataaaatagacagacagacaattagtttgtgttttgattggcgtttcaaatgtcccaaacgtccgttcacactttctaatgcacaaatccaaaagctacaatactgaagctttgagaaaaatgtcttgcaaacgtgctcttagttgttggacaattagcattttgatgaaactgcttccactaaacttattaaacacaatattgtaggtgaagatgaggcctatgtttggaacactaggcaaggctggtggtgctttatccatagcttttgtgagcaaggcatggaaccctctatccctcatacttacataaacaatttagtactaaaattacaaactcacgttattgttgttgtttcacaaacaggcagctgtagaactgagagtacatgctctatacggactgaacaagagggtggaagcagtaggcaatgtgaggaagctcaccaaactagacatgaaacttaatgactctcttccacaaatcactgtcgacccagaaaagtacactgttacagcagatggcgaggttctcaccagctttgcaaccacctttgttcccctttctcgaaattacttcctcttttaagtactagctccataaataaagcttataaattatctctcttctaaggttttaatgtgtagcactacctttataaattttttagttcccctactcttgttcttatgaattcagatgcaataaaactaagtgtgttggtttggtatctgttatgttttttgttctttttaaggcatcaattatgctgtggtgaagatgcacaagatagaataaatcactagatgaatccctgtttaaagaataagaagaaacttggtgaaaaagtagaacaaagctttaaggagaggcaaagcttttattgccgaattttttggtaacacatgcatggtgcaagagatgctcttcataaagtttttttttttttttttgaaaaattgtaaatgcgactctattaatttttttaaggtgaggtaaatttaatatttttgtaaatgctttgcaattcagatatttttgtatttttttctttagaaagaaatttatatcatcatgaaagtcgaacatcattttttccaaaaccgaaaaaacatatatctcttttatacatcttttttattggatgtctttttcaaaagcacatttagtggttagaaagttcagttatataattaaaattgaatagggccctaattggatgagacgcacataattgaatgatccctcatttttctcgtgtttgtttggaagtatatatcataacagtaaaaattaaaaaattattattattattttgctttataaaaatgtaaagaatattttagacaaaaattattcgaacatgagcaattataaagtaataaaaaaatgacctcttaaaagtagcattctcgcgtttccattagggttgtaacctctattgattatcacatttctttagtagaataaaataaaaatattaaaattaaaataagtttatggatttagttaattaataaataaataataaaatattggtatattttacataaataattaattaataaaattttgtacaaattttaaaataattattataagaatcaatcatcttaacatattatatatatatatatatgaaaataagatggaattattttgataatatcaattcgattttcattgaacaataaagaatctaattagataagactatatgagaaccatatgttcactggtacctttttttcacactgtggaaagataaaaggtggaagaagagagagtaaatatctaattttaaaaacattttttacatgtgagagtaattaactgttgttatatggaagggtatttt

SEQ ID NO: 5 - DNA, 750080 bp, Glycine tomentella
agagatgccacagaggatttcaatcctgataacaagattggagaagatggttttggtcctgtctactaggtattagagtgaacggccttttttcttccaagcataaaaatgatgttcctccctagcatttaaaattctaaacaactgttggattgcagggtcaattatctgatggtacaggtagcagtcgagtaacactcatcaaagtcacggcaggaaaccatgaatttttgaatgagataggcaagatatcttgtttgcaacaccctaatcttgtgaaacttcatggattttgcatcgaaggggatcaattgatattggcgtatgagtacatggaaaataatatcctggccagtgctttattcagtgagtttctacccagagtgcaaactattatgtttgtcttttgccttgtcatttattatatattttgtaagataaggtgccaagtgttaattatgataaatcacttggagatctgattaatctgaagaagtttgtttcccgcccttttccatttttctggatacaaaataaggaatgaatgagtgctatagctagttgtttttccttccctttgtctagacaaattaataccctgtgcttagattttatgctgttaaacttttcctttttcccatttctatcactttagcagctaggcaatagaattttgcaaccgtgattcatattaattcaaccataacttctttctgcatcttttataggctcaaaagatcaactgaaacttgattgggcaacaaggcttaggatctgtattagcatagcaaaagttcttgcatttctacacgaagaatcaagactcaagattgttcatcgagatatcgaagctactaaggtgttactggatgggaatttaaaccctaaaattaacagattagtagctttggatatcaaagctactaatctgttaattttgttttacagagggtatatggcaccagaatatgcttatggggttacttgtcttacaaggctgatgtttacagttgtggggttgaggtcttggaatttgttagtgggaagaactataagaattttataccaagtgataattgtgtttgccttttagacaaggtattctactatgcttcaatccctgatacatttttggcattatgaatcccttttgttttggtagttatccaatgcaaatatccatattttcaccattctaaagaaaggtaacaaaatttccattgcaggcatttcatctgcagcgtgcagaaaatttaatagagctggttgatgaaaggttgcgaacagaggtaaacccaactgaagcaatagctttgatgaaagtagctctcctatgcaccgctgtaacaccttcacataggcctacaatgtctgaggttgtgaacatgcttgaaggaagaatcagcattccaaatgctatccaacaaccaagtgattttagtgaagatttaaggtttaaagccatgagggacattcatcaacaaagggaaaatcacagtttgagtacaagccgaacaaacaatataacagaagtccttacacttagctctccctaaacatttggcaatgacctggtgttagttcatgatttcattgttgctgaccatattgcaacatgagatatccttagagcatagctgagatttaatcttttgggataaccaactgtaatgatcaccatttttaggatataacatttttcactccgtctttcagagaatatatttatttctagatccgtgtaaatttctaattgctcttgaagggtactttttttaacctgggtatttcattttgagatattattgtatggttcggtgcagtcccagttaatcttcatatgacacaatcacaagttttcaatttatgaaaacaaaattggcgtgtcatgtggagattgcttgaactaaaatgatctcggaccatataataatttctcatttaagaggtgcatatgaactccttttcactggatatacacaatatttggaggaagaatgtacatacgcacccttgaacttgggtgttatagcaaatagcaacttggagaaagaatgtacatacgcgtcttattaatctttgcgcgactgaaaacctgtttgttatatcttgctcaacttaagaacggcacattgagtttctcctttttatcaggtgtgtggtgtgtgggttcactgggttggggagttagtgagaattacaagttcagtgttatgctccgtatgacaatttttagggtaaaaagtaataatgggtgaagtaatacacctacgtagtgaagaagtgtttctaaggaataagaaatcaagtttcaacgctgccagccatcacagttatgagaaaagaaaacttcgagcttgttcagattaatttgtaaactaagccaccttccccctctttgacaatgatttagttaagactgatgtgtctaaaaaataacttcagtaaattttaaatctctttattttgaatattctactttggaaaaaaaattattattataaatttttattctcaaattaattccatctttgattctaatccattataaaggtgctgcaaacatgagcataatcaggtattaaaggtttaggaagagatgcaacacaagcaaaaatgaaaataaccatcataagttgataaaaagaaaccaaacatacttcaagaaaatataactaaaaagacaaattaaactactaatgtgcattccctaatgatcagcttggggcgtaggacgggataatatagagaataggtaacattcatgaacactttcaataatcactgtgggttccaattcggtcaattatgttagcaacagtttccttgctctcccttaggactttgacactcctctgcagcttttcacgctttccagaaattgaaggtgactcctccaacaacctctcaatcccaccaccactaggggatagcagatcatgaacaatctccttttccaaatccttgttaacaagattgttaatactcagcataagatgtaaggcaattgtgtcaatcaatcttttttgcactatcttccagtacgaaatcatcctcaccttcaaatcaaatgcttgagtaagcacagatgggtattgcctcaagtgaccaacttcaattttgcccacaccttcaagattcacatgcgatggattatgcggattgttcaaaacttcattcagaaaagtatcttgctgagatattaacttgttgtattcctgcacaaactccggattacaagtgtaatcagtatacatctccatttcaatggcctctattacatgattggtggaacttctctttttcttagaaataagaacctggcttgctcgcctggtagacatcaaaagctgatagtagttttcagaatgacgcgtgataactgaaaccagcacatcttcgagatagttccacacattttcaacaaaacctataggcttgttggcaatccctttcaccttcccttgcaatatagaaagaaaagcagtgcgaggcatgaaatttggaagaccaatccactttgcctcctccagcacctttatctcttgcataagaaaattcttgcttgcatcactttcagcacaatggtaaagatcattcgagtaggaatcaagcatctccaccaaccgggcagtacaatgcatgtttttgtcctccaggtactcatcaaattctcctctaagcaaaatttttctgagagattccttagtcaatccaataatatgcataaaagctgtcatggcatcagctactgaagccaagtttgttggcaacttttccaactcagacaaattgttagctagcttctcattgatttttttactatttctggcaaagttttagatatgctcatagcctgaacctgaaccagtttctgtgctagaactggaacacccacgatagacttgtctattttggaaagaagtggatggaactcaaacagtttctgttcttccactctagcatcctcatatgactcatcaccaatgcggtttctcacacaaacataaccaagaccaatgttcacatcatcggcagtaactttttctaacaagccctcaggagacttgtctgcctttgtgaccacagccagtgtcctgaggccagtttggtcaacactctgagacattctaatagactcacaagtagtgaaatcaacactagcagaaagaacattcaggataatactttcttctggcttaatgtactccatgatcatgtctttaatctggtcataaatgttctcaggttgaccatgaactggaacccgagttataccaggaagatcaaccattgtgagatcaggaacaccattcttcttcaccagcaaagtcaaagggttgttggaaatccctttaccatggcctgcaagctcttctgtggcagcatttatggcatgagaaacatttgcttcatcagtggaaacgattttgccattgaactccaagataagctctggggttggaagagggtggttttggagcctcatgaccaagggcaccctagtgcaaatgccttggccacgtggcaagctgataccagcaagagattcaagaacacttgatttgccagatgattgatcaccaacaacaacaatggaaggaagctgaattccctcctttgtaatgttaaggcgcctgagattttccatagcatcaagaactggacgtatcctctcattgtaagaggacacaattggtgcaacaatagcaagaggctgaggctgttctgcagatgggtcagtttcacattgagaaacagatagtgcaacaatagccttagtgctaggtctccttcctccagccattttcaatcacaatcacaatggtaaaaaatatagagagagagtgagagagggatagtttggtatgcttattcttattatgagtgagtgagtaaaaagccagagcttaaatgcatatttatagattaaaaaaaaaaaaaaaaaaaacttagaggaaaatgaaaggaaaggacagtttggtttggtatcttgaaagttgaaaacaagcgtgaattgagcttttcatgggaaccgcagttacagagctgttggggtcttccatgtttaggtaattgaaaggtttctcgttaaatgcatgcatggtagtaattgaattgccgtaaatattagtaacgaaaatttcttacattaattaattcaactcaagtagttttagtaaaaccaaacctgaaggggaatatgtaccaaaaaagaaaaaaactgaagggaatgtagttaaggaaaagggacaattcattttataattcatctgaggaagctataaagttttatttatgagtagttattactattgataacatgcttcggcagtatgtcctctctagtctctcacatactatggcatatgtatggtcgtgacctgtgacctgtgacctgtgacctgtgagaaaatctttgggtattgcttttgttgtcttaaaataaataaaaaattaatggtgctatttaattagtatggaaaatggtgaatatatactttgtttctttatgtatttttttgtgtgagggatttttgtttatttttggatgtatgacaggaaaaggaagggataaagagagaaaatactaatagatgataaaagatgcgatggaaaataaataagttttcatcattgataaaaaaaatactattacaatttaataataatataaagttctcttagtatttggaattttagacttaagatagaaaaaataatttgtttcattttttttatttttaaagaatttaaaatatttaatataaactctaacgaaataaattatagaggtttagagtaattctattctctataattatgaaattatgagccagctattttaggagaagaatttttatttttatgacttttagttttcgattaaatcctagtaaaactaaaagtttatagtcctgcattagttattcttctaaaatagtattttcgtttacaaacaaaagggtgaaaaaaataaaaatgaggaaaatacaattccatacaataaaatcatattttttttattttttttttatcattgggtgtttctgttacgtaaatggaagtaaaaaaaataaaacacaattttattatgcaagtgtgcatgagaatcatatttttgttgtgcttttttttttatccgatttacataattgaaacacatttttgtttgttgtgtttccattcaagaggcaatttggaaatacagctaaaaggcccccacttcgctagtgccaataggcaatactctgtagaatatgcaaaggcccatgattttcattcttctactgggccaacacaaacagcctcgggaccatcaattttatatgttcgagttaaggcatgtgcttcatacaccatttcattttcttatacaccatttgtttttttcgtaatacccaaaatgccctcctagtaaatggaaaataatatataaaggttaagcaaaaacgaccgagagagagagctgggagcagctgccgttcatgtttgcaatccattgtttgaggctttgagcttgtggcattgcttggaatcgccattggtgaggtcgttggaggtgtgcgagctgcagttcgaggtttggtgtcgccggagaggaagagcggaggttggggctgaggtaagctgtattttctaacgtacggattcggtaatccgcaattcaatggtgcatgcatttacggattaggcaatccgtatggtctaaacggattactcaatccgtatggactatacggattatacaatccgtatagctcatatggattgcctaatccgtatgatttgcacggattaagcaatccgtatgatctttacggattgtgtaatccgtatagtccatacggattgagtaatccgtttagaccatacggattgcctaatccgtaaaggtcatacggattgcgtaatccgtgtggatttgaaccatttaaaaaaatattaaaaaatggaatttattgtgaaaaaaataattttaaatattagtaatgccattttaatataaaaagtaattcatacaaaatagatcaggacaaaacatcagaaacatgataaccaacaatagctaaaaaactggagatagggatgacatgacgttgtaacaataacaattgtcaagtgcgaaataagcaaagtaatcatcgttgattggttatttaggtttcctgggtgactgggttgttgaaaatagctaggatttgtattggaccaaaacgtttccagtagttggattccgctaagacctttaacacatcttcatcggttatcaactcttttatgtcatattggattgtgttgtctgaatacgcgtagtgggatggttgtcgaaaaaataattttcttaccacctgtgagttgtgtattccataagggggaaccccaacaggtgcaacttgcttgatgacatccttgagtgtttgaatgttgcatcctgagggtatttgaaacatttttggatttgttccattgaacgaataacccacaccgtaaccgctctgtcgtgttctattccatttgccgttgtaatatagcattgcatcatgtgttcggccaattgtagattgaagtaagtttagtataccgtcggctgttctgttgattgtacaacatatttctataggaccaatagttgacatgttctcactagccattaacattgtgcaaacatcatcatcatttgttagttgtagagaatggaaaaaaatttcctgacctgcatttatagatggttgccgatagtacatttcatcaacaaattggtcatgggttagtacaagtgtgttgtgaatcctggtcttcagtgcctgagaagaacattcatcaggaactcgcattggcactggagtagaacattgaaaagaaacaccagtttcgtcgtgtatgattgatccatttggaaaaatgaatgctaatttggagttagcaatggtttgagtgctggtttctcctaagaatgccatagttatgggtgattttattttgcagatgtatgttatgtgggagaatgaccaaacaagtagggtgtccgtgttatttatagtagggtatgtgaaatttgaccgttgcacatggtgtgtcaggcatgtgtcatttgaccgttgcacatggtgtgtcaggcatgtgtcatttgaccgttgcacatgatgtgtcgagcatgtgttgtgtgcagttttttgtccagcagtgttgtctatgtcgttatgtcattttaccgttgcacaagctttttgattaactgtttaatgaatatgatttttgtgtgtggttttaacatgattaactgtaattatttaccgtgtatgtgtgtgttttgttagaatggacgacgatgagtggatgtatgagagtatcatggctgaagatatttacatgaatgaagacattgcaccagaccctaatgactttgaccacaaagactgttttatagattgttcggcagcgttccaaacaaatgaggtgagagtgtggatgacttataatttagtaatatgaatgtagtttaagtcgttaaacgattatatttgaaactttaaatatcaattatccttttgtgtaggtgtttgaatcgcgtgatgcggtattgaggtgggcccgtactgttgcgtctgagaatggatttgtggcggttatcatgagaagtgacaccaagaccggtaaaataggaagaacgtcatttgtgttaattggttgcgaaagaagtggaaagtatagagcgtggaaaaaaggttttttaccttcaagcacaagtagtagaaaatgcgagtgtccgtttaagttgcgggccaagccaatcgcgcaaagtgaagggtggatggtgaaggtaatatgtggtagtcataatcatgtaatggccaagtcattttgtggacacccatatgttggccgaataaatgttgaggagaagacaattgttgctgatatgacaagagcgatggtcaaaccgaaaaatattttgctaaccttgaaggagcacaatgcagataacgtaacaagtttgaaacaaatttacaatgcaagatatgcataccggacgcgtacaagaggtgataatactgaaatgcaacagctaatgaagcttcttgagcgtgacatgtatgtacattggcatcgagtgaaagatgaaaatgttgtgcgtgacttgttttgggcacatccagatgcaatacaattgaccaatgcatatcatatggtgttcttgatagacagcacttacaaaacaaacaggtatagactacctttacttgacattgttggtgtgacacctactgggatgacattcagtgctgcatttgcgtatttagaggcggaacgtacgaacaatgtggtctgggcccttgaacggtttagagggatttttcttaaaagtgaattttttccaaaggtaattgttacagacagagatttagcattgatgagtgcagtggagacagtttttccagaggcaaccaatttgttgtgcaggtttcacattgacaagaatgtgaaggcgaaatgcaaaacttatatccgacagcagaatgcatgggattatgtcatggatgcatggggaagtgttgtcgactgtgctaaggagaatgaatttgatgattatgttagtaagtttgaggttgcatgtgctccgtggccaacttttgttgattatgttaaggacacctggttgacttcccacaaagaaaaatttgtgacagcttggacaaacaaagtaatgcattttgggaacacaacaaccaacaggtgactttctttgtcttaaattatgattcgcatatgtataaatgctgttaaattaattgttttttctgtaaattgtagagtggagtctgcccattggaccttgaagaggttgctgcagaatagtcttggtgatttatgcacggtttgggatgcgatgaacaatatgataaccttgcagcatactgaaatcaaggcatctttggaaaggagcacacatatggttggacatgtttttaaagtgacgttatacaagagactcattggcatggtgtccaggtatgcgttaaatcaaattgctgctgagtatgagcgggtgcattatgcgggaaaaaacccatctcgttgtggatgtgtgcttagaacagcgtatggtttgccttgtgcatgtgagttgtataagtatgttcttgcaagcattccaattaacagcgttcatgtgttttggaggagattaaacttttcggataatggtcaagatgaaaaccaagtaaccataacagatgagatggaagccatatctaatcgttttgataagcttgatttgtgtggaaaaataacactaaagtcaaagcttaaagaaatagcgtttcctgataagaattcgatgtgccctccagctgctaaggtcaaaactaaaggtgctcaaaagaaaaacatctcaaagcacgaacgttcgacaagaagggacccgtcttacttcgagtatgtcgatgagttacattctgtgcagaatagttgttctacacccgtacagtgcagctcctcatctgatgttctaatgaggaaccggatggttcctatgctcgatcaatttcatccatttatgcagaaatttattgttgacattactgatgtcaaagctgatggaaattgcggatatcgagttattgcttcgttattaggttacggtgaagagggttggtcattagtgcgcaatcatctccttaaggaacttgcacaatggaccgatcgatacattgcgttgtttggtgggatacataggtttgaaatgttaaagcgatccctattggttgatgggttgtcaaaggtgaaaattcatttttattttacttaacattagttgccaatctgttatgttatccaggcatgttttattaaacaatgatctgcaggtgaccatggagaagtggatggatatcacagacatgggacatgtgattgcatcaaggtataacgtcgtcctagtatcgttgtcacggcaacaaagtatgaccttttttcctttgatgggccaacctccgacagatccacgggttcatcgagttttgtgcattggtcatgtctttggaaaccattttgttaaggtaagacacctcctaattactttggatgcatgcttgaaatttaatatattagattcatgatttctgcattaaacaggttactctggccgacaattgtccattaccgttgacggcatgtttgtgggctagtcactgtacaaccgaagctcaacagtggccttactattacgttgatcgaatgcagttgtatacgaaatcaatgaagatacgaacagaatatgttgatttgggaaatgtttagacaatagacgctcagttgacaattgaattgtatgcgttttcttatttaatgcataagaatcattaaaaacatgttgtgtgtcttaaaaaagtcaagcgcgaagtaagtgcaacataatgaactatactttaatatcgatcaaaatatatatcaatcactgtccagtaaaataatgctagtaactcatgtaagtcgaggtcaaatgtatacaactaaaatgtacaaaaaaaaataaacatcaatgtctatgctaagcaagacgcctcctctgtggtcggaaactccgtcgacctctgctgtagacaaggccatcctcagtgacgcctctaacatgctgaagcagctgctcaaccatggcccatgcatctgtgccttctgtcaccatcctcatgtcaagcatatgctgcaggccctctgcaacacgttggcacgcatgctgcaaataaacaacacaatttggttaataaactgaacatctaaaatgtaatccgtagagactgcaagaaataaacaataaataccaaggcatgaagtggtctctgctcatgtccaccactaggtggctcagatgaacgagcatgtccacctgtgggtgcatcagaaggagcatgggaatgggtcggtgcacgctgaggcagtggtggaatctgggaagtcgcctcctcatacgcagatggagtcatgaatggatgggacatgcggaagaaccaccccaggtatgcagcaccacagtgacctggatagtcaaccaagtctccggtgtccaccatgtgctccgcaaagtgaacccacctgtcctcgatgtcttcaaaagaaggaacaccgcccacaggctggggtggaatatgctgcacatggccaaactgcctaagcaccctctctggtagatacctagtaacgtgagggccccatctaaggaaaccggagaataaactgatggacggaaactccctgtgcggccgatgctgagtgtacggtgtccaagaaatatcagatggggtcaacctatctatacgtctacgataggttgccaccggtaaggccttcgcactcggccaccgacaggatcgaggctgcctctcgtcgtagtgctcatctgcaggaacatttcctatagtaggaaaatgctcgtatatccagcactaaaaattcaaaagcaagccaatcagcaaaacaaacgacctataaaacatgatttttctaattatacacatcaaacaacattactacctgtaacagactgatgtatcctgcaagatgcttcccgtgatgctgacatgcgtagctcaagttctcatacatgtgaaccagagcacccgcaccccaggcgaatcctgcagatcggtcgaagtctcggaacgcctccaagaataccacagctatatgtgtggcactcttgttggcgaacaatgtgcagccaacaaggtgaagtagatatgccctggcggccaaaatccactgcctcgcctccaccttcgtgtaatatgtgtcccggagccatgaaagtctgacataaggcccatgacactgggatgtctctgctgcagcctcctccagagtcacgtcaagtagctccaccaacaatgtcatcgcctcgcccacatccatctgctcgtatgagtcgaatatcccataacagggagatgcagcagtgatgacacgtcgtcaagtgtcaatgtcatctcacctacaggcaagtgaaacgaacatgtctctgggtgccaccgctcaacaaatgcagatagcaaccccctatcacctgtctccactgagcatcgaatcaatggactgaggccagtggcagccacaaagccctctatctcaggtacaggcttccccatcttaatgaccttacggccatgggaagcaagcttcaactctgcacgatcctgcatttaacatattatttaaggtaaaattgcatggataaccaaatgcatgacgacattcaactatgttttttggcatgtcaatacctctccggcccagacgcgtacggccacatgatcgcgaaatccgctcagcagagatgaatcctctggcactccagggaaagactccgacactgggtccatatcgtccatgaccgcatgaccctcctcagtgaccggatcagccgtctccacgtgtggttcctgcacggcaggaacatcgtcaatagcaacgcccgccctactacgacgtgcagatgcagtgggcctacgcctctcaggggcaccatgctgatgacctctcccatgtgaaatcgctgaagggtcaggacttcggccaacaggccgacgcactcctcctctggtcctagccataatctgcatccgcatggtgtatttcagtttttcagcttcaacaacaacatcattctttacttgacttgaccttgtctcataacatgcaactatagtactatatatctaggttatctcagccatgcttgtcacaattgtgaccaagcataaaataaaatgccataaaaatgactaaataatgggagtgttcaagttagactttaattactctattgtatccttatgttgtagttagactgttctatttaggcttctcttggtcttgctttaagaaaacctgatgatgggataggattcttgaaaataagcatctcattggctccattttactggagtgccacatgtgattattacaatccaggttattctcttctcctgctcaggagctaatattacaatctttaacattcattcctacctttcaacattaacaatactatttaactcttccaagttttggcttttgtaactgcttatttagtgtacctatctaaaagattgttatcactttaacactgtttttgcaggcaaatcaaataatcatattcataaccgaagcaacaggttttactggtagaaggttggattcctccattaggtgattcactaacaccatattaatggttcaactactgcaattcacaatatgtgtatacattaagtcctactctaattaaaagcaaccaatacatattttcaaatttcgacaactcagcctcacaagcatagttaatttctaatcatataaaaaattaaattatatttttttcggcgcaatcacatatattgacagctcctctttaattattttccagttttccaaaaaaaaaaggcaatttttatctgcagtgacatgctacggattacaggatccgtacgaatattacggattgttgaatccgtaaaattcatacggatcctgtaatccgtagcagtggcacggattcctcaatccgcaagatggacacggatcatccaatccgtaggacttttatggattacgtaatccgtatcatgggtacggattgaccaatccgcaggatttccacggatcaactaatccgtaagacttttacggattacataatccgtaaaagtcttacggattagttgatccgtggaaatcctgcggattggtcaatccgtacccatggtacggattaccggatccgtgtccgccatgcgcgaccaacagacctccaccagacctccatgaacggcgattcacaagccttaaccaacaaagaactcaccggggtgacgacacggactaaaacgcttcaccaccaaagcaatgtgcttgccctgtcgctgcaacaaaccttcgacaaactccaatgctgcggcgacgacaacacggaaccgaatgcgaacaacaagcccggaagaagtctaccctctcaatgatgctgcaacagagggaaaatgaaccgtaatagagtgatggtgttgccggaggagaggaggagaggagaagaagcttgaaccgtgcgtgtgggagggagggagaatggaagaggaaaagctttttcaaaataatagttaattttttttaaattgaagggtatatctggaattacactgttaaaaaatggtgtataagatattgtaatggtgtaggaagctcaccactcgagttaaatccctttttatggcccatgattttaactttttcaaaaagatatttttaatttacatgtagtataatttaattttagtttaccagataattttttttatttctttcttctataaaattttatgaaaaagtttattcaaaaggaccttaattaaaataaattaactttaactcattttttaactttcaaaataatattcggtaaaacaaaactatcaaaatagtaaaaaaaaaaggaaaaattgtatgagaaattcaaaacaccaattaataatgactcgtggcatttgaagaatcacaggattaataagtaagttgccataacaaaataaacctcgttttaaaataaaaattagtatttgcaaattacaaaaattatgaataaaatatttatgttttatttctcttaaaatttcaataaaaaattcaggatttaatcccacaaagatgataaatcttacattgataattaattataagcatatattttttaattactcccttcataaaagatatgtgtataataataaattaataatggagggagtataatatcaacaatttttttcataagagatactccctcaatcctaaaagaagagttatcttagattgtttacatatatcaataaaattaataaataatgaaagacaataataattttacaaaagtaactttaatattaacatttattacatttaaaaactataataacatttagtggtaaaaaataattaatattatattaaaattaaaatacaacacttattttaaaatacttttttccaggaactttagaagatatattctctccaaggttgtattattctatatggatcaaacatagatcctccccacaaacacaacttatattgttaacggaattacatctattccattggattgttgaagttttatctattcctatgttacaacatttataagtttaaggtttcattcttaaataaaactataagactgattttaagagttattccattcttcatctaatcatgtatgtatggtttcttttctatagactattgagcatcttattttacttttttttatataattttttattcttttcaaatactattactcaattttagtttttattttatttcaattttaaattctaagtttttttatagatatagttaaattttagggttattataatcttaattaatgcaaataaatttattttgaattttagcattatattatatataccaataatgaggatttgtttaaaatgattatgatttatttccataatttcttctccaatttggaaagtcttatacctataatttattcctatttaatataacaaaatattttattaattaataaagtactgatattctccttaatttttttcattaataaatttatgaaaaatcatagagtgtaaaaaaattagaaatatttcatccataattgaacaaaatataaaaaaaaattaaatatactgtcatttaattataaactactacatgtatgataaaattgttattgtttataataattatttttataaattataaataaaatcaagttgattaactttacattgataacataaatgaaaactatagtcaaaaataaaattacaggtatagtaagctagctaattatatccattgcctgtgtgagtaaacgaagatgacgaatcgatgatacaatattttaaagtgaactgaatcaactcatcttcgcagtcatactattatttagccggctatagcttgctaattgaatttgtatagattgaaacatcatccaatggctccaagtgtcaagtgggattctgttctgctaccctacctgaatcgaaaagataatcaataaagcaaattaatataattttcaccatcatccaaatttatatattgtatgatgtgatgtgaaccccatgatgtctataatatctgttggtactcttttaaattttatgtaaagtgtatgaacaaaattattttctttgtgacattcataacagactggagtttataagttaattaatttattgcccagtcagtattaattaattacgtactaaaccatttttctcagcaaattgtttagttttaataaacaattaatctccaaataagaagttttagtatgccatattttatttttagccgtgagtgattgccaacgattcaaagggtgccctggcgttgattaaatagaaacactcaagtgttgggaagctcttgtcttggatgatccccaagtctttttcttgctggagagttgctttggttacatgcataacctacaaagaagatttcaaatgcctaatattttatggaacttcttccatgactaaaaataaagtaattaatcttaatttttttataagaaaattaacggatattttttttaatatatatgtatgatttgttatatgtgtatacacacgaatatatataaactttatgttgattttttcattagcaatgaaaattagttattttattttctaaagtaatcctgtagtttaaattggactacattactgaaaacaagtacgtgatgaatctttttaataaaatatgtttttttttatctttataaatatccttaaatttaatttattatgtcctttatttttatttttttaaaaataaaaataaaagacatgataaattatacaagattaaattgaacttatatgaaaaaaatagttaaacaatgagatatagattggtcttctctgaaaagatggtgatccaactcatataatccattttttagtcattttttcttttcatctctccctccttctttcatcattcttttcttttatttttttaatctcctcgtatttattattgggttcatcaactattaatcccaattaacttaagtaaaagatgctatagatgttaatgttaattgtcgtttatttttatttttatgaatttggttttgataagtttttttaaacaggtccctctcatcacttaatgacttaatgatgatgtgtcagtcagatttatatatatatatatatatatatatatatatatatatatatatatatttctaggacactaaattatatgatttagtaagaatttaatgttttcttttttattcgtgtgagaatcaaattcagatatcatcaattttatattaaggcagaatgcacgtatgtagattagattatgttagttgtttctaattttagtgcttgagaattgagtttcactgtgttataatcataatttgagatcccccaatctattttggtaggatatagccattttgtactcgtcattatgcttcttgctgacgctgatggaaaactaccttcgaatcttcctgttctagagtcggcgaatttccatgtaactcaattttgctatcaaccaagaacactacattctccttctaattccgcagaactgatcataagccaataaatgatagtgaccttattaattaattatgaggcatttggtgtgtgcataattatcttttacacatgcattgcctaattggatggatgtatgtatatatagggaagagaatgctcttcccttgttgtattttactacttccatttcttttgaattggctattacaagaagttttaatttctacagagtcatggtatttcattatttttgcttcatttgtttatattattacatgcttgttccttactgttttcaagtttcttgcatgccacttactacttcatttgcacgcaggaaaatcgtgttgttgacgggaatgtggagaagatgcagcgggaggagagagcagatgatctggttgttcatggaaaagttgatcggaaaggaagaaaagctttgaaacacaaacatggggggatgaaagtttcattgctcgtacttggtaaactaggattgacatatataatatgagttcataaacagtaattaacatgaaaatgcatgtatatacatatactaattaaggtgtggattaattatactacctcgtagtactaattaaaccctgaagtgatggcaagtccttaatttaatgaccacttaccatgtgtatataaaacaatacaagtttggtgtggattaattatactacctcggagtactaattaaaccctaatgtgatggcaagtccttaatttaatgaccactaaccatgtgtatataaaacaatataagtttcattacatattgttgtgtctttaatgtttaaagcaattaattaattaagacaaatggataaccagttacacttactacattggtaaataaattaaaaaatatatttttatgaaatacataaaattatattatttataatttttttttacattcttttataatttttacactatataaatatattttttaaaattttttaaccaatattctaaggagaggtcgacacaagactcattaattaattgtgcacagtgcatatacacctcgttcattaattgatgcagtaagtgttaatttgggtttgcatgggtgcagcggcatttggtatagagaacttagcaactctgtctctagcagtgaacttggtgtcatacttcactggtattatgcattatgaactagcagatgcagctaacatggtcacctattacatgggtgttaattacatgctctccattgtggtggccgttcttgctgatacttggattggtagatacaaatccgttgttatttctggaatcgtcgagtctttggtaagatccaaacttaccttaattccttattgcataataacataagttactaatcgttattggtaaacccaagattatatatattgtttatgtgagtttgaccacatatagcaacgtaatctattttttaaacccacctttatacctattctctttttttttttcgattacctcatttattatttttattactttctttcttttatctctcaaagtatgtatataaggaataataaacctagattcaaaaaaaaaaaaaaaaaaccgttgactctcaagtatatagtgggaagagatatacatataaagaaaagaggggggaaaataaatgtgaaagattatatgattggaaaacatcaataaaaacgtaaaataaatataaaaagtgaaaaatatatggtgctgatttttctctatcatgctcttgaccaatatatttacatgaatcataatcaagtattataatttatttcttataaaatgtgatatttttaaatatgtgttacatataaaaagtgattgggatgcatgaataggtggttgtctagaatcatctaataatttttctttagtaaatagatatgatttttcttgttcaccaatagttttcactaattatgaaataaaataaaagatatttattggacaaaatatgaaaatattgaagataaaaatgttttttaatagttttaattacttattttgatttttggaaaatatttttaaaactaaaaaggttaccctaaacataatataacagcccagtaacatcaagagctggaacatgaaagagaatttgataattaaacatataaatgaaaaacagtacagtaaacggagatgttaaactttattaaatgacacctttagtttttttttttactctaaatcaattaattttattattaaatttaaattaaattcttttaaagttatatatagttaaataattagtttatactttattattttattttaatgtatgatatattttatatatctgccaatatttaaattaatcatctaaaatttaacaaatatatataattactgaaataataccctatttctctgtcactcggataacagattctagctagggtgattattagacattatataattgcaggtactcatctaatgattaataatgatatcaattatttaatttaatcaaataaaacaaattagataagaagtatttttaagttattatttaacaacttatatttaagtaaaaagtttaatatctttaatagaaaatctcattttaagatcttagttattatttttacgaatcctacaatgttatattactttaagattttatttatattttattttaataatatatctcattttaagattttaaatcattttttgtatatcctacttacactaatagaatacaagtcaattttgtgaaaagagtaaaaaattattatttttaaatggatactctaatagtcatatgcactaacattatacattgtccaataaataaatcaattatatatatatatataaaaccaataaacttatcacatataatatacaaatgttttacatattatcttttttctcttaaataaaaccaattgaaagtaagcccaatttatatatgcaactaatttactttaaataattttctaaagcttattcaatcacaagtgcatatatgcatgaatgtgttgtagggactggcattgcttacgatacaggcacgcgtgggtagcctgacaccacccatttgcagcctgtactatgtgagagatgcacattgtgaaaagcttagtgggaagcaagaagcatttctcttcattggcctctacttgttggcctttggtagtgcaggtttgaaggcttccctgccatcacatggtgctgatcaatttgatgaaagagaccccaaagaagcaatgcaaatgtcaagcttcttcaacggtctctttttagcactttgcgttggtggtgcagtcagcttaacatttaatgtgtatatacaagacaataatggatgggtctggggctttgggatctccaccgttgctattgttttgggcaccattatctttgcctctggattgccactataccgaattcatgctgcacatacaacaaacggaatattggagatcattcaggtatacactcttttgcaaaccttgttctgcatgtgctgtatatatttcaatttgaaaatcatatttttttttatactcacgatattagtgtgaaatatttattgattttattgataatcgattaatctccatcgaaaaacctagttgacctctttaagtggctctttcctctccatcatgtttttttcatctacaaaatttaaattcgagactttatgtaaagaaataaagtccagtattacccagactaaaatttgttggttgaaaaagtatatttttgagttcattaggcatgcattatgaaagtaaatttttttatacaaattgttaaccaattaaaattgattcatagtatgacttttaaatagtatattataaaaagacaaattaataaacttttatgaaaaccctttacattgttggtagatatattacttaattctatttttatttacttatagtctgattctgatacaatacaatagttgaagtttttaatttagctcgatattgcaatgatcaagcgcattagttttgaattcttcgcgtctattttccaggtctatgttgctgccattcgcaacagaaaccttccccttcctgctatccaactatatgagattcaacaggacaaagaagccgcagtggaaatagagtatcaaccgcagagatattttcaggttcaatccgaccgtgtctaatatgagtgaaatactatatgttaattgttgatagcttaagtattaaagagtaatgataaatgtatataccatggggattctccacagtgtctacctgtcacacatggctaaccatgtgtgcaaataaatatgattaattttatacaattatcgatttgaatttatagtgcttgtatttaattaactatgtctgcaagtggttaatagtatcacgaagttatgaggttattgaaatgtttaacgttggttaactttacctcacaagtcggaaatgattaataggaagggaacttgtatatataattatcattatgtactattgacacaaataattaaatatgtctcacaagtgattaattttcttttgcacaggttcttggacaaagcagctatcaaaagtagatctaatgagcaacctgagaaccaagagactccaatgttggattaaactttaataataataaattagaaatgtgaagattcatatctctaagagaagaagttactcatgtgaaaagtcatgtctttacatgagtcatgtctttaggagaagaagttactcatgtgaagagtcatgtctttaagtttcttataaatagcatctcatgtaaaaggtcaaaagtgtggcttggcagacaattatctaaatacatcagaagtattctaccaaagagattgttgtgtgtttgtgcgagtgcaccagtgtgtgtgaggacctgtgataccacaaattggtatcagagcattgagaaaatggagagtgggccaagtagtagtctgccattaccccgccttacaaaggctaattacgaaaattggagtatccaaatgaaagcccttttgggagcccatgatagttgggaggttgtccatggtggtttcgaggaaccaacatccacagcaggatatacggcagcgcagaacaagacattgaaggagacgaggttgaaagacaaaggggcgttgtacatgttattccgggctgttgatgattccgggtttgagaagattgttggtgcaacgacttcaaaggaggcgtgggacatacttgcaaatgtctacaagggtgccgatcgagtcagacaggttcgacttcaaactctccgtggagagttggaaggaatgaaaatgaaggaaggagaaggggtatccggtttcatcacccgggtccagaccgtggtaaatcaactaaacagaaatggagaggtgttgtccgattccagagtggtggagaaaattctgaggtctctcactgacgacttcgagaatgttgtatgtgcgattgaggagtcaaaggacctagcaacgctcaccgttgacgaacttgctggttccttggaggcgtatgaacaaagaaagaaaaagaagaaagaagagtcactagagcaagcactccagacaaaagcttcaatcaaggacgaaaaggtactctattctcaaaacttccgaggaagaggacgtggctatggaggtcaaggagatggtctaggtagtaaaggccgcggtcaagaaggaaggaataaggagtatgctgaatcaagtcggcagaattggcgaggccgaggtcgtggaagaggccgacattcaaatcaatcaaatgtagaatgttttaaatgcggaaagtatggacattactcgagagattgcaactcggacagatgttacaactgtggtcgagtcggacattttgcgaaggattgtcgagatgaaagaagaaatgaaacttcaaaccttgttacagaaggggaagtaagagatggaggaattctgatgatgactagaagtgaagtcaaccagggatccgagatggaatggtatctagacactggtgcaagcaatcatatgtgtgggcataaacatttgttcagtaatctgagacaaatagatgctggacatgtttcgtttggagatgcttcaaaggttgatgtcaaaggccgaggtacgatttgtttcttatagaaagatggacgaattgtgcgcatccgagatgtctattacgtgcccgatctaaaaagtaatattcttagggtggaagagaggattcaaaattctagaaaagggtggagaggattcttgtttgtgtctccagcattaggctgttgagagagcgtctccgagaggttgagagcaagttgagagcgtttccaccattgttgttggtgaggttgagtgtctccggctgaaggccgttgagagtgattgtaaccattattattgagaatagtggattgttctagactaggtcccgtgggttttccttttgaaggttttctcccacataaagctattgttggttgagtctggtgactccccagtgtttgtggttggttgaggtgttgctcccaacagagaaggagattgtgtgtttaatcccatcaaagtaagacagtccaaccgagatccgtgtagataataagtcagcaatcgagttagctaagaacctggtcaatcacgaaaggagcaagcatattgacgtcagattccacttcatccgagatcaagtaaaaggaaagaaggtggaattacttcatgtggcaagccgagatcaagtcggagatgttttcacgaagccattaccgacattactgctggaaaattgtaagaagatgttggggatgaaagacggaagaaatatttaaagtttatagggggattttgttggattaaactttaataatagtaaattagaaatgtgaagagtcatatccctaggagaagaagttactcatgtgaaaagtcatgtctgtaggagaagaagttactcatgtgaagagtcatgtctttaggagaagaagttactcatgtgaagagtcatgtctttaagtttcttataaatagcatctcatgtaaaatgccaaaagtgtggcttggcagacaattatctaaatttctttttctttatagccactgtctgcatctctgcacagaatcctttgcattgttcttgcataattaatgaagcatcattcaataactcctcctgaattctccttaggctttgtttgggagttaggaggggaagagaatgaaagaaattcaaggagaagggaggggaatgaaagggaggaaaatgagaaaagtttctttctccctgtttgggagttaaaaatatattaagagagagaaatagagagttcataagatacttttacaattttgtccttatttcaaaaattaatacactctatattttacaaataaaacttaattttaaattaaaaaaattatataatggtttgaataataattttattacttttccttctaaaaacctccaaatcggaagaacaacaattttaatggtttggaggaattcagagaagttttaaaaatccccaaattatttttctcaaaaattaaaactcccaaacaatgagatgttataacccaaacctttccctttgcaacaccccgtgtgcacccggtgtattaacattgtacaatatcagagtgacgcagcatgcatggaatcaaatagtaaaggaagcgtaattcattataatatattaaaactttgtacatacatggtgaattactgtcatatacataccatcttttccagaactatacataatgacctctcagggtaccaaaatacaatcaaaataatcaaaatgggagcctacaagctccggtgatctagacctaaatgtcttctaactatcccagtgcaggccttttgccttgggatccttcagggacttctgactctgttcctgcaacataagcccaacaggggtgagataactatctcagtaaactcagggtcctcagaggtcaccctcccctggtttacctcacaacacacatacacaaatataatctatacatgcataacaagaatgattaaacacaatcatatttcaatctcaacatatcatgagaacaagtcattcacaatgcttaacataaatcatacaactctatgcatccgcaatcaaaactcatgctatctgtgcctgactaggctcatccacctactcgtgggtacctctagtcaggacttaacgtccaatacctgaataggctcatccacctactcgtgggtacctctattcagggtttacatgaacgcctatggattaccctaaggaggatcatccacctgctcgtgggtacgtctccagaggggtccatagtttctcagtctactggccagtagataacaaacaatcagatcacaatcaaacaatacatcatcagcatcatactcaataatgcatacactatctcagtgtgatcaggaattcatactcaatatcatcataatcataaggcatctggcatatcattcaataccatatcaccacaaggcatataattatgtcaaacaaacatccagagggttgaagcaaacacaagcaagagaaacaaactctaaggacactgagcttacctggtcgtagctcagaaccagttcccctagtatctggatgagttctaccaacaagctgtgcctcacgccctacagtaggcatgaaccaaaacatcagaaacggcattccaccgttatcagggaaggaaataccttccactcataatcaataccaaaagtctgctatcctacagtttatctcaacccagcatctcactaggccacacattgcccttcattggcttgcctcagccttgccaatgcctcagagttctttcagaactctgtatagttcaattcaagcctatatcagaatcaaggatccaccttgattcaattcagcccaaatgcagatacaactacgttttcaccggttattaggcgtcatgagtaactttaataaagacacttgagctagttcagaccctaacatagctcaggtcctcacacttttctcattctagagtcaaactcaaacctcatcacaatttagatttcaacatgttatatgactcaacaccacctcctgattacgtctctctaaagaacttaagcctaattccagccctataaccaattgatcactattcattcaatttctcaattcacaatagaacggttaaacagaggttttcttacctcaaatcaacggaggaaggctggagaagtctttctccttgctctggtatcctggaaccagctcctattccttcctaaacccactctctgagaagattcaaggaggtgaggttttctctcaaaatctcactctcaaggctggattttggctcttacgtggctccaattagatttagaggtgtttagaaggtgttttatggctgaatgatgaagttatgaagctcaggaggtgctccaatggctgctgggacgagggaggaagatgaacagtgttttcttcctctcaatttcgcgttttgcctttatatagggtgtctgccagaggtctggcgcgactcgcgccacctccggcgccacccgcgccagaatggcggtggacatggcgccattggcgccgtcccggcgctgttagcgccaatttccagagactccggcgcctcaagcgccgcatcccacgccccaggcgtgagattccagagaaaattgaacttccacccatcttcccgcgccacccgcgccaaccctggcgctatccgcgcggactggaaatctgtggcgcctcttggcgtcaacttccacgctccaggcgtgaacttccagagtgtatggcgcccttggcgccaggctggcgccgtcagcgccaccttccagaggtctggcgctggtcgcgccaataacggcgctactcgcgccacagctcaaaagttgttttctctcaagaaacctggcgttgattgcatgaaaaccggcgctaattacgccaggtctcagggtattatacccttccctcccttccctttagaatccctctcccaaacaaaaccttaaaagaactttcatggtcattgttgttctcctccgatccttcacattggttgtttcctccaaccattattagtatatgtttcacctctatatataaaggaacttcagcaacatatgacatccattgtactcatcatattttgcaataacaataaagtgaactttgatatcatattataatttgaaaaaatgatacaaatgatattattttcacgtatccacttatcataaagattaaagccggggggagaaattttataaatatgaaaatgtgattaatataaaaaatatttgaatttcatatttatttgttcacattatctttctatttattatttttcattacaaaagtttgtcaaattaataacatgagagttcatataatatattatggatggtgctataatactaaagagtcctatttaacaaattcagaattgaactaaataaagttgcatgtaacagataacaagtatagtatagatttctgaaacaatttttttaatattacaagtaattccaaaatctaagttgttttttcccctctaaatattgataattcctgttggaatatgagcgtaatcaactagagtcaatttaatggtcgagagtttggagatatatatatatatcaatatagaaggatcggaatatttctccaacattatgtgataatacatatatatatatatatatattcctttctgatttcatttaaggagttttgagaaacattttcctactaaataaaagtagatgataactaatgactttcaatttcaatttttctgccccaatttcatcgtacatgtagccctcgaagtattatgacaagaaggtacgtagttgtaaaccaggttaccgctaacacctacttatcaattacaaaggataagcataccaagtgttaattccctagctaattaacacaatgtatcatttcactttcgaattcaacattccttcgatgtaggaatttcagcctaaattaaccaagctagcctccctcgtaaagcctcattcctgcaaaataaacgatgcctaggatggttaattaattcttaattggtttcatcgatatatcattcaatcattttgtttactccccagcaatataatcctgttaaagacatcacatgtacaaattcacttttattaattacaaattactgttatcctttggaggaatattgaaatatatattagagataaaagtaatctgttcccccatctcatcgaaaataacaaaaggtgaacactaaagtcatgcaaatcgatatatatatatatatatatatatatatgtatatatccatctcaagacgggtaatatgatcatttgcaattcattcatgactattaattaataatattattaaccatatggatgaaacaagctcaatgttgttaactgtaagccattaaccagaaattcatccatcaaactattttcaactaaaacagcatacagttctgatgtaattcaagtttcaaaataacgagtcccagaatgaatacataaataggactgtatgttaagagaaaacagtgggtgcttggttattcaagtattgccaagtcataaaaaaaaaactacgtactccattgttcgaaggttccacgttatgcgtaggtaagggagagggaaattgtacgcagccttatccttacatatgcaaagaggctgtttccagattcgaacccatgaccaacaagtcatcaagtcttcaagacacaattacgtgcctagtcataaataagaaaatctttaaatgctaacgatcaaaatgcgtgcgataaagataataattcatgctattaatttcatcaaactaatgattaatacttaccaaccaatttggatgctttgttgattactccccttgaaacgccagtcttgcaaatacatagacacttgctttgtgatcaaagtgtttcaccttctcaatatatgtttttcaatctccaaaagcaattagcatagaagcatcaaactctttaaagctcgatcgacatcacatgcatcatcaaatagcaaaaattgggcttacttctaaatcagtttctcacccggagtttgatccactcgtgagcaggttcttctcttttctcctagctctttgataacgtttactcttgagcacatagtacgtcatagtaccaagaacaccaagcattataactcccccaacaacagtaacaaacattgcagcccacttgtgatgcctaccaacaactatataagacgctgatgtgaatgcaatggtggtgcatatagacgccaaccacatcatcttattgatccccttcactaccctcatctcagactttgttctccctgtcacaagtgtgatttgaaccaccacaacagccagcgaagagaaaaacgcaacagcgttgaagatgaagaagatatctaagggtactgtgcctaccatcactgccaccccactatcatagtctccaccgggaatgctgaaaatggccgcaaacgcaagcgtggcaaagagaaccacaaccacctttacctgttggaatgaaattttagaagtgaagaaaatatttgagaatgagagattagaaatgttttggaggaagagggtacttgtggcttgttccattgtttctggtgagttgtatgatgattcacctagtgtattgtaattttaatgtgggatgactttttgttagatattggattataagatagcatctcaactgcaggtcattttacatatttcagttcccctaagggatattttagtgcatgtaatataaaaacaggctactaggttggttatgacaggacatctttccttagtttttcttgtataactctattagtatttgtaaaaaaattccaatttgaaaattcttagctcctcactaacaatgattagcatgggctgagtactttgagtttgagccaaacttaggtggaggtagtccaaccacagccactcttctatactggtttgtgttctcaacttatctgggactaattactgtttttatatttgtatgctcaagtgttcaataaaatgacccctttacctgcaacattagcaattgtatcaactcattatctagtctgatcattagcttgtgcgaactttcagagtcatttagatgtagcaaacacggagctttgtaaaatttgtaatgatttcttgggccctttattttcaacaattgtagatagtaaccttcaacttcacgatggtgctatattttacatggtaaactttattgtttaaacgagtttatatatgcataatgaaaaggaattgcagtaggacagctctcttattctccacaaccatcctttattcatatagatggataatgagcttgtttgtttaatttttccatttcactggtatgagaaataagcataattgtcctgcccttggtatatggaagaatttatgggatatatttaacatgaataatattcaaagggaacgaaatggagttgtgctatcttaaattgttggaactctagaatttttcttacacgctacaatttgttacattgtattattgtatgggacttggaaagtaaacatgcttccctatccattgggcaagtcaattatgaataatggcatggctaagctgagtttctttacctttattctgcattaacactaagcttcttaacatttgaaagttgtagttctaatttaaatattttggcaccgttttcttttatgagataattagatctcatgatttttttttcttttccagattctaaaccttgtacagaccaaaaaaatgtaaggcataagatgatcgttggagttggatttggagttacagttctattccttgtcattatcatagttggaatcttttggtggaagggctacttcgaaggaataattaggaaaataaaaagtaaatatatactatcatgttcttaccattctgaaattagtttacttcatttgcttcttaaagatttccaagttcaacttcccaaaaagtcaatcacttgacttagcgtataggaactgtgaagttagctaggtgctacaagacgtggttgatatgttgctagcatataatagttttaggctaaaataatcaacaatttaatcataatttatcaataaagattaggataagattaaatttcatcaattcttggtccattacttattttatgcatattttgtttaataggaatcaagaaaagaagaaaagaagcagaaccaagaaagatttgtcacaaaaataaaacagcaggagggtttattaccctaattaactatatggatgtggaattataaatagggacttaggaggccaaaagaaaaacacacagaaatacagacagaaacacagtggagagaagatcaaggccagaatttgaagacagattaatgcttctgctgtctttatatttcttgaggttagacatgaacatgtcagactaactttctttattgtggttagggccaagaaccaatgtgaactcctctgtaatttgattggtattaatatgagattattatgattactttgttttactctattcttcattgcatcattctttattaaatttgaccattctattaaagttctgagggttagagttcgcaatagagatgttgggactttaatttctgacatgagtaaaataacagtttttacattgcatacggatagggatgtatgattgcagaatttttatgatgtattcttttaaatgcttagcttgataggaattgctaaggaattaggatttctgattggattaaagggttaaattgctaaggaattagaatttaactaaatttggaaagatacatcctctgagtaatcagaagtaattgaatttaataaccaattcaagtgaaagaggtagggatcaaaggggattgtgttctaaccacaattatttctcttaactgcgtcacaatccatttaaagttgattttaatttcttaattttctgttatttatttaattcgcataattctacaacataacactactttttttaaacatattgttttcttccaatctctcagattgtgagttacgataaaattaggaatcaatccctgtggatacgatactctacttactcactctattacttgaaacgaacgatacacttgccgtttcacatcacaacagtagtcaggtaagattgaattaatatagtgcccattatgatagacctcattagggattaactatgaccaaagtgggtaagaaggttaagataataggtcaaaagcaaagaacttgccttaattttttactatggcctccaaggcatccaagaatgtgcatttagaaaagtattcattcttggatccaatagcctttgaggattggagataacgatttatctcttctgtgggtggtgttttatgcgtatgaattatttgcatccacttattgccttttatggtgacaagcatttctatgtatattgacacatatcaagcatttgacacataacaagcatttgtactttcctcaaatactcttaaacaatgcagatacgtttaacttactacgtaaaatgaaactggctgttcctctggaacacttattttacggctgacatattgaacaggtactgaaagacaagattgtttaacggggacatttacgttaaaacaaattagagatgccacagaggatttcaatcctgataacaagattggagaagatggttttggtcctgtctactaggtattagagtgaacggccttttttcttccaagcataaaaattgatgttcctccctagcatttaaaattctaaacaactgttggattgcagggtcaattatctgatggtacaggtagcagtcgagtaacactcatcaaagtcacggcagggaaaccatgaatttttgaatgagataggcaagatatcttgtttgcaacaccctaatcttgtgaaacttcatggattttgcatcgaaggggatcaattgatattggcgtatgagtacatggaaaataatatcctggccagtgctttattcagtgagtttctacccaggagtgcaaactattatgtttgtcttttgccttgtcatttattatatattttgtaagataaggtgccaagtgttaattatgataaatcacttggagatctgattaatctgaagaagtttgtttcccgcccttttccatttttctggatacaaaataaggaatgaatgagtgctatagctagttgtttttccttccccttttgtctagacaaattaataccctgtgcttagatttttatgctgttaaacttttcctttttcccatttctatcactttagcagctaggcaatagaattttgcaaccgtgattcatattaattcaaccataacttctttctgcatcttttataggctcaaaagatcaactgaaacttgattgggcaacaaggcttaggatctgtattagcatagcaaaagttcttgcatttctacacgaagaatcaagactcaagattgttcatcgagatatcgaagctactaaggtgttactggatgggaatttaaaccctaaaattaacagattagtagctttggatatcaaagctactaatctgttaattttgttttacagagggtatatggcaccagaatatgcattatggggttacttgtcttacaaggctgatgtttacagttgtggggttgaggtcttggaatttgttagtgggaagaactataagaattttataccaagtgataattgtgtttgccttttagacaaggtattctactatgcttcaatccctgatacatttttggcattatgaatcccttttgttttggtagttatccaatgcaaatatccatattttcaccattctaaagaaaggtaacaaaatttccattgcaggcatttcatctgcagcgtgcagaaaatttaatagagctggttgatgaaaggttgcgaacagaggtaaacccaactgaagcaatagctttgatgaaagtagctctcctatgcaccgctgtaacaccttcacataggcctacaatgtctgaggttgtgaacatgcttgaaggaagaatcagcattccaaatgctatccaacaaccaagtgattttagtgaagatttaaggtttaaagccatgagggacattcatcaacaaagggaaaatcacagtttgagtacaagccgaacaaacaatataacagaagtccttacacttagctctccctaaacatttggcaatgacctggtgttagttcatgatttcattgttgctgaccatattgcaacatgagatatccttagagcatagctgagatttaatcttttgggataaccaactgtaatgatcaccatttttaggatataacatttttcactccgtctttcagagaatatatttatttctagatccgtgtaaatttctaattgctcttgaagggtacttttttttaacctgggtatttcattttgagatattattgtatggttcggtgcagtcccagttaatcttcatatgacacaatcacaagttttcaatttatgaaaacaaaattggcgtgtcatgtggagattgcttgaactaaaatgatctcggaccatataataatttctcatttaagaggtgcatatgaactccttttcactggatatacacaatatttggaggaagaatgtacatacgcacccttgaacttgggtgttatagcaaatagcaacttggagaaagaatgtacatacgcgtcttattaatctttgcgcgactgaaaacctgtttgttatatcttgctcaacttaagaacggcacattgagtttctcctttttatcaggtgtgtggtgtgtgggttcactgggttggggagttagtgagaattacaagttcagtgttatgctccgtatgacaatttttagggtaaaaagtaataatgggtgaagtaatacacctacgtagtgaagaagtgtttctaaggaataagaaatcaagtttcaacgctgccagccatcacagttatgagaaaagaaaacttcgagcttgttcagattaatttgtaaactaagccaccttccccctctttgacaatgatttagttaagactgatgtgtctaaaaaataacttcagtaaattttaaatctctttattttgaatattctactttggaaaaaaaattattattataaatttttattctcaaattaattccatctttgattctaatccattataaaggtgctgcaaacatgagcataatcaggtattaaaggtttaggaagagatgcaacacaagcaaaaatgaaaataaccatcataagttgataaaaagaaaccaaacatacttcaagaaaatataactaaaaagacaaattaaactactaatgttgcattccctaatgatcagcttggggcgtaggacgggataatatagagaataggtaacattcatgaacactttcaataatcactgtgggttccaattcggtcaattatgttagcaacagtttccttgctctcccttaggactttgacactcctctgcagcttttcacgctttccagaaattgaaggtgactcctccaacaacctctcaatcccaccaccactaggggatagcagatcatgaacaatctccttttccaaatccttgttaacaagattgttaatactcagcataagatgtaaggcaattgtgtcaatcaatcttttttgcactatcttccagtacgaaatcatcctcaccttcaaatcaaatgcttgagtaagcacagatgggtattgcctcaagtgaccaacttcaattttgcccacaccttcaagattcacatgcgatggattatgcggattgttcaaaacttcattcagaaaagtatcttgctgagatattaacttgttgtattcctgcacaaactccggattacaagtgtaatcagtatacatctccatttcaatggcctctattacatgattggtggaacttctctttttcttagaaataagaacctggcttgctcgcctggtagacatcaaaagctgatagtagttttcagaatgacgcgtgataactgaaaccagcacatcttcgagatagttccacacattttcaacaaaacctataggcttgttggcaatccctttcaccttcccttgcaatatagaaagaaaagcagtgcgaggcatgaaatttggaagaccaatccactttgcctcctccagcacctttatctcttgcataagaaaattcttgcttgcatcactttcagcacaatggtaaagatcattcgagtaggaatcaagcatctccaccaaccgggcagtacaatgcatgtttttgtcctccaggtactcatcaaattctcctctaagcaaaatttttctgagagattccttagtcaatccaataatatgcataaaagctgtcatggcatcagctactgaagccaagtttgttggcaacttttccaactcagacaaattgttagctagcttctcattgattttttttactatttctggcaaagttttagatatgctcatagcctgaacctgaaccagtttctgtgctagaactggaacacccacgatagacttgtctattttggaaagaagtggatggaactcaaacagtttctgttcttccactctagcatcctcatatgactcatcaccaatgcggtttctcacacaaacataaccaagaccaatgttcacatcatcggcagtaactttttctaacaagccctcaggagacttgtctgcctttgtgaccacagccagtgtcctgaggccagtttggtcaacactctgagacattctaatagactcacaagtagtgaaatcaacactagcagaaagaacattcaggataatactttcttctggcttaatgtactccatgatcatgtctttaatctggtcataaatgttctcaggttgaccatgaactggaacccgagttataccaggaagatcaaccattgtgagatcaggaacaccattcttcttcaccagcaaagtcaaagggttgttggaaatccctttaccatggcctgcaagctcttctgtggcagcatttatggcatgagaaacatttgcttcatcagtggaaacgattttgccattgaactccaagataagctctggggttggaagagggtggttttggagcctcatgaccaagggcaccctagtgcaaatgccttggccacgtggcaagctgataccagcaagagattcaagaacacttgatttgccagatgattgatcaccaacaacaacaatggaaggaagctgaattccctcctttgtaatgttaaggcgcctgagattttccatagcatcaagaactggacgtatcctctcattgtaagaggacacaattggtgcaacaatagcaagaggctgaggctgttctgcagatgggtcagtttcacattgagaaacagatagtgcaacaatagccttagtgctaggtctccttcctccagccattttcaatcacaatcacaatggtaaaaaatatagagagagagtgagagagggatagtttggtatgcttattcttattatgagtgagtgagtaaaaagccagagcttaaatgcatatttatagattaaaaaaaaaaaaaaaaaaaacttagaggaaaatgaaaggaaaggacagtttggtttggtatcttgaaagttgaaaacaagcgtgaattgagcttttcatgggaaccgcagttacagagctgttggggtcttccatgtttaggtaattgaaaggtttctcgttaaatgcatgcatggtagtaattgaattgccgtaaatattagtaacgaaaatttcttacattaattaattcaactcaagtagttttagtaaaaccaaacctgaaggggaatatgtaccaaaaaagaaaaaaactgaagggaatgtagttaaggaaaagggacaattcattttataattcatctgaggaagctataaagttttatttatgagtagttattactattgataacatgcttcggcagtatgtcctctctagtctctcacatactatggcatatgtatggtcgtgacctgtgacctgtgacctgtgagaaaatctttgggtattgcttttgttgtcttaaaataaataaaaaattaatggtgctatttaattagtatggaaaatggtgaatatatactttgtttctttatgtatttttttgtgtgagggatttttgtttatttttggatgtatgacaggaaaaggaagggataaagagagaaaatactaatagatgataaaagatgcgatggaaaataaataagttttcatcattgataaaaaaaatactattacaatttaataataatataaagttctcttagtatttggaattttagacttaagatagaaaaaataatttgtttcattttttttatttttaaagaatttaaaatatttaatataaactctaacgaaataaattatagaggtttagagtaattctattctctataattatgaaattatgagccagctattttaggagaagaatttttatttttatgacttttagttttcgattaaatcctagtaaaactaaaagtttatagtcctgcattagttattcttctaaaatagtattttcgtttacaaacaaaagggtgaaaaaaataaaaatgaggaaaatacaattccatacaataaaatcatattttttttattttttttttatcattgggtgtttctgttacgtaaatggaagtaaaaaaataaaacacaattttattatgcaagtgtgcatgagaatcatatttttgttgtgctttttttttttatccgatttacataattgaaacacatttttgtttgttgtgtttccattcaagaggcaatttggaaatacagctaaaaggcccccacttcgctagtgccaataggcaatactctgtagaatatgcaaaggcccatgattttcattcttctactgggccaacacaaacagcctcgggaccatcaattttatatgttcgagttaaatccctttttatggcccatgattttaactttttcaaaaagatatttttaatttacatgtagtataatttaattttagtttaccagataattttttttatttctttcttctataaaattttatgaaaaagtttattcaaaaggaccttaattaaaataaattaactttaactcattttttaactttcaaaataatattcggtaaaacaaaactatcaaatagtaaaaaaaaaaaaggaaaaattgtatgagaaattcaaaacaccaattaataatgactcgtggcatttgaagaatcacaggattaataagtaagttgccataacaaaataaacctcgttttaaaataaaaattagtatttgcaaattacaaaaattatgaataaaatatttatgttttatttctcttaaaatttcaataaaaaattcaggatttaatcccacaaagatgataaatcttacattgataattaattataagcatatattttttaattactcccttcataaaagatatgtgtataataataaattaataatggagggagtataatatcaacaatttttttcataagagatactccctcaatcctaaaagaagagttatcttagattgtttacatatatcaataaaaattaataaataatgaaagacaataataattttacaaaagtaactttaatattaacatttattacatttaaaaactataataacatttagtggtaaaaaataattaatattatattaaaattaaaatacaacacttattttaaaatacttttttccaggaactttagaagatatattctctccaaggttgtattattctatatggatcaaacatagatcctccccacaaacacaacttatattgttaacggaattacatctattccattggattgttgaagttttatctattcctatgttacaacatttataagtttaaggtttcattcttaaataaaactataagactgattttaagagttattccattcttcatctaatcatgtatgtatggtttcttttctatagactattgagcatcttattttacttttttttatataattttttattcttttcaaatactattactcaattttagtttttattttatttcaattttaaattctaagttttttttatagatatagttaaattttagggttattataatcttaattaatgcaaataaatttattttgaattttagcattatattatatataccaataatgaggatttgtttaaaatgattatgatttatttccataatttcttctccaatttggaaagtcttatacctataatttattcctatttaatataacaaaatattttattaattaataaagtactgatattctccttaatttttttcattaataaatttatgaaaaatcatagagtgtaaaaaaattagaaatatttcatccataattgaacaaaatataaaaaaaaaattaaatatactgtcatttaattataaactactacatgtatgataaaattgttattgtttataataattatttttataaattataaataaaatcaagttgattaactttacattgataacataaatgaaaactatagtcaaaaataaaattacaggtatagtaagctagctaattatatccattgcctgtgtgagtaaacgaagatgacgaatcgatgatacaatattttaaagtgaactgaatcaactcatcttcgcagtcatactattatttagccggctatagcttgctaattgaatttgtatagattgaaacatcatccaatggctccaagtgtcaagtgggattctgttctgctaccctacctgaatcgaaaagataatcaataaagcaaattaatataattttcaccatcatccaaatttatatattgtatgatgtgatgtgaaccccatgatgtctataatatctgttggtactcttttaaattttatgtaaagtgtatgaacaaaattattttctttgtgacattcataacagactggagtttataagttaattaatttattgcccagtcagtattaattaattacgtactaaaccatttttctcagcaaattgtttagttttaataaacaattaatctccaaataagaagttttagtatgccatattttatttttagccgtgagtgattgccaacgattcaaagggtgccctggcgttgattaaatagaaacactcaagtgttgggaagctcttgtcttggatgatccccaagtctttttcttgctggagagttgctttggttacatgcataacctacaaagaagatttcaaatgcctaatattttatggaacttcttccatgactaaaaataaagtaattaatcttaatttttttataagaaaattaacggatattttttttaatatatatgtatgatttgttatatgtgtatacacacgaatatatataaactttatgttgattttttcattagcaatgaaaattagttattttattttctaaagtaatcctgtagtttaaattggactacattactgaaaacaagtacgtgatgaatctttttaataaaatatgttttttttatctttataaatatccttaaatttaatttattatgtcctttatttttatttttttaaaaataaaaataaaagacatgataaattatacaagattaaattgaacttatatgaaaaaaatagttaaacaatgagatatagattggtcttctctgaaaagatggtgatccaactcatataatccattttttagtcattttttcttttcatctctccctccttctttcatcattcttttcttttattttttttaatctcctcgtatttattattgggttcatcaactattaatcccaattaacttaagtaaaagatgctatagatgttaatgttaattgtcgtttatttttatttttatgaatttggttttgataagtttttttaaacaggtccctctcatcacttaatgacttaatgatgatgtgtcagtcagatttatatatatatatatatatatatatatatatttctaggacactaaattatatgatttagtaagaatttaatgttttctttttattcgtgtgagaatcaaattcagatatcatcaattttatattaaggcagaatgcacgtatgtagattagattatgttagttgtttctaattttagtgcttgagaattgagtttcactgtgttataatcataatttgagatcccccaatctattttggtaggatatagccattttgtactcgtcattatgcttcttgctgacgctgatggaaaactaccttcgaatcttcctgttctagagtcggcgaatttccatgtaactcaattttgctatcaaccaagaacactacattctccttctaattccgcagaactgatcataagccaataaatgatagtgaccttattaattaattatgaggcatttggtgtgtgcataattatcttttacacatgcattgcctaattggatggatgtatgtatatatagggaagagaatgctcttcccttgttgtattttactacttccatttcttttgaattggctattacaagaagttttaatttctacagagtcatggtatttcattatttttgcttcatttgtttatattattacatgcttgttccttactgttttcaagtttcttgcatgccacttactacttcatttgcacgcaggaaaatcgtgttgttgacgggaatgtggagaagatgcagcgggaggagagagcagatgatctggttgttcatggaaaagttgatcggaaaggaagaaaagctttgaaacacaaacatggggggatgaaagtttcattgctcgtacttggtaaactaggattgacatatataatatgagttcataaacagtaattaacatgaaaatgcatgtatatacatatactaattaaggtgtggattaattatactacctcgtagtactaattaaaccctgaagtgatggcaagtccttaatttaatgaccacttaccatgtgtatataaaacaatacaagtttggtgtggattaattatactacctcggagtactaattaaaccctaatgtgatggcaagtccttaatttaatgaccactaaccatgtgtatataaaacaatataagtttcattacatattgttgtgtctttaatgtttaaagcaattaattaattaagacaaatggataaccagttacacttactacattggtaaataaattaaaaaatatatttttatgaaatacataaaattatattatttataatttttttttacattcttttataatttttacactatataaatatattttttaaaattttttaaccaatattctaaggagaggtcgacacaagactcattaattaattgtgcacagtgcatatacacctcgttcattaattgatgcagtaagtgttaatttgggtttgcatgggtgcagcggcatttggtatagagaacttagcaactctgtctctagcagtgaacttggtgtcatacttcactggtattatgcattatgaactagcagatgcagctaacatggtcacctattacatgggtgttaattacatgctctccattgtggtggccgttcttgctgatacttggattggtagatacaaatccgttgttatttctggaatcgtcgagtctttggtaagatccaaacttaccttaattccttattgcataataacataagttactaatcgttattggtaaacccaagattatatatattgtttatgtgagtttgaccacatatagcaacgtaatctattttttaaacccacctttatacctattctctttttttttttcgattacctcatttattatttttattactttctttcttttatctctcaaagtatgtatataaggaataataaacctagattcaaaaaaaaaaaaaaaaaaaccgttgactctcaagtatatagtgggaagagatatacatataaagaaaagaggggggaaaataaatgtgaaagattatatgattggaaaacatcaataaaaacgtaaaataaatataaaaagtgaaaaatatatggtgctgatttttctctatcatgctcttgaccaatatatttacatgaatcataatcaagtattataatttatttcttataaaatgtgatatttttaaatatgtgttacatataaaaagtgattgggatgcatgaataggtggttgtctagaatcatctaataatttttctttagtaaatagatatgatttttcttgttcaccaatagttttcactaattatgaaataaaataaaagatatttattggacaaaatatgaaaatattgaagataaaaatgttttttaatagttttaattacttattttgatttttggaaaatatttttaaaactaaaaaggttaccctaaacataatataacagcccagtaacatcaagagctggaacatgaaagagaatttgataattaaacatataaatgaaaaacagtacagtaaacggagatgttaaactttattaaatgacacctttagtttttttttttactctaaatcaattaattttattattaaatttaaattaaattcttttaaagttatatatagttaaataattagtttatactttattattttattttaatgtatgatatattttatatatctgccaatatttaaattaatcatctaaaatttaacaaatatatataattactgaaataataccctatttctctgtcactcggataacagattctagctagggtgattattagacattatataattgcaggtactcatctaatgattaataatgatatcaattatttaatttaatcaaataaaacaaattagataagaagtatttttaagttattatttaacaacttatatttaagtaaaaagtttaatatctttaatagaaaatctcattttaagatcttagttattatttttacgaatcctacaatgttatattactttaagattttatttatattttattttaataatatatctcattttaagattttaaatcattttttgtatatcctacttacactaatagaatacaagtcaattttgtgaaaagagtaaaaattattatttttaaatggatactctaatagtcatatgcactaacattatacattgtccaataaataaatcaattatatatatatatataaaaccaataaacttatcacatataatatacaaatgttttacatattatcttttttctcttaaataaaaccaattgaaagtaagcccaatttatatatgcaactaatttactttaaataattttctaaagcttattcaatcacaagtgcatatatgcatgaatgtgttgtagggactggcattgcttacgatacaggcacgcgtgggtagcctgacaccacccatttgcagcctgtactatgtgagagatgcacattgtgaaaagcttagtgggaagcaagaagcatttctcttcattggcctctacttgttggcctttggtagtgcaggtttgaaggcttccctgccatcacatggtgctgatcaatttgatgaaagagaccccaaagaagcaatgcaaatgtcaagcttcttcaacggtctctttttagcactttgcgttggtggtgcagtcagcttaacatttaatgtgtatatacaagacaataatggatgggtctggggctttgggatctccaccgttgctattgttttgggcaccattatctttgcctctggattgccactataccgaattcatgctgcacatacaacaaacggaatattggagatcattcaggtatacactcttttgcaaaccttgttctgcatgtgctgtatatatttcaatttgaaaatcatatttttttttatactcacgatattagtgtgaaatatttattgattttattgataatcgattaatctccatcgaaaaacctagttgacctctttaagtggctctttcctctccatcatgtttttttcatctacaaaatttaaattcgagactttatgtaaagaaataaagtccagtattacccagactaaaatttgttggttgaaaaagtatatttttgagttcattaggcatgcattatgaaagtaaatttttttatacaaattgttaaccaattaaaattgattcatagtatgacttttaaatagtatattataaaaagacaaattaataaacttttatgaaaaccctttacattgttggtagatatattacttaattctatttttatttacttatagtctgattctgatacaatacaatagttgaagtttttaatttagctcgatattgcaatgatcaagcgcattagttttgaattcttcgcgtctattttccaggtctatgttgctgccattcgcaacagaaaccttccccttcctgctatccaactatatgagattcaacaggacaaagaagccgcagtggaaatagagtatcaaccgcagagatattttcaggttcaatccgaccgtgtctaatatgagtgaaatactatatgttaattgttgatagcttaagtattaaagagtaatgataaatgtatataccatggggattctccacagtgtctacctgtcacacatggctaaccatgtgtgcaaataaatatgattaattttatacaattatcgatttgaatttatcactactagaaaaataggttttaacatcgcctgtttaacatcggttattgggaaaaccgatgttaacgaaaacgcggtggcaaatttgtaaataaatggactttgttaacatcggttttcaagattttaacgtaaaaccgatgttaaccatgtactgttaacatcggttttcaagattcttaacaaaaccgatgttaagaatgtaatgttaacatcggttttgaagattttaatgtaaaaccgatgttaactatgtactgttaacatcggttttcaagattcttaacaaaaccgatgttaaccaagtaatgttaacatcggttttccatatttttaataaaaccgatgttaaactaagatagttaacatcggttttgttattgaaaccgatgttgttatttttataaaacccaccccgccactgattaaacccttcactctcgcgcctacctctgaaaagctctcaccttcactgtgacgacgctttcggtctaaaccctgcactgtcacccactgctcctaccttcgttgtcgtcgctgtcattgttggttccaggttccagtcaccattgtcgcttccagtcaccgctgtcattggcattgttggtgtctttttgaggtcacaactgtcggcacgcagctcccacaaggttagcattcctctgcttccatctattagttggtttgaaatggaactgaatcatatgaaatgctctgtggctcattggcaccagctgaacaacgatttcatgattttcatttgtttccataaattaatgtgttaatgtaccttatttgatatctttaggtgtatgttgaacaaaaggtttaagaaagcaaagatgaaatttgtaaagaagccgtagtgctttaggtttatgttgtgtgggttttttgttgattcgagttttctgttgttggttgtggtgaagggatcaatgatgggttgtaatatatagggcctttttatgtgtgaacatctcgagtatttaatggttaacatattctgctgttgaggtaaatctggaagaatgtaggactctagataaacaacaagagagttgttgggataaccattgtgctttgtttgtcactgttgaggattattagagggcccctgagaaaaccaataaaataaaggcaaaagcaggaccatactaaattgatgctatagatgttgtaagatcataaagcctataaggttactataacatacaaaatgaatatagcatagtacttaaggaacaacgcagtgagtagttgtcataacatacacaaaaagaataaatacatatatactaacaaaacaaggatatgagagccattcgaattagactttgaagttacaatgtacgttcactaagtgcgctataaaatgcctaaactgtgtatgatattcattgtggttctgacattgtgtccgtgtctgcaagttacaatgtatgttcacatgaacctcatgcattgctagatggtgagtgttgaagttcatttcgatatttgttggtgcttaattggttggtttttcatatatccttgtgaactcaatacttgtgtacagttgtctccgtgaggatagagcaatggatgtcaaattcttatttggtttgaattggtagctttagtagtttttgtttgtttggttccattgttccaatgttttagaaataagctatgtctccaagtttgttgacaacatagaagcaaaagaaaaaatacagaaagcacccaaggctaggacagaaagtacataatgatttcttctaaccaagtcattatattagatagtatttactgccatgagtaacttacccctgatgttgcatgattcgtctgatagactgcataatgggttcaatatcctttagaacatcctgctcctcagatgagtaaatgtccaatctctgtccaggtgctctaggcaggcgattcctatttttccagtcgccagcatttgaaccccgaccttgcgaaccttcaaatcgatttttcttaaacgagtctctaccttttccccactgaaaacctttctcattttctgaattagctgaagcaatatgtgattcccatccctgtgaacttgaattttgatttgactgattatattagttttgtttgcttttgattaatataatagatagggtcttaggtcttaaattgttatatgatgaatgaattgaaatgaattgagtaattaagttgatggatctatatgcgtttgttggattgatgataactaataatggtgaaccaattcagacttggtggctgctttgttttggtttatgaagctcgcttgagtgaagacttgaaccagtgctaggaggtgcttgctgaaccaattcagactgtaagtatatgcttctggctttatatgtttatttagtttaatctatttgtattttaagtgaaaaacaagatgtaatcttgctttaggtgatttagacatatatgaagaagaccaagtagatgtattttaagataatgataaggataggcataacattagaagtacatataacatcattgagaaggatatatagagtaagggtagtggattattagtgtgaaccttccaagctggagatagaagtaacacctaccaattgagctgcaagatttacaaataattcaagattgttatttgtttgaattgggaggagctgatgtgctgttaggggtggaatggttggcaggtttgagtgaagttgaggctaactttgagaagctaaccttagctgagggtacagaataggaagatcactttgagggctgaaccagaattgattaaagatgccattagaatgaagttgattaaaggaaccttgttggaagctgatcaagggtttgtagtggagctgaaggcagtagacagagaagagcaaatagaagaaattccagattcaatcgggcaggtattggcagaatttgagcaggtttttaaggaacctcaagggctgtgataggaactggatcagttttagtgaaaacagagaagatattattgaatttgggagcaattcccagctattacaatgtgattttcgaggaatcttaacctccatacaatgtcattggtcccctcctctctactgcttacagtgtatttatattctgtttccaactaataactgatagttagtttcagttatttcaactatccactaactaaaagctcctattccaactaacccactaactaaaagctcctattccaactaacccaccatcatttcacgattcagctctatgcgaagcaaccaaggtgaaattttttcacaagcaacttcttcatcatccatttcatagtaggacttcacaaaatgaacgtcctcttcaattattgtactcatcgggtctggatcataccatacctctgtagcttcagtcacactcctgagagtggtatattctaaagcacagacaaataaggcgttttaattctctttgccacattaatgatttcccttaacctacgaacaccaagagtaacattctttgcactgacactagcatagtggaaagtgttgagagtcatactgcttctgtgtttgttgtcattttaatatgaatactcccctaaatatgacgaacatagcattagtttattgaatagcgcaacccttgacaatgaacgctcctataatgatctgatttgatccttatgattatataaatatatatggtaagtattttgggataatgttgatgttgtcactacattgactaactttctacttctaatgcttgtattttgatttggctcagtcgcttgataggttcccattgtttgcttctcattcccagactttgatttggcgcatgtgtgtcaggtactatgattttaattgtctagtgcaatagtagtaatgaaaggtattattgtgtatgaaccattattatttatgcacaaatcaatgcaatagggtagatcactcttcaccatcatttgtatgtagttgtccgttgcctctgtgtaccatcgtcaccatatcaactgttggacattagcattcaccatcatctcaggtacttacaaatgccttgcatctttttttatcttatgtatgtaaattgttttatgccatttaattagtatgtctatatataaataatgttcattatgagtgaaccgtagtttcccgtttgagattcattacagtgattcttccggacagtttggattaatcattgtattgaatcttgaattgttcgtttggacagtttcggagggcttatatttttttagtatattcatgtttatacgttgtcattcttgtcttaaatatgataaaatttcggtccaatgcatttcactttgttctccgggtgcatacttgattgtggtggaactcatgccaccgctttcatttcgtgtacttggagaccaaagcgaaatgctgccgaaattttgtcatatttaggataaagactcaacgtatagatatgaatatactttaaaaatatgtcttcctgaatgggatagggccacaccttgaattaaaaaagtgaggttttcatgcatggatgaactttgtcaatggatctcagacttggttagcacatggatcgatcttggatgaatgcaagtcgcatcacggttgagtacgaacaaggagttgaaaatttcttacaatttgcctccgaaagaggtccacccgatggggatggaaaatatttctgcccctgtatcaattgtttgaatggtcgaaggcaaacactagaagacatacgggagcatcttctgtgcgatggaattaagaagacttatacgacatggatatggcatggtgagttgacagacacgcagagggtctcgcatactgaaagggttgatgttgacatcggcgatcgactagaggatatgatccgtgatctggggcatgagtcttttcagcaagcacatgcccctatgtatgacacgttggagagtgattcgaaaaagccgttgtatccggggtgcaaggagtcattgacactgttgtctgcggtgttaaatctagtgaatgtgaaggccaaatatgggtggagtgacaaaagcttcagctcactgcttgaggtacttaaggacatgcttccagaggaaaacaccctgcctagcagttactataaggcgaagaagatactttgtccgatgggtatggagtataagaaaattcatgcctgtcctaatgactgcattttgtaccgaaatgaatttgaacaaatgcataaatgccccacgtgtggggtatcacgatacaaagtgaaggatgttgacgaatgtggcagtgatgacagttcagcgaaaggccctcccgcgaaggtgttgtggtatcttccaatcattccaaggtttaagcgtctgtttgctaatgaagatgacgcaaaagaccttacatggcatgcggaggtaagaaactctgatgggatgctccgacatccggcagattcagttcagtggaaaaagtttgatcgtttgtatccggagttcggcaacgagccaagaaatctaaggcttgcacttgctagtgatggaatgaatccgtacggtagtttaagtactcagcacagttcgtggcctgttttgcttgtcatatacaacctgcctccttggttgtgcatgaagcgaaaatacataatgttgtctatgatgatatcaggcccaaaacagcctggaaatgacattgatgtttatctcagtcccttgattgaagacttgacaaacttgtgggatgagggggttgccgtgtttgatgggtatcgaaaggagacattcaagttgcgtgcaatgctattttgtaccattaatgattttcctgcctacggcaatttgagtggatacagtgttaagggccatcatgcatgtcctatctgtgagcaagacacgagttacttgcaactaaaacatggaagaaaaacagtttacactcgccatcgacgttttttgagatcttatcatccttatcggcgattgaaaaaggcatttgatggaagtcaagagcatgaacttgcaccgattccgttaaccggtgagcaggttcttgagcgggttaatgccatccatactgtatttggaaaaacgcaaaagaagcagaaaggtaatacatgcttatggaagaagaggtccatattgtttgagcttccatactggtctgatctagatgttagacattgcctcgatgttatgcatgtggagaaaaatgtgtgtgacagtgtcatcggcacgttgcttaacattcaagggaagacaaaggatggtttgaacactcgtcaagatcttgctgagatgggtatacgtcaacagttacatcctaggtccgatggtaaaaaaatttacttgcctccagcatgccacacattgtcaagaaaggagaagatcagtttttgtcagtgtctacggcgagttaaagtgccacaaggatactcttcaaatattaagagccttgtacagatgacggatttaaaactaacttctttgtaatgcaggctgagtttgatatacctgaagcctcagacgaaaggacaaagaggaagatacttcagacagtgggtgagcggtggaggcagttcaaatccgacttgacaaggaagtgggtcctcgcagaagggaacgcggacgttgccgacgctgtatgcgagaaatacggcatcagtcacgaacagtggacccaattctgtcagagtaggcgagcagcttcctgggaggttagtggttttaccccttttgagtggatatgtgttaaccaaacaattgtccataactatctctatataaccgtgtatttttcataaccctgttttttttcatttatgttgtcatacactcttttatttgctaactttacgtgtcaacttgttacaggatgtgagaaagaaggcccaggcaatccagaggcaaaacaccgcccctcacgtattgtcacgcgggggttacgagttgctcgagaagagattaatggaggaaaagcaacagaagcaagtcgagggagcaactcgtgatgacagcacggagactatcattcatcctccgtcccccgtgcgacgacacgtgaagtggaagctggctcgcacgaagaagagcggcgacatgacttcggaggcggcacgcgagattgctgcgaggattgtaagtaaaacaatacaaatgacatagacatttatttatgtttcgtatcacaactaacaaaacaaatgatctactttacgaattgcaggattccctggaagagcagtccacccagggttcttttgtcgccagtggtcgtcaggatgtcctggctgctgccattggacgaccggagcaccctggacgtgtccgtggtgctggagttggtgtgaccatcacccagtacttcggacccgctgcatcatcctctcggaagtcgaggtcttcatccatggcgcctgaggacttggatcgcctgaaagacaacatcagggccgagctggagcagtccatcactgatcgacttacacagtcgatcacagagagagttacccagcaggtgatgatgagcttcagccagctgcaatcccacatccagtctcaggcagccattcagcctccggaggtacagtcatgtccccttggtgctcgtgtcagcaccaagggaagctgcgtcgatccctcgggcaatgaccctgacacgggtgcatctgacaggcgtgggttgtatgtggatggcaatcctccccgccttgttgcccttggcagagttcatgagggatcgacgactgtgcacaacgtccctcttgccgctggtcaggtaaaggtgagtgttgaggaggttcgcgatgcagacgctcccgtccctgttcccactgacgaggttgtgttagtggggcaggcacttaacactttccttgcctggccgacacatcttgtacagacaattttgacccaggttttgttctttttcccttatgtcttttattttacgaatgatttgtcacatatgaacttaacatgatcgctcacccttggttgttaactgtgtaggataaacaagaagccaagggaccggcgaaacctgtagataaggaggaccatgcttctgatcccttgtaccttctagccctgaccatccctgatcttttcctcagacccttccaggtgccatgggaccctcagatgtttggggtatttaatgaaaacttccccttgtacatgaggcatgaggatatttcggagatcatccatggtggtcagtgtctcagcatctccgttttacagttgtggatgttgtaagtctcttgtaattgacaaattatttggtgaattgttttatattgtagcataacttactttattttcattgcataataggcatatgaatcatttaagtctgcaatccgataaccccgatgtctatggattcctcgagccacagtcgatacagagaactggccaatctcagtttttgatcgaggactatatgaagaaatggatgcagacttcacagaaaaaagtctaccttgcaccctatttgaatgggtaagcataaatgagaatcacaatttattaatgcagcatactaaacttgttcttgacaatgcagttcacattggcaactgatagttatatgtccgaaggccaatgtagtggtgtggttctgttcgttgcataacagacctgataactaccttaaaggaattgttaacaggtaggttctaatttctaacacatttacgttattttttatacttcaaacgtaagttgaacactatgcatacttgtttgtcttaagcagtgctttgaagggactgcatgactctccagcaaataaatcaaaggctacaactaaatggattgcgcttaaagtaagtcttttcattaatcatggtttaagtatcgaattattttttattcatgttcacggtatttgccatttaactttgactttgttttcaatttagtgtaataagcaaataggaagcactgagtgtggctattatgtcatgcattggatgcagacaatagtccaaggagccttcacagatagctgggacatggtaaatacttgtctaatttaaaacaaattgttttgctttacttgtttttgttttgtacttataacatgttttgttatctcatgcagtttttcaatgatcaaagaccattggaaccggacaccatgaaggcaatcagactccaatgggcgaaatattttcttaaatttagacaagatgtattagtagattagggggttcatttctagttttcaaaacaattgtatatatattaatgtttagcatattctttatgtacattaacactttacattggatttgttattggaattattaaattgtgcattgctggtgctgctactggatatttaaattgtgcactgctggttctggatatttaaatttgcaggttgaagaactgctaaaattgaaaaaatagataaaatatttaaaaaaaaaaataaaaaacaacatcggttccaaacaaaaccgatgttaacatatacaacaacatcggttttgaaggaaaaccgatgttgtatgaataaacaacatcggtttttgtaagtgaaccgatgttgtttcttcaaaacaacatcggtttttgttagtgaaccgatgttgtttcttgaaaaaaacatcggttttggagagaaaaccgatgttgatatcattaaaacaacatcggttttctcttagaaaccgatgttgttttcaagaaacaacatcggttcactaacaataaccgatgttgtttattcatacaacatcggttttcctttaaaaccgatgttgttgtattccttgaaactcttttcagcgctttcatgtatgacgactccacatcggttattggtgacaaaccgatgtgctttacatttggtaacatcggttttcaaaaccgatgttaaattctccactttcaacgtcgcctgattcaacatcgctcgagaaccgatgttaaaagtctaaaataaccgatgttgaaagctgcttttctagtagtgtatagtgcttgtatttaattaactatgtctgcaagtggttaatagtatcacgaagttatgaggttattgaaatgtttaacgttggttaactttacctcacaagtcggaaatgattaataggaagggaacttgtatatataattatcattatgtactattgacacaaataattaaatatgtctcacaagtgattaattttcttttgcacaggttcttggacaaagcagctatcataagtagatctaatgagcaacctgagaaccaagagactccaatgttggattaaactttaatgataataaattagaaatgtgaagagtcatatctctaagagaagaaattactcatgtgaaaaatcatgtctttacatgagtcatgtctttaggagaagaagttattcatgtgaagagtcatgtctttaagtttcttataaatagcatctcatgtaaaaggtcaaaagtgtggcttggcagacaattatcggcaaaaaaatttaaataatgctttttaaataacaaattaccaaaatatggcaattcaaaacctatttacaaatctactgttgtcatttgcgttttggtaaaacgtgttaaaacacgtccagcttagacgtgttaaaacacgtcctgggaggacgtacatggtgctcaaacacgtcctgtgtagacgtgaccttgcctcaaacacgtcctgcatggacgtgattaaacacgtcatgcagggacgtgattcaaccccccaacagcctataaatcagccccctcagcccacgtacaatttgccaagttgtggatgttgaattgttgattatagcaattgtaaagctctgaaccaagtaagtgatactatgctcaaatgtttattggttaattacgtggattatgaggtaaatttttgttaattagttaggtaatgtatgacctaggtttaagtgacatagttggtgacatagataattgatattgtagaaatagttattgtgttattgtcatagataattgatattgatgtacaaaattgttattgacttaggttagaaataattacttattataacaaaagttcgatgacctaggttttgattaattgtttatcatgatatggttatacatttttatgtgttacaggcgtgaccgtggtgttgtgttcatcatcattgtgatcttgtagtcgttggtcatatattaaaaatgtctggagatggtgattttgttcgtatcgttttatattataatggtagcaaaactgagagtcgacatggtattgtatttgaaggagagaaaaggggaacacgtatcaaccgcaactcaactattgaagaattgcatgaaaaaatcagaaaaaaattattgtgtacagaagccaatgtatctatcagtatggtcactgcaagaatatggtgtgatgataaatatatcagcatgaaagtaattgacgacgaagacttagaatttgtaataggagaattcttcaaccagtcaagaaaaaatttcttagagttgtacgtggattttggtggactagaggatgtggctttaccaacgaggtcagttgatttcaattattctcgtggagcatcagcatctgctgctccaattgcaaatatgtctatggaagacgaaaatgatcccacttgggttatggacaatgatattgacaatgatgatgatgaaaatatcgcaatggaagatcgtcttcttgctgagaatgctagtgcttcggacaatgatgaggatgatggtcgaagtgcaagacaaatacaagtacattacccagtcgtgagagagcattcaacccaagaacaagaggatgcaggggagtcgcatttaccacaacaatgtcaaggtgtgttaccgaacaagactcgcttacacatatgtttgtttattgtgtatgtattttattgtcatgaatttgagaatttgcatatgtaggtgagggtaatactactttttgggatggaatcccacattacacctacattgattgggattatccgagtgaacaagattctggcagtggttgtggttcaggttcagttgagggtccatgggtattagggaataagttgtttgtgaaacaggaatttgcatcaaaagaagacgtgcaaatggcaatcaagctgaacctcatgaaggagcatcaggaagctatcgtggttgaaagtacgccgagaaagttaatcatgagatgtcgtgcgcatgaccagaattgtccatgaagggttagggtaatcaaaccaacgtacggtgaaagatgggtggttaccaaatgggacggcgatcacaattgcttaaatgatcacatttctcaggaccacagacaacttgatgttaatgttattgtttcactcgtactaggtaagttattggatgagctgataatgataataagtaatgatattattcttattattagtgataacgtgattatttttttattattagggatgataaagcatgatccatcatgttcaattggactagtccaggaaaggataactcattcctatggatacaaagtttcatatagaaaggcatggtatgcaaagcagaaaacaatggcaattatctacgatgattgggaggaatcatatgcatttttgtcgaggtggtgtgaatacatgcttcacttttcaccaggttcgatttatcaaattcagacaaaaaattattatgtggctcatagaatcgttcgtggaaaacgcgtgttccagcgcattttttggaccttcagacaatgttgcgaggctttcaatttttgtaagccggttattcaaattgatggcactcatttatatggcaagtacaaaggaaaattgttgattgccacagctcaggatggaaacaatgagtgtttgccaattgcatttgccattgttgaaggtgagacgttggaagcttgggaattctttctggataacattcgctcgcatgttacaaagaagacaaatctttgtctgatttctgataggcatcaaagcatattgtctgcagttgagatgcaccccgggtggcaaccaccgcatgcttatcacgtcttttgcctccgtcatattgcgagcaattttaatcaaaagttcagagatgaaaaattgaagaaagcggtcatgactttaggtatggttaaaaactcatgtattgatttttcatgtataactaaattttaatgttatttaatttctgtgcagggtatacgccttctattgttgattttgacatagcctttgcaaattttcgtgatgtgagtcctgaggttgccaactggattgatagcatcccgaaggaaaagtggacacgtgcatatgatgtcgagggacgcaggtatggacatatgacaacaaatttggcggagtcagtaaacaggattttgaaaggtgcaagaaacatgccaataaccgcgttggttaagcacacttacagcagattggtggaatattttgtttgcagaggccgatcggctcttaatgaattgcaaggtccttatccacattgcaaaaatgtggttgctatgttgaaggccaatgagaccagtgctactggtcattatgttcgtgcatataacgttgaacgatctgtatttgaggttgacgatggttatgacaaatcgtactcggtaaacctccctgagcggttctgtcagtgtgggaaatttaaggcgttcaagtatccttgtagtcatgctgcagcagccgcgttacatgttcgtcagtcaccggcacaatatgtggatgacgtcttccttatatcaaacttggtacaagcttattcattttcgtggcagccaattggtaatgagcaggcaattccacctagtgatgatccagtggtcataccagacagagaatatttgcgtgcaaagggtcgtccaaagtcaactagaatacgcaatgagatggacgaagttgaagctagtcaaagtcgtattaagtgtggtatatgcagattacctggtcataaccgtcgaaattgtcctagtcgtccatcatgaattggttatgttcttgtcaatgttttgctttatgttgttgtattttgtaatgaacatttgaaccgtaaaccaaacgtccattgaaatcactcatgtgaaattcatatatgctacgatgagtttcagacatcaaaacgcaattgacattaatggtaacatagtgatggaaacctaatacaataacagaccgtacaaacaattggaactagagagataaacccaaaaaagttgaacatcgaaaaagcaaaacaacgaaccctactaagaacaacaattcaaacatgaaaatgacgaaactaatcataatttggatggtcttgtgcagcggacatgtcatcttccagcagttcgattaccggtttattaaaggtagctaagatttctattggagagaaacgcttccagtaattagattctaccaacaccttcagtacatcttcatcatttttcagttttattatttcatattcgaccatgttttctgaatattttgcgtgacctggttgtctgaagaacaattgtctgacaacctgtgattcgtgaattccataagggggaactcctaccggcgcaacttgcttgattatatgcttcagtgtttccatattgcatcctgaaggaatttgaaatcttactggattttttccagtaaacgagtaacccaaaaaattgtctgttcgtggtatgttccacttgccgttgtaatacaacagtgcatcatgagtaggagtcatggtggctcgaagtaggttgaggacaccatcaggtgttctggttatcatacataacaattcgataggaccaacagatgggagtttttcatggcacaccaacatagtgcaaacatcatcatcatttttcaattgcagtgaatggaaaaaaagattgttacctgtattaatggatgtttgtcgatagtaaatttcatccacagactggtcatttgttagcagaagggtgttgtgcattctactcttgagtgactgaaaggaacactcatcgggaattcgcattggtatcggagtatgacatacgaaagaaacaccagtttcattctgtaagattgatccattcggaaaaataaacgctaatttggaattaccaatattttgagagcaggtttcacctaagaaggccatcgtattgaggttgagtttcggttgtggaggtatgttgtgtggatgattaaacaccactgtgatgtatatataaccgtgttaagccctgactgtgtggggggtcaccacttgcgcctggatggggcgtgagtaaacagctgtcgtggttgtgttgtcaatgtcacatgacagaccagtgaaatttaatgtctacagtaaaaaggaccacaacgtgttgtcaatcgtccccggtgttgtcaatgtcattttacaaatcagacgtacttattggctacagtatagaggaccacaaagtgttgtcctgcattgatcaaagcggtagggctctttcacgtgggccaaaggaccacaaagtgttgtcctgcattgatcaaagcggtacgtgttttagacgtacttattaggcgataaataaatgtccataatgaaaacatgtttaacaattacatagtcaaatacaaaaaaaaaggaaactaaagtaaataacaaaatataatgtctacgaaggaggaggccactgataatgacgggcctgacgatctgacaatctgcgtctaccacgtccatgcgaatgctgaccagcaacataatatggcggtggagtgtcctcgactggcatatctggacgataatatgtctggcctgcatcaaaattaatttcaccatacaggtcatccgaagctctaccaccccagtcatgataccctgaagcactcgtccctgcctcatccccgaatgccgtactcgtccctgcctgatccccgaatgccaccgacactggactcactgcgtacgcaggctggctctctgtgaacatcggtgcgggctccggccgatagcatgtatcagcctctgcctgggtagggtcgtaatatgtctgatgaaccccgtactgatgaccgatgttgggaggcctgatccatccaggcatgcatggcgtgggggcatgaataggctcgggaacaggtgtaataggacgtcgacggcgtcctaaccctcgaccctctctcgcacgacgccaaacgtcgagcgataactggggctcatccggaagctgggactgcggtgcctctagacctggctcagtcacccgagctgactcactgaaaacatcaatcagacgacctacttcgtcatgcacatactccagaccgtagtttccaaattgttcaggcgtcgtcacaaaatacaaactctccagaccatcagcctgtaagccacaacatagttactaaaacaactatatcaaataatgaaataataaatattgtgttctagtaacttaccgagcgtcctaatctggccccctgcttcgtcacatatcgcttcccagaaagtctataccaaaccatgtactcatggttcggtgacatcagaccatatattggaggaggcacgtcaacgtgttcacccctcctatcccatctctgtataaactttctgagcttacgagcccaattttcttgggctttaccccgaagggtataatcatgaacccccttcagtttcccagccctacgaggaattggttgatcccgtccgaattgcctcatgcatcgatcgggctgtgaatactcagcaatgtgaaaacaaattataggtgtcctagccatccacagacgtcgtgtctcagcagatgcacccataaaatcgtaatcaccgtaaggttgccaaaccacctacataattaaaacatctgtatcaggcagttgcatattcacatccatttaaaactgaacattatttatttaaaaagacatacctcatgtctacgtaggctgtctagcctctcccgaaaaaatgtcaatgagttcgggctgaagcgacgtaagaaattaaatctaatacacagattaaacattcaagcgttaattgtagcacgcataaatacacagccattctagtaatacacaataaacatacctgtgtccgaagtggcggtctggctcgaacacagctggcaatgggggagcaatcggtggaaatctgagccatgcccaaatctgaagcaaaacagtacacccaccgatgtcttttctatcggggtctgtgcattcgcacaactgtctaaacaagtttgccagaaccgcaaacccccaactatatgaaccaatgtcagcaaagtcaccagcaagtaaggatatgtaccgacatcctacaaagctcccccctgatttgtcgcataggagccaggctcctaacatccgagcaatgtgagccttcgtgaagtatatctcattctgagggttcccggcaacaaattgccatgcacgatacactctgtcgaagtatgataatctcaaactgccggtgcataactcgacgtccggatcagggccgttaccaaaaacctggttacacaattcggaacaatctgtgtaggtccgtccagtaacggctcgcccatcagtaggcaatcctagaatacctgcaacatcttccagggtgatcgtcatctcaccctggggcatatggaaagtgtgtgtctctggcctccaacgctcaaccagagcactgataagagcaggatcaatctgcaaaatcgaagtaacttatcgatttatgcgtttcaaatacattatgtttgaaaccatcgatttcacaattacaatttcatcagattaagttaacaacattcgttaatcgatacctgcataaacctcatacgagccacatgtatgaagtcagcctcagtcaaatactgggctactgtgtccgggatatcgtcgtgttggggtccaccaatgagtctacctgcgcgacgtatcttcagctctctctgtgtgtcctcattccacactgcctgtgaaatatgagtgcgttgcctccgccttcgaagtacatcccatctatatggaccgggaagaacatgcgttgtgggatcggtaggctcatgctcccggtcagagccagaacgaggtgactcagatgacgacgactcagccataataatatgctacacattttataattatattataatattttacctaatttcaaatacaaattatttaattcgctaactacaaattatttttacacttcaatacatgtatctaggtcactatctgataatctacttcgtaatctaggtcactatctaataatctaactcaccaacgataaaaaggtctatttttgttctggtcacaagtgtttcaatatgctatataccttaatgtcatcacaattagtcatctcatcaatattaactgtgtatgtcaacaattttcattaaaaaaatatataaaatacaagctcattttaacaaaagaattgtatttaatttcttttctaaaatttaattgaattaataataattaacctaggtcctaatctaagtcactatctaataatactctaagtcactaaataacaatttaagtaacaaactaacaactaacaactaacaattaacctaggtcactaactaactaactaactatttaacaatctaagtcactaattaaaccctaacaactaactaacctagtaacaatttaagtcactaactaataatcaacctaggtcctaaacacattttggcttttgatatctcatcttgtaatatttattatgttttacaaatacattttggtattcaatatgataaatatatcattattaatggaatttaaaatttaagaatgccaaataaacctaaacctaggtcctaaccctaaacctatgtcatcaaccctaaacccactatttgtttcttaaaccctaaatatatgttataacctacgtaccctaaactaagtaactaactaacctactaatataatatatatcatgcaatttcaaaaattaactaaccttacctcacctcacccacctacttcatagtctaagacactaactaataatctaataacactaacaatttaagtcactaactagtaacattgtaacatcaataaaataaagaatatttcaacatgacttacttgatttatacagcttctttgcaccttcttccttgcaccaacccaaagcctttccttgcaccaagccttttgcagagagaatgcagagaaaaaaaatttttgagggagagagagtagcaagtgcagtgtgggatggctgggggggtatttgtacaggtagctgaatcacgtccctgtgtggcgtgaatggtgcttggtcacgtccacacaggacgtgaatggtcctctaacacgtctctgcacgacgtgaataaagccaggacgcgtccctgcaggacgtgaatggagccaagacacgccgctcctagacgtgatgcaggctctgttacgtctgccatggacgtgaatcaacacgccttccacacccgtgaccatgttccagtcgcgcccatgtgtgacgtgaataaacacgttccctcacagcgcaaatgacagcattagatccgtatatacttttcaaattgccatattttggtaatttgttatttaaataacattattttaattttttgccgacaattatctaaatacatcagaagtattctaccaaagagattgttgtgtgtttgtgcgagtgcaccagtgtgtgtgaggacctgtgataccacaaattggtatcagagcattgagaaactggagagtgggccaagtagtagtctgccattaccccgccttacaaaggctaattacgaaaattggagtatccaaatgaaagcccttttgggagcccatgatagttgggaggttgtccatggtggtttcgaggaaccaacatccacagcaggatatacggcagcgcagaacaagacattgaaggagacgaggttgaaagacaaaggggcattgtacatgttattccgggctgttgatgattccgggtttgagaagattgctggtgcaacgacttcaaaggaggtgtgggacatacttgcaaatgtctacaagggtgccgatcgagtcagacaggttcgacttcaaactctccgtggagagttggaaggaatgaaaatgaaggaaggagaaggggtatccggtttcatcacccgggtccagaccgtggtaaatcaactaaacagaaatggagaggtgttgtccgattccagagtggtggagaaaattctgaggtctctcactgacgacttcgagaatgttgtatgtgcgattgaggagtcaaaggacctagcaacgctcaccgttgacgaacttgctggttccttggaggcgtatgaacaaagaaagaaaaagaagaaagaagagtcactagagcaagcactccagacaaaagcttcaatcaaggacgaaaaggtactctattctcaaaacttccgaggaagaggacgtggctatggaggtcgaggagatggtctaggtagtaaaggccgcggtcaagaaggaaggaataaggagtatgctgaatcaagtcggcagaattggcgaggccgaggtcgtggaagaggccgacattcaaatcaatcaaatgtagaatgttttaaatgcggaaagtatggacattactcgagagattgcaactcggacagatgttacaattgtggtcgagtcggacattttgcgaaggattgtcgagatgaaagaagaaatgaaacttcaaaccttgttacagaaggagaagtaagagatggaggaattctgatgatgactagaagtgaagtcaaccagggatccgagatggaatggtatctagacactggtgcaagcaatcatatgtgtgggcataaacatttgttcagtaatctgagacaaatagatgctggacatgtttcgtttggagatgcttcaaaggttgatgcaaaggccgaggtacgatttgtttcttatagaaagatggacgaattgtgcgcatccgagatgtctattacgtgcccgatctaaaaagtaatattcttagggtggaagagaggattcaaaattctagaaaagggtggagaggattcttgtttgtgtctccagcattaggctgttgagagagcgtctccgagaggttgagagcaagttgagagcgtttccaccattgttgttggtgaggttgagtgtctccggctgaaggccgttgagagtgattgtaaccattattattgagaatagtggattgttctagactaggtcccgtgggttttccttttgaaggttttctcccacataaagctattgttggttgagtctggtgactccccagtgtttgtggttggttgaggtgttgctcccaacagagaaggagattgtgtgtttaatcccatcaaagtaagacagtccaaccgagatccgtgtagataataagtcagcaatcgagttagctaagaacctggtcaatcacgaaaggagcaagcatattgacgtcagatttcacttcatccgagatcaagtaaaaggaaagaaggtggaattacttcatgtggcaagccgagatcaagtcggagatgttttcacgaagccattaccgacattactgctggaaaattgtaagatgttggggatgaaagacggaagaaatatttaaagtttatagggggattttgttggattaaactttaataatagtaaattagaaatgtgaagagtcatatccctaggagaagaagttactcatgtgaaaagtcatgtctgtaggagaagaaattactcatgtgaagagtcatgtctttaggagaagaagttactcatgtgaagagtcatgtctttaagtttcttataaatagcatctcatgtaaaatgccaaaagtgtggcttggcagacaattatctaaatacatcagaagtattctaccaaagagattgttgtgtgtttgtgcgagtgcaccagtgtgtgtgtgaggacctgtgataccacatccaaacccgtggaaactatgcagagttacccaagtagaaaatgccaaaatcattctaagcatgctcccaatattatgctgctcaatcataatgaccctttgcttagcacaactccaaaccttctctattcaacaaggctcaaccatgaacaccaggatcgccaagcattttaacatcccacctgcatctataccaatcatcccagttgccttcttaattgttttcgtccctttctatgatcgcgtttgtgttccttttctacgtaaattcaccggtactcccaccggcattacacacttgcaacgcataggagtaggcctaatactctcttccatctccatggaagttgcagcaatcatagaggtcaaaagaaaaggagttgctagagacaacaacatgcttgattccttgccagtattacagccattgccaattagtatatcctggatttcttttcagtattttgtatttggcatagctgacatgtttacctacgtggggcttcttgagtttttctattcagaggcaccaaaaagccttaaatccacagcaacatgctttctctggtgtgctatggcccttggctattttctaagttccataatggtgacaattgtgaatagtgcaaccaagaatattactgcaagtggaggttggttagaagggaacaatatcaacagaaaccatctgaacttgttctacttactcctttccatattgagcttgatcaacttctttgtctatttgttcgtttcaaagaggtacaactacaggcctcaacaccctacagttactggtggcaattcagatcgaggaagtgaatattgggagataaaggtttagcttaatatgattaatatggaacagtgaagatttagtgggtacgttgtacttttcttcgtttgtcaaaaatgtatgtgagtaaatagatagaggactgcacctttaattattttccttgtaatgtcttgagttaattagagctatagtttccaagaaatccatgtgaagtttttattttacctctgcctttggttacatttgatttctattttcacttttgctagaaatttttaaaattcattaaaagttgtattttaaaaccaataataattgtacaattaaatataaaatagttattttgaaaatcaatacattagaatttaataagattaacttatcctaaatagaaaaggactcatatatctaattaatgtcttaaagatttttttggattaatatgtagtgtaaagttcatttgtataggttatgtgtgatttattaatgaagatctccctaatgttttatccattgttttcctaaaatcttttttttttttttgacaaaacctaacatctatttgatcataattttgatccatgattaattgattaaagcttattaacctatttttaaggtttaaatatagttattaattcctcaattttttttgaaaagttactttttattcaattgattcacggtttcataatttataatgatttttaatcaccaaaatttatttttaaaattttttaaaaataattttgacaattttaaaccgacaaaatatttaactctatgatttgatggtcattgtttacacattgtgttagttttgaagaaaaagatagatataaaattgtcataatttttaacaaattaagagtgttttaaactatcataaatcattttaaaaaattatgacagtgacaaattgtgaggtattcaaatagaacttcagttttgcaatattagagtattataattatgacagcgacaagttccggagggagaacggaaagagactttttggaatgaccgaagcaaaaacagaagcggctatatatgcagaatcccttcatcgtgcaagcaaaagatattgcttcgtctgagccaagtaaaccagtactgttacacaagaaatgatagttgaaacttgaaagtactgaaaaacctaaatgtgtatcaataatatgatgccaaaataaaaacatcatctaaataccaaggatcagacaaaagggcaaataacatgttgcaccccaatggtcagctttgttcataataataaataaataaataacaacttttcaagtcagtaagtagaacatctaatttaaaagctaaaacacgtaaaaaaattctataggcgttagggttcacaactgtacagaaaatcatacaaagtgtcgtgagagcagcaaaggaaccaaaagcttagaagattttatttccgtgttttttgaccgaattgaccttagaagtagagacgggatattttcagtcgctgatgaacaaatatttgtcaattgcaatttgagtagttctttcattaaatagttctaacagattttattttatttaaaattttgtttgattgtgaggtattaaaatagaacttcagttttgcaatattatagtattgtaattctgcatatgaataagttttggccataacatatttatttttcattattgtatcccctgtatcattcttacttgcaattagcacatttaagggttcaactcttattataactcaccaattttgaatgttcaacataatttgtccgactaattaaaaaagatataatttatccgtacattacacggaaaatcgtattaatttatcttaaatttatattttttttccaaattatcatgataattaatgttcctttttcttttttaattgcttgacaacacattctctcttattttaattagcaatattctattataaaaataattaatataagaaatattataaattaaatcttataaaaataaacattattttaaatttagatcttctaaataaaaatataagtatttaaaaatattgtgtataaataaagtatacaagttgttatttgattatctttaattgatggtcaagaggattctcttggttaaaaaagacacatatttgatggtaaattttaaattgggatcttagaccactttttgatggatcagtgagaagctttttgttcgagttgactgtgtgattgtggttttatttatgacaacaggaaattttttcctattagatcactttttgatggaccccatagcgccacttagtattgaaaatcttttaagataatgagatcttaaataattttaatgagtctcacatggactccactttaaatatttaaaaatttattaaattaattaaataattaattttaattaataaaatatgaaaaaaaatataaatattaataaaatatgtaattaattttaacttttaattttattttatttatttttttcttcttttggtcctatcatataaaaaaatcatttttttttaatttcatgcatatcttcaatgtttttgtgaagatctggatctatggatctatacgtgaagatcttattttcttctttagggtaatctcccaaagttgctcttattgtaaactctctcccattatcgtcagttctgatgaattaaaaaatctttaattgatcatggtatattgacgtcttaagtgaggagtgggagagaatagagtatatacccggaatatgccttatgccacatcacatggttcgatccaagcataactaaccaacacagtcgattccaaatcctaatcctaatcctaatcaatctggttccagtttgagttgcgattatggcaagccaggcggtgtattcggtgtgggcgattccaccggaagacgtgggcgccagatgcgccaacctcatgaccgccctccgatccgagttcggtgggccccacttccacccccatatcaccgtcgtcggagccatcaaactcaccccggaagacgccgtgaccaagctccgatcggcgtgccaagccctgaggcccttccacgtcaccgtggaccgcgtggccgccggcagcttcttctaccagtgcgtgtatctcctactccgccccgagcctcacctcctcgaaaccagcgcacattgctgcacccacttcggttacaccaattccactcgttagtgactttctctttctttaattaattattcttcgttttcgaaagaaactttagttcgcgaatgttgatgattgattcctttgcagcttacatgccacacttgagtcttctatacggagatttgagcgatgaagagaagcggaaggcgcaagagagggctaatgctatcgatgacacgctcgctggcttgacctttcagattacgcgccttgccttatacaaaacggacactgaggacaaaacgctcaaatcttgggagaaaattgctgaatgcactctcactccaaattagtagcttcttaacttcaatattagcaaaatccacaactctgataaagtttttggttttctacactctctagctgtcttcttagtctttctgagtgctactgctatgtgcttactgcttaccaatttccaaactcatatacataatgatgtcaaataataaggcactagtacttcttgttgtttctactttttttaggcccataattatgaaggcattattaatctgcataagttttgctgtgggtaaaagattgttagacacccttggaatgtagacatcaacatagcgattggaagagagaagagatgagtaattgttatgattagtgatgtgatttgataagaagtattaaagggtagtgccaatcagtggcgaatccagaaaaaattatttatgtcggcacgcacacttagtggcaagagtttgaggtgtctctgaaattttttttttaaataaaatttaattaggtccagaatgggtagtaaatgatccgcattatggtaaaacacaaaacgaaaagaacaaatgcaatgctagctattgtttccaggatccatgaattttgcaatttcattaacaaggttacggaaaagattcaaaggaatgtggtcacggcctcagaggaccaaggtcatggttcatgcattttggaatttaaaaaagtacccaatatgtataaaaatctcataatagaatttgcaaattgagtatttgcaaattttcagcgtccaaatgactattttgttgtaacaacactattgacaattagaattatggcagttacatacatacagtaagttttgttgtggcaagagaaatgcttgcaacaaaatctcttgtactctagtttcaacctagtattttctaatggctcaaattcatgtaagtctcattaaatatatacatctcatttctcatttggtaggtctcatcctcaagctaatcacactaagttataacaatatacgtgcatactgcagctctgtacagttgtgtaatcaaatattgttatactagtttgattatatatatgccaagagccttaatacaagtagcaacactaggtctctttaggtattgcttcatgcaccaaagccgcttttgcttcactagagctttctttatccttaaaataccccaaggagggcagggctaatagaagagtaaaaggtttccatgagatatatttgtttgaaaaaaaaataaacaaaactattagacctgtattataccagaagtctccgttgtggaaggtggtagtatggattagataaagatgttgtcacagcggaacaacagagcagttgcaatgatgttggatggggcaaagctccatgtggttcaatcaggtttatggttcctaaaataacctcaccagtccattaaaaccaggatgccatgaataagaactgtacactgtttcttatgcacgagccgaagcaaaaaagaaaaaagaaaaaaaaaaactgttaatctcaaagaacagaatatatattctttttaagtacttaatcaacacttaccatgttttttcatctcttttctcttatcacatcatataacctataatacttatatatattttttttctcttttttttttctctctctccctaggtgtcatataacatattgaatgtttatagattattttccaatctcagaatatcccatttggcatatggcgacaattcttgtttctgttttgtttatatatctgtcgagttctaaatataaccaatcttctataaagtttaaactaatttgacataaaacattttttagatatttcttccttttttttctttgaccaattaatttaaatatcaacagaatcttcaaaattcaattcgtcaatcacgtggggtgtagcagtgtggcacgttacttgaactgtcattattgtgatgattaacacaatcgataatttcgttatccccacatctttcatatacaaaaaaaatgacaacatgatgattaataactgcggctaccgtaatttaaactctttattagttaactgctaaaccaagcccaaatgcccaatcactgaaatcaacattgatgacttatgtagacctaaaacagcatagttagcaaacggacagtaagaagggaataaatggttaaacagatcaaacttatattagtagtacaattttccatatcaccaaaagaaaaagtagtaaaattttccaattaaaatcaatattacatctggtttcacgcttccatttttggttactagatgaaattagcaattactaagatgacataataattttgattggagaaccactataataatacttaatgggtactattactacatttaaaatttgtactaattaatcaattctaccgtatgaactataattgcggagtgttggggtgttggtggtgctttctcggcttttttacacaaatgagtaaatttaaaataaaaaaaacactgtagattttgaaaatattacgggtatgagcaagtcgtgttttaaaacactatttcatctagagaaagacgtattttaaaataagactttaaaaactcactttttttaaaataaaaaaataatgaaatcacgttaacaactttagtattttttttcttttttaaatattgaagttgtttattaaatcacaaatttaatctttttttttcttttttctttcttttaaaaaatattgaagtcgattgttaaatcatgactttagttttttttttctttttttttttttaatttgaaatatgtaagtggtgtttattttttatgccataggtattggtgttgtgtatggaatatattatgcgtataattgtatattatttttattatttataagtgtgataattatttaatgagtatatttaatttgttgaaatattaattattttttaaaatagtagtaatataaaaatagaaaattagtcatagaaatgtaataaaaattaacatgaaatatattataaatacatggaaaataaaataattattgggaggatgtcccatatgttagtcttttcatcaattgttgttgacttaatatttcaaatataaaaaaaataaaaagaaagactaaagtcatgataacaaataatttcaatattataaacttttttttactaaagtcatgatttaacaaacgactttaatattttttttaaaaaaaaagactaaattcatgattataatcacgacttttatattttttaaaaataaaataatacttgaaatcatcttttaaaatacgattttagtatttttttaattcaattttctaagattgtattttaaaacatgactttctttatataaaatcatattttaaaatacgacttataatattttcaaaatttatcattcctgtaattttttaaaaataaattaccgatttatgtaaaaaaaagcctgctttctcggtgtccatggaccatggctaatatataaggggtggaacttaatacaccagcaaaaaggctaatacacccagactttttttaaaatggcaattctacccttcgttggttataacaaaagctgaggaccttctcttgctgccattaacgagttgaagcttccgttgagtgcattgtgagtgggaggtgttggttgtggtcgtttaagctggtggtggttgcctttgacgctgttgggttggtcggagtgacagacggtggtggagcaactgtcggtgaaggtaagttgcgtttttttgcatttacggattagctaatccgtataagatctacggattagtaaatccgcacatattgtaggctttgtgtgatccgtatggaccatacggattgtatgatccgtatggaccatacggattgattaatccgtacgattaatacggattgatcaatccgtatggtccatacggatcatacaatccgtatggtatgtacggattgatcaatccgtattattaatacggattgatcaatccgtatatgccatacggattgtatgatccgtatgttgaaaaaaatggaaattaattattaaaatgtgattttaattattaaaaattgtgttcttaatctacgatatctgttcgtgttgtgatttatgtcagtttgttgtcatttgtgaagatgaacgacgatgagtggatgtatgatgctataatgtccgaagaaattgacatgaatgaagatatcggagataaaccgagtgcatttgaaaaagctgattgttcagtcgattgctctgcagcattcaatacttgtgaggtatgtctattatttataaatttgttactgtttattaacaagtgatttatggaacttaatcgtcattattattgatttgtgtaggtgtttacttctcgtgatgaactattaaaatgggctagaagggttgcgtatgagaatggttttgtagccgtgataatgaggtcggacatacatactggaaagaagggaagaacttcatttgttttgattggttgtgagagaagtggaaagtatagagcgttcaataaaaacatggtgcccacagtgactagcacgagaaaatgcaattgtccgtttagattgaaagcgaaaccagtaccggaaggtgaagggtggatggtgaaattattatgtggcactcataatcatggtttggcaaactcattatgtggacatccgtatgctggtcgactgacagaggaagagaaggttgtagtgcatgatatgacacgatcgatggtgaagcctaagaatattctccttactttgaaagagcataatccgaataattgtacatccttgaagcaagtaatgaatgcacgatatacatatcgtacccgtatcagagaaggtaatagtgaattgcaacacttgatgaagcttctaggacgagatatgtacattcattggcatagagtgaaggatgaaaatgtcattcgtgacctgttttggacccatccagatgcagtgaagttgacaaatgcatataatgttgttttcctggtagacagcacatacaaaacaaacaggtacagacttccgttattggacattgttggtgtcatcctactggcatcacgttctcagctgcgtttgctttattagaagctgaacgtgtagacaatgttgtttgggccctagaacgttttagaggcatgtttattaaaactgaatttttcccaaaagtcattgtcactgatagagatttagcattgatgagtgcaattacaactgtgttccctatgtctaccaatttactttgtcggttccacattggaaaaaatgtgaaggcaaaatgtaaaacttttatccgacagagtaacgcatgggactatgtgatggaagcctgggaaagtcttgtggactgtggtaatgagaatgaatttggtgattgtatggcaaagtttgacattgcgtgttctccatggcctgcgtttgttgattacgtgaaaaccacatggctcaatccacacaaagaaaaatttgttacagcgtggaccaaacaatttatgcatttgggtaacacaacaactaacaggttagcaaatctttaagttttgtaaagttattgcttttatattgtggttgtaggggatagtttgtgactgttaccattggattgcagggtcgagtcagcacattcgacattaaagaggctattgcagaatagcctaggcgacctctgtagtgtatgggatgcaatgcacaacatgctgaccttgcaacatactgagattagggcatcattggagagaagcacacatgtggtgggtcatgtgtttaaagtaacactgtataaacgactgattggaatggtgtccaggtatgctttaaaccaattagctgctgagtatgagcgagtaccttacgcaggcaaaagcaaaaaacgttgtggatgtgttatgagaactacgcatggactgccttgtgcatgtgagctagctaagtatgttcttgggtccatacctattgatgctgttgatttgttttggcggaggttaagttttgaagatcaaggtgtggatgagggccaggtggacataagtggagagatggaagccatatctatgcgttttaataaccttgatttttgtgggaaggtcactttaaagtcaaaacttagagaaattgcatatcctgacaaaaactcaatgcgtcctccgcctgaaaaagtgaaaacaaaaggtgcgcaaaagagacaagtttcgcaacacgcgaggtcaaccaagcgggatccatcttactgggagcatgtggacgaattacattctgttcagaatagttgttcgacaccaaaacatcctgcaacatcttcggctgatgacagccatacaaagacgaggcctccgatgctggatcagtttcatacattcatgcatgatttcattgtggacattattgatgttaaagctgatggtaactgtggatttcgtgttattgcggctttactaggttacggtgaagagtcatggtctctggttcgcaatcatttgcttaaagaactttcacaatggtctggtgaatacatagcattgtttggtggctttgacagatttgagcaattgaaacggtccctacttgttgatgggttgtcaaaggtaactactatgttactatgtttgtacgtatacgttaacctaacttattatatttacagttaagtggttttcatgtcaggttacaattgataagtggatggatatcaccgatctggggtacgtcattgcatcacggtataaccttgttcttgtttctctgtctctcaaacaaagcatgacgttctttcctttaagaagccaaccacctgcagatgtcaatgttcatcgggtaatttgtattggacatgtgtttggaaatcattttgttcaggtataagttgttgaacgtagtttatcgccaaaagactcttaacaaatataataataaataagtttatgatggttattgtttcaggttgcattgaaagctggatgtcctattccgccacctgcgttgttatggtcaaggaattgttacaatgttgcaaatcaatggatagttccttaccaatatagaatagaagcttatagacaacttcagcatatccgtacggattatgttgacttacgactttagttaatattgtaatattgaagttgatattgttgacaaattatgaatcttgtttaatgatgtacttggatggtattgttgacaaattataagcgtgttttcatgacaagcgataactcaaaagaaacataatattataatgttaagtgaacaacaatgtcgaagtacatgaagtacaatgtccaactaaaataaagttcacatatggtgaagtacaataacaagtacgataaatataataataaataaaatgcatccaaaagcatctctactgctgcctctgcctggtccgtctctgtcgctgatagacacatcgttcatcggtcacggaacgagatatacgtagtaggcgctcagtagcggcataggcatcagtcccacgtgtaaccatgcgtaggtctatcatctcctgtaagccgcgcgctatcctatcgaatgtagcctgaacaaatgtcaaaataataacggttaccattctaacagtacatatatttcaaaacaaacatttcaacaatgctgcacataccaatgcatggcgaggtacgtcggatataggtggatctgcctctgggtcatcagtagcagcatgcggagggtcctcaacaatgtgtgactctggtgccgggtgcctaacaggatcaccaacctcaacgggtctcatatatggatgcgatacgcggaaaaaccagtccatgtaacccaccactgtctgactagcatgacaggcaacctcagtggtggatgctaagtgatccccaaactgtatccatgcctcgtcaatctcatctgtggatggcacgtctactaagtgcatgtctggaatatcctgaacatacccgtactgcctcaggaccctgcccggaagatgtctgacaatgaccggtccgcagcgaatatgaccagagaagagggaaatgatgtcgaagtctctatgtggacgatgatcgacataaggagtccaacaaacatcctccatgaccaacctatctagtcgtctacgataggtggtcataggtaatgcctgggcaggcttccaccgacaggctcgtggttgggactcctgataatcctgaacagcagtgacatttcccacagtggggaaatgttcatagatccaacactagaagccaacataccaacattagtttgttatcagcagaagcagaaaacataactacatatattaaacacaatgacaacagtcaaaccattacctgaagtaaggtgatataaccagcaagatgcttgccgtggtgctgacatgcataactgaggttagcatacatgtgaacaagtgctgccacaccccaagcatatcctcctgcgtcctctaaatcacgaaaggcctccaagaacaccacactgatatgtgtagcgctcttgttggcaaacagcgtgcacccaacaagatgaagtaagtaggctctggctgctacaatccagctcctctcctcgcacttcactgcatagatgtctcgcagccaagacaaacgcacatatgccccatggcattgctgcatctcagctccagcatcttcaggggtgacgttcaacaagtcaacaagcaagtgaacgccctgtccaacgtcgatcgtgtcgtacgacaacaaatgtccctcaatggggatatgcaacagcgacgccacgtcatccaaggtgatactcagctcccccacaggtagatgaaagctgctcgtctcagggtgccacctctccacaaaagccgacagcaaacccctgtcacctgtctcgactgagcatgcaatcaacggggctaagccggtaccagccaccagtccttctatctcgagtgcaggccgcccaaatttatgaacctttcttccgtgggatgccaatttcaactcaggacgttcctacaatcattttacatcactgtcagtcttgtacttcaaaaatcaaaccaaatacaataataaaataagtacctgtccttcccacactcgcagagcgacgtgatcagcatactgtgtcaaaactgacgtgtcctgtggaccacctggataaccttcgaattcatcacctcccccctctgtggaagggatatcaggctccacatgttggtcctcaagaccaccaccgtcatccaaaccagcccccaaatgcaagtctcgagccggagggtcaacaacagctgccggagggtcaacaacagctgcccctggcctttgtcttctgacagatgccgtgggcctacgacgctgaggggctgcatcttcattcccactgttctctctaccagatcctctgtctacaccacgacctaaggcccgatgtcctcctcgtgttctagccataatctggtatacaacaataacaatatggaattcagctctcagtcaaatacaaagatatcaaatataatgggtgataacaatatcatcaccattaagctgtaaaaacacaatcaacaaaacaacgacaaagccaaccatcatcacaaccacttcattgatgaaatcatctatataattaccaaagccaaccatataaggcacagctaataacaatattatcacacataggttggtcaaacgataatgaacacacaaaccaatcacagacctaaccatcatcaccactaccaaaggcaacacaaccatcatgaccattaaccaaaatacgatcattcatgcaccatttactctcctatctaactcccttcccatgatatacttgtgatcatcactaccaaaggcaactaaagtgatatactagcataacaccaataaggcacaactaataattcatgcaaccatgttgaccactaccaaaacatattgcctttatatatgctacacatacaataagaatgtgccttttgtgcagtccatgttttcatattgaatataatgtatgggccacaattcaaatttctatcaatcccacaatgactattaacatcaatactacaacgtgtaatcatctaatctaagtcaaataagtttcctagcaactcaaatatgtacaataaccaataaaagacacttcacttaatcataaaatcacagataatacaattctaacactgcacggatcagttaatccgtatcaggaatacggattagccaatccgtgaaattcatacggatcagttaatccgtaaacacttcacggattggctaatccgtatgcctgatacggattaactaatccgtacagtgtttacggattagacaatccgtgaagttcatacggattaactgatccttatgaacttcacggattgcctaatccgtaaacactgtacggattagttaatccgtatcaggcaaacggattagccaatccgtgcgatacccaacagtccccgatagttgctacatacctcgcgcggcggccggaacagataaccacctccctcagtcgacgaacaaccaccaatgtaggcttacacgcgtcggaactgatgaaaccaatgacgagcacagccaacctcaacgaaatcgcaacagagcagggtgtatgcgcagaatccgtaaagccttcaatggtaacagtggtaatgaagggtttaacactagggacatttaaggaaattcactgtgcattttaaaaaaagtctgggtgtattagcctttttgctggtgtattaagttccacccatatataagtaacatgtgcttgatatgtaacggcctttcaatgctatgtttaacatgttttgtgccacaatgagtgatgaggtacaatccatgaatagaccaaactgtacccactaggcaatttcacttgctatgtccaatcaagtgaaatatgtgggagctgcatgcctagttggggcgtggatggatggtaaactcaggttgggataagctaccttctgtaacaatgcacaaaaaaggaattaaatcaaatagccaagatcaaatcaactattgttagaaatgactccatttgtcgtatcactcgattttagcacacaaaattattcttccattgaataaaattaggatgaaacaatccatcctaatcaacgttcaggaattaacgctgtgttcgatttgcaagacagaaataagagacaaacaacggtaatggggactgagtttggttggcatgattttggagagagagtaaagttataatttgtggggtttatagcttaaaatttccgtctttggaataggggtagcactaagtgggagtttaaaattttcggtaaaaagataatagtaacctttaaaaatcaattgtttatgcaaaaaaaaataaatagattttcttttttggctatcatacccatatgtgataaaatgggatatccgacccaattccggtctaatgtgagatatgggctataatgggtcgaacaaaaaaaatttgaatttaatttaagcttaaataacgaaacttaagttttgtgaaaggctgatttttgtggactcagcctgcattaaactatgattgatttgatataaaatttacatttaatttgaactaaaaaaattaaactcaaattctagattttagaagatggatttggacggctagcccaatccatttttgtcacctttactcatccctactcatataaacacaataatatttttgtctctatttaattctttctttcccatatatatcaaactcctttacaatattatttttactctatttctcacatatttttcttaaaccagactaccaaacatatatcttcatttctctttttttttttttaaattatctattttctattttcatcaattatatttctctcttctaaatcaaatacaacctaagagatgaaattgtattgtaaaccattacagtactgtttcgcacatagataatcaaattgaaattatctactaacatttatgtctagcataaaaaacattcatatttgtttatatgagacgaatatacattcttgaaaataaggtttgatttattttagattttaacaacaaacgatgttgttgctcataaagaagaagaaaattgttaattttacgagactttttaaaaattctttgagattttaaatatggatagtaattgtcattctgcataagcttatcaaggtatgttaaaatacaaaactaaaattggagcatgcatataaaataaagtatgaaacaaaaaaatgaaaatgaaaattttaattttaattaaataaattgaaagtgtaatatctaatcataaattatgctataattaagaattattaattttataataactactataaaagtcttatttaaaaatgagtttttattagttaacggtgtattataactaaattatttaaaattttaaatatgtataataattgtcgttgtgtaaaaacttgtcaaaatatgtttattttatacaataacaagaatatgaggattaaatcctcagctatttatcctaaccctcgtcactaacccagtggattactttacttatcaaagtatgttaaggataaaaaaaaaatgattttacttagatcatgcaaataatatcagtataatgaataagggtgacctacattacttgtcagcaaacaagaagcagcagaagaaggaggtgagtagatgaattaaatcaggttgtcacattcacatggcagttgcattgccttcaacttttgggtcaccgcatagaggtacaatgtgctgtcaatgacaatgaggacgaaagatgtccaacagtataactaatacaaattccaagattaaacatacatatttaaagagaggtttaatatggtagtcattgtaaatattagtagaagatagaaccttcaaaaaggactaaaagaatgaaaccgcgttgttcatgattgtcagtttgttagaaaagttaatacgatacttggaattaagaatgagaattgtttgaagcccttgtatgtagaatacccaaaatggaaaatttggaacatgatgcattaaatatgtgtagaagttaaaggaaatttatacttggaagaacacgcctattttcattttctatctttttttcccactctaatttgtaattataaaaaacgccttatttttcttttgttccctatttttaaaaccttatataattgtttctcataatttattttaaaaacaaaaaattaatatttttgtaactaattacattaatggtataaatcgcaactatgtatccagaattcaaactctagagttttgattatgttgaataatttcaggttaattaataattgttcaaaaggtttatttcacaattgtaaataatgttaaataaaacaaaagtaaaaaaaaaaatttagagaataataattgtgtatatttttttcaataggaatagtttatttataggtataaaatataattaagaaaattacaaaagataaatatatataaataaattaaagaaaaattataaaataatgaaatatatggacaatcacaaataaattattcataacactaatcaatataaatataacaataaatatcataaataattatctttgtttcctattttaaaattattaattaatatgtatataattatttagattgcatatactcaaaaatcatttgtaatattctaataatatttaacaaatggaattacctgaacatatattaacaaataaaatattaacaataacatattacattatcttaccagaattagatacacatataaaaataatataggcaagaataatcatgttaggatatcacataaaaattgagataaactaatatacacaaattgagattttaataaatagtaaaatgtcgcattcttcaagaatgaaaatttccttttttttcttgcactatttttccatttctagtgagaaagaatcaatcttttctattctcattcttcaagaattaattttttttccttttttattttttgtattgtttttccacttctagtggagagaaaaaaatcttcaatttttattttattttataaggtcttcaagactttttacaaaaatatttttagaatttctttatttaatagtgctttcaagacacattatgtctgaataaatttcatatttatgtaaataatataactatacacattatagttataaataatatgagttgggagatgagaatagtgttaccttgaaatgtgaattaaaaagaatatgacattctctaggataagatcaaattataataaaattcataggcctcaaccattgcaacattatttttctcacatggagtgagatcattattttttattttcacttttacattattttctcatttcggatgagaataatatcctaaaaaattccttcttgatagtatctttaagactctcaaatgatcaaattcacaattgcttaaatagaacccaaatattataccaaactcatagtatgaataacaaaattagagagagaaaaaatctagccttgaaatatgagtctaaaagaacaattttctccaatttttacatgattttttcttataagttacaataccaattgtcaataacccatggaagaaagacaatcatgtaaataaggtgttaaataaaatataattcaaataagagaaaaataaagaagaagcgaacacaagagtttaaagataatgatatatatatatatatatattctttctaataggagtaacatatttataagtacaaaaataattgaaaaattacataagataaatataaataaggaaagattataaaagacaatgaaagatatgaagaatcacaaatagattattcataacaaataatttattaaactttttttataaaaaaattcatttgacattgtgaaaaaaaacttttatacttacgtagtaaattaagacactagatatcaattaacaacatactatattattctttactttagatttttttttttaaaattaaactgaattttaagaggaaaaacaatgtttacacaacatactcattagttatggacaaggttaaattttttaaaaaactgtctgcaacaacaattacaatggccacatcaaaaattgagtcatatttgttcacaattttcacaatatcaagaaataatggccacaaaaccaccaccacaatttaaaacctcacacaagatacacgagagaaaagaggttccactgactgaatcatttcatggaatatctcttgttctaagtttccaacttcgctccacgtgtctttcaccccattaataattgtttccagatctctctctcatgccctacttccctcactagctagtgcatgaatttcttaaaagtaaaaaaaaaaaaatgttaacaaaattaaattaatttgattcacctcaagtgattcaataaataaaaacaaaagaaacaaagaaaagtgaataaaatatacacagatgcagatgagtgtgtgtatacatacacaatttgtttcatatatgcataaaccattatggaagaaagactgtttttcactttataaatacccatttttggtcactttgcttgcattttctgatatcttctgcctgatctgctaagtggacaaaagtgagaaaaatatatgcacactattcttctaagggctggaacttgctctcctgtcctgaatataacttctccattttgtttgctcaacaggttggtggagcaaaatactgaagcatcatctaaaatgccttctgaatggttcacctctttttggggtaaatttttcccttgaatccaagattttgcaacacatgaactagattgcaatttgcaaactagccattacaagcaaatgaaactttttgaagctaaatatatataaatagctaatgatttaaatgttggactaagttcttgaggggtgaagaggttgttccaagctttcattttcttctacatttcttttcagattcttccccaacctgacaaaaatagctgaaagatcaaaatttacttatgtgttttgtcaagaaatactttttgtgtgtgtgtgtgtgtgtgtgtgtgtgtgtgtgtttatacgaggacaataaaatgataagatcttctacttgattcagcttgattaagtccttgagggatattccaagcttccatttcctcttctttccttttcagattcttcacctgacaaaaatagctgaaagatcaaaatttacttatgtgttttgtcaagatatactttgtgtgtgtgtttatatgaggacaataaaatgatgtgatctttttacttgattcagcttaaaaacatggctcttccaaaccaatccatgtcatcagagtctccccagagaaagatgggaaggggtaagattgagatcaagaggattgagaacaccaccagtcgacaagttaccttctgcaagcgcagaaatggcttgctcaagaaggcatatgagttatctgtgctttgtgatgcagaggttgctctaattgtcttttcaaaccgtggccgcctctatgaatatgctaataacaggtacctgcttttcttcaatctcttcataaatattttgggaacattgaatttatataattttgctcatgcaaaaaaatcttctgaaggagttaagcacaaagagcctaattacttttgtgatgcagttagaatatggagttaatttttcctctttgttttctgtaatcacggttcccttgtctttttttttttttttttttttttgtctttaacactcatcaagaattgtttcttctattttggcctttttccttctatgagcttttaagctcattctcctcttttttcttcttctgtttatgaaaattattttcttagttcttgatttggtgggcacatagatctggtgtaccatatagacatagaagcactatggttgttaactagtagcaagaggaaaggatttggggatgttatgaaggtctgtgagatcagccaatccctagaactcataaactttctgtttcctttttcctctttcccttctctctctttctttactcatctaaaagctaaagctgtcatctttccattagcccaatttccttagtaacaaagccagttgattagacaaaaaagaaaaagaatgacagtacactttcaacaaattgtcaatgactgaatgagttaaactggaataaagaaacgagtaaaaaaaaataaaaatggatttttgtaacccatcacaacaagatcttctcagaaacattgacatttaaaaaaatcaaagtacactttcaacaaattgtcaatgactcaatgtgttaaactggcataaagaaacgagttaaaaaaaaataaaaatggctttttgtaacctatcacaataaattcttctcagaaacattgacatttgacacccacttgcaagatctcgcactgggttaaaaataaccttagaaattagggttttattagggactaatacatgagctgagcatagctaattagcaaagggagaagaaaaaagaaagaaaccgttttctcttctcagcatgaccagaaaatagtcaaagttaatctcttaatatttattgctcgttgattttccccattttaggaaatggagtttggcaactatggttagggctttaaggaaaataaagggtggctctagactaggattttcttttttgtcttggttggaagaatctttgaacacgtcacacgtgatttttcagttcttgacttttgaaaaaagagtttaaccaagtcatactcggaagatggaattggtatctctttaactcttgcatctgaaccctaaagttggatcttctacaacacccctcctatgggaaactctctcttcagcatagagtaaaaaaattcttttacatagtttggaaaacagcaaaagacaatgaaagagagtcatgaaacaatgagggtccaaaacgctgcatcatcataatttcactggtagcttttggagcctctgcatttgctcaagatcttgaactttacatatttgtgaaagttgtagtctgagaaagaaaaataagggttttttaagctgaatgagagagagagagagagagaggtaaatggggggcagggagccaatgagagagttctgagcattttggcttcttccatgcaaaggaaagtgtacaactactgcttttgcttgctgaaaatttgcagtagctgaaatgaacggctgtgatgtacacatactttaacacagaaaagactatttttttaaacaatatatggtatcagattcagtaaatgtgacttaaaaatcttgcacgaaatttagatggttagaaatcgaggtgagcaatgaggtgtggttgagagcattatccactgtgagatgcgtttccttgaagtggcagagaaaaaaataggtctagaaatggttgaaccaatcatattgtgggaacctgtgccaccgtggcagcagcagccaatcagtggctcgaggatattaaggtatcagttcattgcaatactgaaaaggttttcttcttttcttttcctttttcatccctaattttctattattattattatggaaactaaatcattttgttattttaagattttatttttatcacatctaatcagactttgactccagtcgaggtttctgaataatgagatcatgtgatgtttattacttttgtgaatttagttgcgtttgaggttcggttaactgaaccagttggatgatttgacattaatttcaaccttggacaagctctatggttaacctcaaattaatatggaacacagttgttcctttttaatttcttttatttttgtttctttttatttacgcacaaagtaagaaaccgagttaacttgaaagattcggatgaagacgttctagagactgaaatcaaatgtatcccttagagttagtgataaaatgataatactgattttaaaattagttgtttgcatttatagaatttaaagttattaatcagttgtgaatttctagaatttactaactacatttttattactagttatttacactttattattctattgcactataaactgtagaagatatgaatcctattaataaagctgacagcttcacgaaagagataaaataaacgaataaaggaatataaattcaaaagatgtgatatatataataattcattaataaagtttagcttatattataactttcattaataatgttatcctagtaatttatacactcaaaccaagagataaatgtagtttatgtgacaatattcctctttctcttcaaccgtgcaaggaaaattttcagatttccaattactaattaccctcaacagggttaaggatacaagattaaaaaaaaaaaaactggattgggtttatgcactttagaaggtaaagtgcacaaatcctaatcattcatattagtaaatgatttagataaacacaccttaattaaaattgccacatcaaatttttctttaacgaaataaaacttattaaattaaaatagaaaataaaaaaattattttggcttgcttcacctaatcatcttcattggttacacagaagaaaagcctccgatacaattgttacaaattgttcttcttaatctgcagctttatcttaaaatttcttactactcttaattggaattttttcttccaaccacttatccagcaatgtagaagccaataacggaagaaggaaaaaataaatcatttgcctaagagccaagtagcaaccagaaattagtagctatcaagaaaagaattagtacgagcctaaatagtggcccctctgtccagaagatgtccagcatgacctcattggtcgatgcaactagttttttttttttttttttttttcattttgtgataagcacatatggaatcaattgagagagagagaaatcacgttgaagacatggaggaaaaaaaattcagataaagcaagatttagaataacaatgccgcaacaattgtttttagggtttttgttcttttgtatatcatgaagatgatcaagtgaagcacacgagaatattttctatttttgtttaatgataaaaaatctatacggcaattttaagcaattttaattgaggtgtatcaatctaaatcatttattaatatgaatggttaggatttgtgcattttatcctctaaagtgcaacatgcactttagaggagtccaaccggggctagtcataactaaagctagtgcactgtttgatttagctaagattctcaaaaaatccttttataatcaattaagttgcaggggttaataataatcacaaggaacctaaagcctttaacataactatcctagttaggatgattacaaattttgtaagactaaggcagcctacaagttattaagattaaatatttgtttatcattcagaacttttttattttccaaaaaaatttgttactggagaaggagattgaatgctataccggaaatttggtcgtcaatcatgttctttgacttttgggttatgcttatataatcttgtaacaggacaacttgtgaatctatataaggtttttttataataagggtcatactcttgcagattattagataaaaaaataagtaattttctgtgcttatataatgttctttcacaataatcagaaaaagtcctttatcacttagatgatgccactgtcatatcacttagcacaatgaatataatttgtaaataatcttactgttattatagcgtcaaagcttcaattgagaggtacaagaaagcaagttcagattcatctactggtggacgatcagcttctgaggctaatgctcaggtattaattcattattccttctctacattttttcaagagaaactttatttgaaactaattaaacaatgatagatacattaagttaatatcatgcagaaaaggaatttgaatgtaattgcaatgaattataaactaacatttttaaccatgatttcaaatctcagttttacgagcaagaagctgccaaactgcgtgtgcaaataagcaatctgcagaatcacaataggcaagttgcattagtaaaaatttcactacaatatcgaagggaaaaaaaaaacatatgaagagatctcaagtattatttcaatatttagtaaaaatgttttgaatcgcagtcaaatgatgggtgagggtttgagcaacatgaatggcaaggatctcaaaaacctagagactaaattagaaaaaggaatcagcaaaattcgttccaagaaggtatttgtatttctagtaacaagaagtttctttctatgattttgaaagaataaagtatgcagatttactatgttgatctaattttatcctttcttcctttgtttgcatgtgctacttcccaaacacctacatcagaatgagctgctatttgcagaaattgagcacatgaagaagagggtaaatgttttccttgtattcttattttaatttctaaggtcatttttttttttttgcatttattatctaagtggcttccattacaatttaatcaagtttcttaagtttagcccaatggtctctagttaagatttcacaaatatctgtattagggctctacaattgtttttcatattctgtttaagtttcctcttggtcaaatttggagatttccaaagatggtagtgaggatatatagatcattccattgcatgagtactattcatgatagcttgagtagctcctagagcctaaagatgaatcatcttaaaaagatgccactcaataaggtctaaggcccccactcaataagatctagaaagaaaaatgaaaatttgtaaggattcaatcttgtgtataaaatataaatgtgaattgtagctgcaaatgttgtcacaaataaataaaacagaattagatcatataattattaatttgagtttggaattttttatttatacactttataatattatagactatagatatatttagtttaatttattttatactatttctacgcaaacatttttcaatattttcaagtagtttttcgagagaaaaaataaatttaatctgaatgttattaaacccctttaaataaataaaaacacaattgcgcaataaaatatcaattttaaagcaaatatgtgagacactgataactaaccatatcacaatattgtagacggtgcatgtaaagtttgacattttgtatatgatgaaactttggcttagactatatgttcatccttatccctaaataaatctatatataggtgcctataattttaatctgtgttttttttttggggagacggggtatacaaaatttcttctacagtgactttcaaagtatacatagtaactaatatgtacatttcacaggagatacacttgcacaatgacaaccagcttcttagagcaaaggtttgtcattctatcatcaatctacactctttataaatatatgacgtttgtattgtagtttcattatcaattttcttttttttgagtgtgtagatagcaggtgagaggagtcaccataatgttaacgggttgtctggaagcataagctatgaatcgatgcaatctcagtttgactctcgcggcttcttccaagtgactggattacaacctaataatcactatgtcggacaagacaacatgtcccttcaatatgtgtaagtttctcccttgctaggtttcacattcattctataacttgatatgtatttgtttttaattccttaatgttcaaatcactagttactacctattaacaaatctcataagagtcatcatagctttatatggtcatatcatagttccattgggaaagcagatatagaataaatgaagcaaatagttttatggatagatattaacttgtcctatgcataatatggtggaaaaaagggtaaaaaatgtgaagcacaagcccaaccaaggggtttagttgagtagtgttcgtctgagttcaatttctataaataaataaaaacacaaaaaaaaaaaattataacaaatgaatctttcaagatacaaagggacatgcttgtggacatagttgttcttcacacaaaagagtcaactacaattatgatttcagaaaatcccaatagtcatagcatgtcaattaaaaaaggtaataataggagaattgaacctctagtaaagatgattcgagaaagaaattgggatttgtataaatgaaggaaaaaaaacatatggctaaagaattgctttagttggctataaataaatgttttctcaacataaattgaaatttagtttcaataatagcttgagttagcacatatatacccgtaccatgacttgatttcgtaaaacaaagagaagagataatggggagtgaatgagtaaacaagtcctaatataaaatacaaaatatatacagaaccgaactaatttgcattgcaaaagttatgttttaatattcaagttattttgtccgttgacaggcatatttgtgtgtcccatggagacttgacttattgtatatttttaattaatgaacaaacataaatctaatgcttgttcttttatcttgtactctatcttgtgcagttgaagagtttaagcttaagaaggagaaagacttagatttcctattgtttgtatttgacgtctagtatgatatatagaaatgctaaagcctaggaagtatgcagaactcaatggagggaattcatttaagtattcccctcagtactatgttatgggctatttagtatgtatacatgtactctgagtacagagatttgcaccatgtcatattttgtcaacgtttgtatacttttcatatttctcctgtaataggcttctatatatgtctatttcatatttcacttactatgaattcaagatcttactcatacatgcacctgttcttgagtatgatttttttaggaagatcattgttatctgtgcaaagtatccaccacattttgaatatgattaatttaagatttaaatacattttagtctttgtcatttatcatttttttatttttttccttacaatttttttacttgttttgttttttagataattaacgcattaaacagtaaaaaaaatattatctaaaatgttataaaaacaaaaaataaaacaaacatttttgtagagactaaaaaaaattataagaacaaaatgcaaaaaaaataaattataagaactaaaaatatatttaagtacccaggctaatttccagcattgttaagcatatgcaagtgcatatcggcatccactgtaaattgcaatcttcgttgcttcaacatctacatactcagctctatgagaaagcttgaaaggaatgttgtgatcgacaaccataatgtttctttcctgttagtaaaaattgttccaagggcaaaagcattaacaaagtgagaaaataaaactggaaaaaaaaataaaagcactcaagtatctgcaatatcagtataatatgtattatgtgtatttgaatgctaattaatcaagtttgttagattaaaagttgatatatatatatatatatatatatatatatatatatatatgcgcaagggtaagtggttatggattcgagtccggaaacagtctttttgcatatggaagggtaaggttgcgtataatatccctcccccttatttgcgcataacatggatcctccggacaatagagtagtaatttttttatatatgcaaggataagactactacttataatatttctcctttttatctacgcgtaacgtggaacatacggataatgaagtatgtaatttatatatatatatatatatatattgtgggagagagagacgatctttgaactttttaaaatatataaaaacaatgacacgagctgatcaaaagggtcgtactgatatgcaagatggaaaggtggaatgttagacaagataaaagctcaaaatagacaagcagggtaagaagaatgattaaactcagtgagaagtgtcacatgaaaataagcgaattgagaaaggctactgtgagtgtgaccatcctacttagcttcactgcctgacaaagtcactttcctgatacagtagtaagcacttctctaacagcttgtttgagtattagagcctcacagaagtgttctaagcttcatgtggttatattcaaagcttataaataggattacaatcaattaaaacactgttgggcaagttgagaagccatagaacagttataaactgttttctgccactctgctcaaacaaactgagtagcatgaaacttttttcttgtgtagtgtatccctgctctgcagtaacttttgaccctttcctagagtgttttccagtgtagatatgatacacattcaacaacttatacaacaattcatgcaacattatttttttgcgtctatctctctccatcatcctatcatttatcatttattatatttcaaattcaatttttcctctctttttctctattggttgtacattttgttgtacaagtatcatttctcattgttttaattcagtctgtttgttgagctctatctttttttcactcttccattatttatttatacctttgacattgtgaccgttagggcaattgaatttcttaaaactcgttttcagactcagcttgatgattaaccaaatcatcactttagttaaattttttagaaggatactattttgcaggtgtttatttcaggtataattaggtttcaagtattgggttgctgtagcgaatacatctcattcttataggtctacaacctttatttatatcttaatcttggtgataaccggttataaccataaatccaaaaaactaacaattaacatttaccaaaaaaaaaacaataaatccaaaataaattaaacataattaatgcctatgcatgaataccactatatacaacaacagcacaaaaactaagaaagatactggatagttttcactttccttgagggtaagtggcccttggcaactctgatttctgtagattcttttttttttaaacttcaatttctgtgattagttagaaaagatctggaacaaattaactactattcaaactatcataaagaagttcttgatctgcaggaacaaaagtacaccaatacataatgacatgaaatagctatatataacaccacaatattgcaaatgaaattccaataattgattgcaattaatctccttcggctacaatatgattattataagttctagcaaaaatcaggtacatccttaaataaatatggttgtaagagtttccatcttcattttaacttaacaagatgacagatatccattgggtgcgccatggttggaatgggagcattataagcacttcttgcactgagttggttggccatctcagtaggatgaaatgcatcaaaaaatacgtgtaggtttctgttcttgcatggctcctcattagggatacactgcccattcggccccactttgcagcacataacagtttctgaaatccctacatggggccaccaacgaaagttaatatatttaataaacaacatatctatttgcttcaattttttaaaacgatatgatcataattgcattaacataatagtaaaaattgaagacatgcatgtgcatccttttggtcatagtttcaattatacaaattcaatttagccaatcttttgtggaaagtacaaagatacattatatatgcattttacaagctttctgctacgaggaaataacaaatacgttaaaaccattttagatgaataagtgtttgaatatatacaggcacagtaaattatacaaaatccatacttgctggtatatcatatacatcaattgaatcttagtactactataattttggctatgaaaagaagaagaaaaaaaaaattgttaccttgtaactttgaggcgtgtaatgagaccacagcactattaatgaagataaatttggcatcaggtaattctttattgaaacgatcaactactggtttaagcttatcattaaaaatgagtgctgctgtattttcctcgtcaacacatattgacccatttttcccatgaatagagatttcatgcggaatgcagcctataagccccaggcctatcaaaacaaacttccttgccccaagtgcgtgcaaatcctgcacatagaaacaacaaaagtagataacaaaccattaatttggtgcatcatgtatattataaatgttacttatattacgtctgatcctttttttaagaaacaagttttagtgtattttatactaaaacttgtttctgataatacctttttctagaatttgaagtaaaataatacctttaaattccttgcatattcttggacaagggccacagcatactgttcaggagaatacgttcgacttgatgggtaatgctccggtaagaagtagttgtttaagtagtcattgctgcctatattcacataatataagcacttatttaggtggtggtgtgcttggtcagggcctccaagtttctgagtgatttgggaaactatgactttatgattttgcaactgcaatcccaagctaatatcctcacccttcaattacaaattaagtaaagtaaggtttttgctccattagcatgaggataaattaaactccgcctatgtgtgtatgcatgcatggcctgtcccaagccaggataaaggaggagggttggcgtcaggagttgcgaaccggccataaaaaattagctattcttatgtgatgaacctttatgatatttcgttggggcgttcccttcatagcgacgcgttacatcggaccccggatgtatcgaaaaaagagctagggtcctcgccacaaggcaaggcgctacatcgaccccgggatgtagtgaaaaagatgctagggtccatgccgaaaggcaaggcgccaggtcttcacccggatttggtgacaagaaggcaagggtcccaacacgcagatgggcgagcgtggcgggcaaacacagcccaggggtttagaatgaaattgggaagctggaacataggaacattaacgggtaaactgagggagttagcagatgtttttgccagaaggaaagtgaatattgcttgcttgcaagaaactaagtgggttggagaaaaggccaaggaagtggagggcacaggttttaagttgtggtacacaggtaatatcaagagccgcaatggagttggaattatgatcgatagaagttacagagataaagtcgttgatgtaaaaaggaaaggcgataggattatgatggttaagcttgtagtcggggatcttatcgtaaatatcatcagtgtgtatgcacctcaagtgggattattatcagatgaaaagacccatttttgggaagacttggaagaggttctaagagggataccacgagaagagaagattttcctaggaggcgatctaaatgggcatgttggtaaaaacaatggaggttttgatagaattcatggtgggtttgggtatgggactagaaatgagactggagaagatgtcttgaacattgcactagcctatgatttgatgctagcgaacactttttttcggaaaagggagtctcatcttatcacgtatcatagtggccaaaatcgcagtcaaattgatttctttatggctagacgggaagatagatattcatgtattgactgtaaggtctatcctggagaatgtgtggcgacacaacataagttggttgttctagatgttaggttcaacaaagttcttaatttgaggaagaaggatcaaaatccaaggataagatggtggaagctaaaggaggagaaacaattagaatttatggaaaatatgttgcgtgaaggaccgtgggagtgtatcggagaaactaatgaaatttggaataagatggctgtatgtgttcataatgtgggaaggagggtgttaggtgaaagcaagggaaacagagtttttacaaaggaaacatggtggtggaatggagaggtgcaaaaggctattaaacagaagaaggaatgctttagatctttgcataaatgtcctaatgaggagaatttgcaaaaatttagagtagcgagaaaagatgcaaagaaagcagtgcgagaagctagaggaaaagtttttgatgatttgtataaaaatcttgggagcaaagatggggaaaaaggtatttataaacttgcaaagatgagagataagaagagtaaagatctcacccaagttagatgtatcaaggatgaaaatcaaaaacttttggtaagggatgaagatgtaagtgaaagatggttacactactttaacaatctttttaatggaaatggtgacaagagtgaggtggaattggaggacgtttctgatgatctgaatagaagatttgtgcgcagaattaatacatatgaggttaaagaggctttaaagaggatgaagaataataaagcgttaggacctgatgatgtccctattgaggtgtggaggggattgggagatgtggcaataaaatggttaaccaatctttttaataggattcttcaaacaaacaagatgcctgatgcttggaggaaaagtatgcttgtgcctatttacaaaaacaagggagatattcaaaattgttcaaactatagaggcatcaaacttatgagccatactatgaagttgtgggagagagttattgaacatcgtctaaggagggagaccaagatttcagtaaatcaatttggatttatgccaggaagatgtaccatggaagctattttcctgatgagacaattgatggaaaggtatagagaaaggaaaaaagacttacatatggtgttcatagatctcgagaaagcatatgatagagtcccacggaaagtcttatggtggactcttgagaagaaaaaggtagcattaaagtatattaatgcaatcaaagatatgtatgatggggctaccacatgtgtgaaagcttgtaatggaacatcaaggtatttccctatcacggtcggtgtccaccaaggttcagctcttagtccttatctctttgccttagtgatggatgaactaacgaaagatattcaagaagaagtgccgtggtgcatgctctttgcagatgatgtagtacttattgatgagaccaaagatggcgttaatagaaaattggaattgtggagaagcactttggagtctaaaggattcaaggtaagtaggagcaagacggagtatatgaagtgtgagttttcgaggattaaagacggtgagcaagacacagtgcatctgcttgggcaagaggtacccaagaaagacgtttttagatatttgggatcaatgttgcaaaaaggtggggagatcgatgaggatgtaagtcatagaattaaagcagggtggatgaaatggcggagtgcatcggggtttttgtgtgaccgcaagattcctattaagctaaaaggaaaattctatagaacagctgttagaccggcaatgctttatggagcggaatgctggccagcacataggcaacatgagcataaaatagaggtagcagaaatgaggatgttaaggtggatgtgcggatacacgaagatggataagataagaaatgaggatattcgacgaaaggtatcagtggtaccagtatgtgaaaagatgagagagcatagattgagatggtttgggcatgttatgagacgaccattagatgctcctgttagaacaagagtatgttaccaagagctagatacaaagagaggtagaggtcgaccaaaacttacctggggaaaggtagttaaacaagacctaatggagtgggatttagattggcggacggtatgtcttaggacggagtggagaaaagctataagtctgatggagggttaaaccctttagtagttctatgttccagttgtttcctgttttaattcttttcttcctcttttctcttctcctctcaccattcttttatatttaactctgtttctctcttttgctttattttcgatttatcattgggttcatctaccaccgaccccaattaatttgggttaaaggtgctgttgatgttgatgttaatgttgagcatgaggataaattaagtaatacatccatgatatattgtgtatatgaacctaatatcaatagctgattttctaataaaaaattgaaattactttacctttaaagtgagttttagcttgtgagttgttcaatttaaagaaatcagatccaattaagtaagtgaacatgtgatttgatttaatgcatgaaacaaatgacacatcacacaaatcatgacaaaatcacaaaggcatatatctcaaaaccaaattataggtaagatgtatatatataaattagatatatatagtaaaagagtttgaaatataccaaatgtaacccggtctcgttgcgaatccccgctgaaccggatgcataattcacgcctttgagtatgtctgaaccaccggtatttgcaaagggtgggataagattttccaatcccaaaagctcagctgcaataacataattttatattgaataaaatgaaattttaattaactgaaaactcatatatacatcaaaataacatgaaaacaaatcatattaatctatggaatttattctattcaagttatcaaacttaacgggacaaaatcattgtttgtcttattagaattgagtttggattcgttaacaaggattcaaattctagtgtttttatggaaaaaagaagagatctcttactaaaaataatttctgaagagatcaattatggataaaaccggtaaaacatcttttgcacctataatccaaaaaacttgatgtgacaaaattaaagatcacatgtctactttcattaaccgtgtctcaactctcaagctcttcaaatataactccagacaaaatagtcttgtccatgcccaattgcaaccatgtgaaagaaagatatacatgttgagaattgaattattactgattatatcaactgaagtacggccgttggtaaatcttccagtggggccaagtggaaaatcaatcccataaggcaagttattaactttggcatctgtatttagattgttgttgtttccactatcagataaagagtctccaaaaatgaaaagacaaggcacttggggcttcccaacaacacaataatgttgcatgtatgttgcactgaagaaaaaaatcaccactaaccataacttggtttcataatccatatcaaagaaaaatattaagagggcgaagttcagatccaaaatattaggggtccaaacacaagggtgactagataacatatatatatatatatatatatatatatataaatggagagagacgtgagagaaaggaaggtatgacccagtttaatttgtggagaaattcgttgaaataatttatctatgtgacacattgtaaggccatatgttgattttagtaagtgaatttcatgcacacactattagaaaatgactggagcctacatacggcagaaactagaatttcgccaagccatgagattgtaactatctcaagttttcaatttggacaaaatttaaatgaagttccttatgagtgatttttatttattttttttacttgtttaagaaatttggaggtaaaaggaggggaaaatgagggagggttaaaatcactaccttttaatttctatctccctctcaatgttggtagagtaggaaaatgatttataattttaagactgtgacttaaattattttaatattttattgtatccctttttttctctattatcatttattagatataactgcatatattatcggcttaaaaaaattgcatatattctctagattttttcttttcctatacgaactaaagaaagtgatctttcatgatcactaaatcaaattaaaaatgacctcttttttttcctcctcttttctctgttaaaatttctctcctccacctttactcccttgaactaaatacactatacatctttgtattaaattatgcagtttaataattcacacaaatatttatataaaattccatgatacatatatttattatttataaaaacatctacatgtcatcatttaaataataaaaaatacagtaataaagaatttaatttaaatcctggtttgtttgaaagaagtcaaatgaaagcaactataaataaacataaaacaaatttattcataaaaattaaaaataaatattagaagatttacgacactaacttttcttactcaaataaggaaatttgatcacttattagaataatatttcctacagttataattttttacaaaattttcacaaactgctcgaggtaaagtttgaatttaatagataccaaaaattgaatttaattacatgagttgtttcattaattaatttagattcaaccacttggcaaaacaagatacaaccactttttgaagttttagatttttgcccatttgttttgaagcatttgcttttctctgatacttctgctgctacttttgttatagattgcagctagttttctgttttgcttttattttttactagctcaattgattaaataagatatatgaattattataaatctttcattaattcttacgaataaaaaaatatacaacacttaactgtttgtattttctaatacaaaattacatataccgccggcagctcaatggtaattgtgtaaggcagtaatgctcaaagccacatagcatgccacgttaattctaggtcaataccatcgagctactacacctcttacaaaatttgagctactgtgttactcataaatataaatattgtaaatcttcacaggatcctaacacttggcattggaaaatggttttgggagcttccacaacagtcgacgttattgtgttaaaggcaattcggcgtcaattaatcgagccaccaatgaacatcctcatctccaacggctagtattttcaaagaaagaccaaatcagacttcataacgtccagcaaaatccaagctaaagagtatatttggtatgagaaaataaataatataaatgaaaataaaaagtggcaataagtgagaaataaaatgataataatttgagttgtttagttaaagaaaaatagaaaaaaaaaaattagtataaataaataaaaaataattcaaatgaatcgcaccattttaaaacttatcagtaagccgaatccaaactctgattgtatatctctagcaaaaataacgaaactctttgtatatataatttgtccattctccataaaaaaaatagttacttaaaaatagtaaaatacgtacgaactctgtttttttagtgatttactttgcatttttatttttaaagttcttattttaaattttaataaaagttgggtcaaatataggcacacgttttttataacgtgacatgtcgtttatattttaatttctttttaatttaaatttatttttcttaaattaaatataaatactctttataattttagttttcttatttgtatttttaaaattttatatacaatataaaacacacacacacacgtattacaatttatatgtttaaaaactatttttcttttcttgatgccgtgaattccatttttttaattaaagtaaaccttttaattttctactaagttaatttatactggaaatatatatatatatatataattataaattttacatgcattaacgatagccgtaaaatatataaaacccttgccaatttgacttctaagtttattttatcatcaattatttgtattaattttttaccagaaatgttaaagcaaagagtctgttgtgaaagttatcttaatcattttggaagaaacattcacaaggagaatcgatcagccaacaacatgctattattcactataattaaataagcaatcttccaaaactttaaaacaaattacacctgtacttgtgaacccatgaacatttagcatatatgaatatgtaagagaaagagagaaaacttaagactcttatgccttaaaaggagtaacacattcgaagaacattaaatatggtcgtggcacagcttaatagccactaccctctggaccatgttcattgttcagagatcatatctgagctaagctttggatatcaacagggtaagcatctgatgcagattgaacactgtaagctctctgagccacaacaacattgccagcttcagtaggatgaaaagcatcccaaaacaagtactctctcctgttttggcatggtgtttgcattggaagacatgtaatttgaccattgttccttcctaccccacagcacccagcatttgtaacactgaaacctgaagattgattcatgtcaacagaactttgtgagttcatattatttgatgctaaaaaaaagtgacaaaaatcatgactacaaaataaaatgcattggtttgaaaataattaccataggctgaggggttgcttataatatcttgaaagatgccataagagttaatgtagatgactcttgcatcaggcagctggttgttgaattggtcagtgagacctttcagtttgttgttgaatatttgatttgcagaattgatcttttccacacatgttttaccatctgggctgttttgggccaattcatttgggctgcaacctatttggcctattccaaacaacaccattttccttgctccataattgtacaaagactgaatgacaaacacaaacagtcaatatttcaatttgtggagctagctagcttttcaattttcaatttcattcctgactttattgtaattgaaaattaaatggctattttgaacactgcatgtttctactatattataatagaaaaattgaagatggtgaatatcaaatggtaaaagacagagagctaaagactaacttttagttgttcagtatatgcttgaataagaacatcagcatactcatctggtgagtactgcctgctgctggaatagaattgaggcatgaaatagttgttgaggtaatcattgctgcccaacccaattgagtatatgcacttgctcaagtaatttgcagctgagtcctcacttcccagtaaatttaccacttgagacaccgtgttttggtaattttgcacctgcccactaaaactaatacgccctccctacaaaacatatgaacaacttaagaacataaataccttaacaaatgaagattaaaaacagtgatgttgcatgaagcaaaaggaaactataaatgggtaccagttgctgcccagtttcctctctaattccagcagcagcagatgcataattgactcctttgagtatagcatcgccactagcatcagcatatggaggtatgtaatcatcgaatcccaaaagttcagctgttaaatttcaacagaaagttaaaacactagtgaaacatttctatgggtatatacttacaagaatcaattttatgttccagatctacttttctcttgttcttgtttgtttttaccaaatcagttcttctggtaagtaaccatctggcagtaattttttcctgtttctttctttatctgtaattctacaattctacctctttgtcaatgaaataaactacacaacactctagtcttaaattgcatattgaatgcggcaaacagatccatgtgaatggaatttaaggatcagtcacaagcctttatgaggggtatctaactcagagtagtgccaactctagtgtcaaaagtcttgctttttttcgatgacatctgcatgttactccttttttaattttttttatttcaccggtaaaaatattaatgcatcttaattataccctttccttctaggtggtgaacatttattgtctgattatagcataatacagcttgtcatccgatagaaaattatgcatgcatatattaagatgcttttagttgcagttaattgataggttcaaaaatagggaagaagaagaacggatcttagaaccattttgatgccattgactcactataactatgacttttacaatgatgaattgatgattattataagtgcatgcatgtgaatctagttttaagaccatgcaaagatgcaaacgagtatatatttcaactaaaatgccgacatgcaaagtttataagccaattaagcatgtgcaagctcaccaattgcatcaacagtggttttcccattggaaaaccttccagaaggtccatcagggaagtcaatcccataaggcaagtaatcagccctagccaaagattggagctggttgttgttcccattatcaaccaaagaatcaccaaaaatgaagtagcatggcacttgtggtgcaccttgaacaccactccacaaaccaagagaaacaacaacaatgagtgccaacatgcttattgtgagattcaaagctgccattggagcaagaaacggtgttgcttgtgaggaattgaagtgaataatctaggtagctaaggaagataggggcatgtgtgagtgattgaatgtggaaggtttgacacgagtataagtatatatagtagtagagagataaggctctatactagtagtagtctatagtgtagcttttacggttgggagtgttagttaggtgcattaaatggacgcggatataacgtgagattgaatgaaatggcttcattaccaattccactgtaccacccccaccatcaccggccgatctatgttggggtgagggtgggccactgcaccccctcatttcaataaaatcgttaatatctgtccaaaaatattatattttgcacttcttaattttatattttgtattctctaattttatttatttgaattttcttaccaattcacatgtaagattaagtaaatatattatcttattttaataaagtgcatatatttatcttaaaattttatattttgtaccttttatcttcgtgtttgaactcaacaatctcatatgataattattaattttttatttttttaaataaattgtcctcactgattcagagtcctagtttcgcccgtcctagtttcgccagtgagcccacctcattgattaaatctgatcactgatgttatccaactttaatgtagagttgcatcttgctgggatggaaatttggacattacaacgactggttaaaacacttaggtatgatacgacactttttatacttttgttttgagtttttccggaatgttaaagtttcgtttagtatgggaatttcaaaaattattttcaggaatttaacaagtctggaaattggttttcaactaagtttcttactggtttcaaaaattaagtttcttactgaaatttttctatgagaaagggtggaatcgaaattcaagacttatgcaaaacagaaaaggttttttttttccataattatgtctttcatttctgaaaatattttagacatactaaatatatacttataaattataacagtcttttagaattttcttactaaatattataattttcaagaaacatgattttttttagtttattacgtagtacataatattttagaaatactacatacatatataatattttggacatctatatacttgattttgccgtgttcaacagaacgagctccaccgcacgacgacctctatagatctagatgccacatcgtctccctatatgtatccatagcaaactcgccacaactgtccaaccatttgaagttcatgcccaagaaagaagagaaatataatagtattaacaagttaaaatatatatatatatatatatatatgtatgtataatcactactataaaactgtattttacgagtcaaatcatttcaaaaacctcttaaaataaaatgcagtgaaaattttgtaaataggagcgcacaaacgatgacggttttacgaaaaccgtcgtgatatgcgcgctcaatttactccttcgtcttcaacctaacacgcattcactcactcgccctcatcgtggttgccctcactcagctcgtgctcgtgctcatgccttccctcattgttgccgccgtcgaaggtgtcgccattgtccccaaagcgcttcctctatcttatcccttccttctctctctccctctccccaaatacctcctctctctatctccacgcgccgccgcaccttcgccatctgcgccgtatcccaaaacggcgccgaaaccgtccccgtacactacgacttcgacctcttcaccatcggcgccggcagtgacgacgtcctagccgctagcttcgctgccaactacggcgcttccatctacgagcttcctttctccattatctcctctaaaataaccgaaggcgtcggcgaaacgtgagtttctgattttcaatgtttttcaatttcgctttttattgaactagggtttataattgtgaaggctagtgaagcagagtttcgtgtttctgaagattggttaggtagggttcaggctaaccaagctttttcaacaagctcatttgtttgatatattctaacggatagcattctatcattggttttgcttattcttaatagttttcaatttaatagttccccacttcccctacatctcttttgctatgctaatagtcaattgttcaggaacctcattgaattgtaaatttatatatccatattaaagtaaagagctattatggtgaaagcacgttgttcccaacttctattttatttattttaacatgtcctgcatatcagaattggtttctgatataacgtaataacattattttatccatttagtttatctattgggaagggcttttggggtggtagtttgtatattatgtatatccctctaatcccatatatattttccaacttttctgcacttgataactcttgaaacaatgcttcgggtgtatgaaacacatgcccgactggcactggaatttggggacctgtttgagtataatcaggtttgttctgtatattttttgaagaaaagagacttttatgttttagttcattttagtctttgattacttttttgtacttgtttttgcttgttatgcttctgtttcttctttttttttcctgagatcaaggattaatatacttcattaaaggcagtcaatgctatgaagtagtgaattataattttaatcaacgagtaaactttggtcccatctttgcttgttttggaaataggaatcatagaagttgaggatgttattaaccttgtaattggactttagatattgaagctatttgtgtgaatgtagtgtcaatctcagttacaaactgtttatgccgaaggcattgaggggtccggtatggattttgctgcttacaacttgctttgtgtcataatgcattcaaataataataaagatcttgtagcaaggttagccttacatgcttgcttgattctttttttcaaaaaaactgttagaactgaattatgtcatgtgattcatctatctgaatttcgtgattattattgttaaaatcttcattgttgaaagttactagattgagtcattttggagttatattcccagaaacatgctttgataattatattatgtttcacctatcagaatattgtgctaatattattataatctgcactgttggaattttctagtttgggtcctttgggagttctgttccctgaaaaatacgttgataatttggaacatgttaataagaatttagaaaatggtttgtgagggaaaggctcaaattgttggctgtttgggacctttgggtccttgggtggaaatcagtgattctcaggtcctgataaacaaaacacagaattggatcaatatatatcaagtctttcaatggctatacgtaaatatatttccttgaattattgtaataatagtttaatgatgtagtctcaaatattttgtcatgttatcatagaatgtcacgaatttgaatgtttagtgtttgtcaataccaggttatctcacgaagcaaagaaggatgaagctgtaaaacatgcccttgccattcgtgctgctgtaacttcagcaaattttattgcattctttagactgtacaaaacagctcctaacttaaacacctgccttatgggtgagtatttttaattaactggtttttgtagcttgttggtaacacgtaacatatatgttaagggggataaaatgaaatgaattttttaatatccacagatctctatgttgaaaagatgcgttataaggctgtgaactgcatgtgccggtcatatcacccagctctacatgtttcatacatttctcaggttcttgggttttcaactggcctggccacaaatggagcaagtgatgagagagatacagatgcattggaagagtgttcagaatggttgaaagcacatgggaccaacataattactgataacaatggagatatgttgctagatacaaaagtatgtttgatctctatcctttgtattcattgtcctgtaggtgctaatctagtcaagaatttttgttctcaagcattgagcattttgatttgttgaatcatcactcattttgaggagcatttacgattgtgctgcctcaaatcactgtatttccttctgccatattttgagagttggtttggttttctctatgaattagttaaccgttagttaacccatacaaatctagaattccctagttactagtcaactttaacaagtgttttcttaacctggttaatggttgtggattggtgatttaatgagaaatgtttaattttgcaggtttcatcatctactctgtttgtgccagagccagaggatgttggtggtgttgctacctgtcagaatatatcacttataaaacatgtatgcaaccatggatgatacagatattgaattgttacagcttaataaaccttcttcacattcgaattgtgaactatgtctgcagattagagattttgtttcagaacaaatgtctgtaagaggtattgaattccataccgaggagtctccccaagctatcacaaagtcagctgatggcaaattctctttaaagaaaccagcgggtgcctcaaggtaaggatggagttttgtttcttaaaagagttaggcacatactgcatttaattttttaatagtgactaaggacttcgtttgagaagaaatgctgttttcatctctagttcgccacttgttattatgatctcatagtcgttgttaatggcagtgcattgtgtatagtaaacttggaaaccacttttgttttgagaactccatggtattcaaatcttcccacattaattgtcttctatatatttatatatctataacatgtatattgaagtccaagtaatgtaaaagatgtaaagaaaagtgaaagtgcgtgatatatactcgtaaaatatacgaagtatatcattatactaattcttcagtatcttaaatatttttagactctttggtaaaaataaaaaattaggtattaagattgtctgcataatatagaagattataaatttatactaacaatataatatattatattgataatataattaatgataacatatattaatatatgtttatctgatatatatgttattattattattattatttgtaatatttacactaggactatatataatttctgttacataaaaaatatagcaataaaaaacttaatgcgaaatcgttaatatatgatttcacaacaacaaaaaatcattaaatacatgatacttttataaaatcgtgatattaatttttcaatacaaaataatgtaatatacattttacataaatgcacttctaccacaaaaaaaaaaaaaaaaagctctttcatctaaaattttaaaaagttaacataaaatatattaaatattaaaaaaaagattaattcattttagctgatacaattaattaaatggactcataattattagtttactttaacaagtttcaattattattttactttgattttttaataattttatatgcatgttattaatttgtatttttatattttatagtggtttggtgatagaacaccattaggcatgaagaacataaaaaataaaaaaaaaattgaaagaaattggcaacctaccttttagaagttaaaaacaaattatttagatgatataagaggaatttatatattggataaatgtttattgtaaatattataatcacttaataatttattgacaattatttgagcataaatatatttatttattacaatttgtttagatctagttttttgaatttgcaagttagatttgttgtaaaataaaataaacattaaaaaaaataaacaacaaaaaatcatcttaaaatgtctattttctaataagatttttgaaaaatcatctttaaatcttcatgttttttaacattttttaaaaaataacacaaactattctaaaaaaaattaatgtaaaaatcaagattttaaaatgatttaaaaatttttatgaaaagtgttaattttttatgtggatccattattaaataaccgtttttgaaagactttttttttataataatgaataagggtgaaccagtattttaagtaataatatttttctttatttttattttttaaaaccttatcattttattatccctctatttctgtcatatttttcttcaatcaaatgatctctttaatttctcttcttttctcttctgatcttttttttttttttgtttcattctctccttttaatttcatcctcacaaccaaatgaccccttaatgaacacttaggagatcagcaactgaattatacgctggagcaaacaatgaattaatgaagtgagatgttggtatttgattttgacagaatagatgtattttattttagtgactgaaaatagatgtacgtgttaataatgtctacttggatgccttgcatatcatcgtagtcatctcgtattaattaaataattggtcatgcgaatggcaagtgagttacaaatgaaaattactgtcaagttaacgagagagtaattaaaacgtagaaaaatgctagaaatacttgtttttctgacagcattcaatatttgatctgagtttatgcaaagatatggatatgaatacgttgtaaaatgattagatcatctcaaaaccacagatataaactttttaacttataaattataatcgaaaattcataaaaaaaaaaaaaaaaaacttatatcccatatatcaatcaatagatggaagtgcatccttcatgcagttattttatggaatcctgaggatacgtttccggcattacgttggagatatctacatgaaagtaaatgtcaattaattattgtgaataaaagaaagatcgactgcctattattacctcaaacatgcactagaggatattgaaggacgtatttaaccccagatttaactagcaataactaaaattaaataaataaataaattttaggccaaaatataagaactgcttttaagaaatatttttttataacataatttatttctatattataaatttgattttttaatttcaaagaaaagtgttactgttttgtacagcttagcacatagatcaataaatatataattatttcaatttatccaattattttaaatttaagttttgaatacataacttaaatatttataaaatcagagttatctaaagaattataagattgatgagtggttgaggaaaaagaggagaaagaaattatgaacgtgaatttttcactaacaaaaattaacagaattaatatttatgtattaataatatataaaattattttatattgtcgttcccataccttttttttctcaaattaacagactaacaaacatccacagataaaaagaatcagaatcacccaccagattaattgacatgaactatggcatgcatgcatgcatgcagcagctagggtaggaacagcatctacaaattaactactatcaatccgatctttccaatcaatgaactggttactagtgattatggcctagcggcacatgctcagaataagcatgtctttttctccggacctaccccttttgggtttcatgcctgagatggtaatttggaaagctggaatgatcaaattataaatatgcccccttttatttgtctccttgattgtccctctacacataactttatgacacggaacgaaaaagacaacgatttgatatataagcatgtcttaataaattataaaatcacttaatttttttttatttaagactcacaatattaaaagattctatatattatgactcaactaatttaaacagcattaaggttaatcatatttttaaatagaataaaacctttttttggtgaattaaatataataaaacatatgacgactactgatcaaattaattgtgactaccttttcagtgctaatgtgatcgtctaataaaaagacaagcaaaatattagcgacaacttgttattaattagcattcgataacacttatttaaagttttttttattctaacagtttgatccatcatatcctatgaaatcatatcacccgtgaaggttgttaattaagattcttctatctagcaacaccttaattaatatggcataaccttgaaagtttgttaaggattagattcgaaggggaaaatggtttatgatgaataccttgacaatcaaagacaggaaacagaataataactgacatttttttattagccaaaagagatttatttataaggtaccggcaaacgcccaaaaaatgatgatgatttacaaggacctaccccctgcacatacattcactagcttagcaattcaactcgaccaattgtttgtattcccaagcccataaatatccaacccgagacatcaacatatcgcatattacatgttgatattcatccaacaccagtttagacccgatttaagccatctgatctcattttcctccccattacgataattcccatccatcataaatattgtatacaagacaaaggatttgaataccactcaaaataagagaaatgaaaagctttaagtttagcctccaaccatgaccaagacttatattttattacctccatgacagaaatccaagtcaagtaattgatagcggaagatgatgttgtttctatggcaccatagtaacggacataatgcaagggggaattgaaaataagctttaaaacttctttaaaaaaccagaattttttgagatcaataatcgaattcgttcatgaaattgtaagacgtggacaaatttgtttctaaaagataaaaaattcaaatttagtctctgaatatgcaaaaagtgtaacaaataaattagtccctaaattttataatttaatgtcaaattgattctaaaaaaatataatttattgttaaattgatctttaaatattataatttaatgataaaatagtttcacaaatttaacgtcatgattaataatttgacgcattttttacatatttagggattaaatttgtatttttcatttttcagatatcaatttattatctcattccatttttaaagacaaatttgatttttttttttttataatggtgaaagtgaattttaaactatagtacactagcttattaaatggacactttcaccccctaactttaggacgacaagtgctctcaagagtcaagatataaatttggtcttcggaagccatgcaataccgtgtagctaactattcctatatacagcatcataaatgctttgatattaaattaaagaatgtaatgagtttgtctaagtcatacttagtaacgtgctttgttttgagtacttcattattatgcatttatagcaaaaagtccacactccactctcttcaattcatgatgtttatccaacattgcaagttgtcgttgacgtttgcctagggctagaagttagctttttggatggcttttggcattcaaaccaaatctgcaacccgtgatcctttgtaatgatcaataatcgctcctacagttttaacaactagtactagtactagtagtaatatttttttttaagccaaacctcttactattataagaaagaaaaaaagtaactaactaactcaaaatgaaattatttttaagaactaatttatagtataaggatttgtttcgacatgaactctttttaaacatttggatatataattgttaatgtcttataaaaaaaatggatctaatatgtacatatagatgttcgtttcctggaaattctcaagcgcatcttagttttgaggtaaaatttgctatgataaaaaattatttaaaagttagtaattttcttctaatctaactttttcatattttttcttctccttttttagtttccatttccccttcgttttgctagatctaaagcagtgtaattatagggattgttgacttatttaattaatggtcggtaccaaaattttcaaatttaaatgtttaaaataaaataaaataaaataaattttatttaaaagaagttgtacaccatacaattagttaacagtaaattataaagtactagctagtaatataattttatatgaatatggatcgttgacttatttagttaacaatcggtaccaaaacttttcaaatttaaaaataaattaaattagaatttatttaagataagtttgtagcaaacaaagtttaagttaagagtaagagaatggttatacactaagttttagatagtcatctaatcacaattcaacatgtatattaattttgttgacttttaaaataattatgttaaagtaatttaaaggattatttatgattagatgataatataaaaattttataggacattgacattaaattctaagagtaaatcataaagtataaactaatataattttatttgaatagtttatctaattaatacttttaaaagatgtgaaactgctttggctagcgaactaacaatatatagtactatttcttaccgaatatctaatattcggcacggggataggagaattagtgttagatattttcctgtatttattgactgtatcatccccccaaaaaatactacaatagtactattatattgcaagaaaacgtatggtgcagtaagatgcttggaggttgtcactgaattgaaagcatcatgcatgttgaattacgtttgttatttcatgaatatgcacggaaaaacccacatggcggtgacaattaagcagaaattttctttatatagtacgggatacttttatcagaattaaaaattcccccctctttgagaattgttctacattaatttgatcacattcacttaaaagttttttaatattttttctgaaagaagtgtcccagctgtgaatcttgatgttgatcgaacatgagccatgacaacgaatagcactcattagcatgtgattacaggctgactcggttgtttcataaataatccatctgcctttatgtgtgtttcccttttttgcaaatcactaagactattcgaataagacatgcatggtctccccattttttgagatgtaaaccagacatgttcaaatatggaacactcaagtaaaaaaatgatagtttcttttttaacaagtgggaatggaagacattgtcataagatttgtaaacatcatgatcaatcaattgaattatattcttaactaaaaaaataattttttatttatcagaatcaaccacagtattatagaaaatttataataattcacaaatttttattcaatcagttaagttagatcttctttcaaaaaaaaaattaatgactaaggagacatgtattacctattttataagtttacattcaaaatttgagttaatatttacgttatacattactttactgatatttaaacacataacacagtttgacttataaaccccataggattagtattagagtggagtaagacaaaatcttcttgtaaatgaatatgataattaagaagtttcttgctaatagctatgtagtatatgaatgtttttttttgcatatatttcatgggtatgaaccaccacatgggcgtgataatgagccattgcccaggggaaatgtgctgtaacgttttcttcagcaatgctaggctgttatacgcgcgtggtccaacacaaactgttagagcctaaattaaatcctaatcgtctctagtctttaatgttcggtataatgtctcttgacttttgtttcccttggaagatttgaactacgcgttcaatcacggaatgtcgcatcctggtggcaatagacttattttattcatagccttttactattctttatgaatagtaatggcaaaagttacaataatactatcataactttaacctagatttcttctataaaaaaacactgacctagaattccgccgtaatattgggccaatgaggttctttgtttttacagagccgatgagtttcaagatcaataaattaggttattagttgactttagaaaaagtaaaaaattgatttcacagttattaagaaaattaattaattaattaatttcattaaattatattatttttaattaaaaaacaaatatttttttaaactactcccattgaaacttgatatatctcattaaactaaggaaaagtagtaaaagagaacaaaaaaaattgtgtttttgtttataaaagagaatggaagagacatataagagcatctttaatgctagatcttcagtaaggatcttgaatttaatatctgattttcactaaatcttctaataaaggagttgaagaaatctctaatatggatgaattattgtagaaaatctcttaaaatctgcatattattcaaaaaagaataaattttctttctttttctctcttactaaaatctcaaaataagaataccattaaagaaaaaaatggaagagatgttgaaatttttttaatcgtatgtgacattatgggatctatcaaaaatagtcaaagatcctaattggagatctactaataaaaatactctaatacttcttataaataaaatttcacctaaattatacaaatgtatattaaatttcagtttaaatcaaatttatatttctttaggttaaaaaacgggtacatgactccctctaactactttcagtactttgcggtgtctaaccacaattcttttttgtgggactctgatccctcttcttgctcccattaattactatgaccgcaatttcaatgggcttcttgaatacagattttgctgaccttccatgagtttcggcctgttccttctatgttctgttactgttctttctcttttttctataaatttgggttgggttttgatagagtatctttagactaaagggtatcaacatagtgaaatctgcttcctacaccattctttttctattacaccatttttgtaatggtggaatatccaaaatatttttcgcgttatgcttcatacatatccgcataataagtttttttttatgaaataatttaaaataatggcatagacatgtctcgaacatgcaaccttcgcattattaacacgatgctccaatcaaccgagttaataggccaattatgttgatacatataatactaaattttttaatgtatatttaatacacatataattttatataataaatttttaacaattaattttaatctaataattaatttatagtttaacttatctataaattttgttttgtaacatatattgttacgaaataatttatagtttaatcgcatgtttgataaattaattattagataaattaaactataaattaattattagattaaaattaattgttacaaagtctattatgtaaaattatatgtgtattaaatatacattaaaaaatttagtgttatatgtatcaacattaattattttttaatataattgacttattagctcagttggttggagtatcgtgttaataacactcgtaggttcgggacctgttttcgtaaaatatattttaacataaaaaaaaacttatggacttatggattcgccaatccgtatgaattatgcggatccgtatgaagcataacgcgaaaaatatcttaaacaacaacacaagtaatccaacaaaaaataaaagagagaacgtgtgtgtttgttttaagactcttgaaatcttcccctttttattttcaaaacttgttttcaacatatttttatattaaaaaaatatgtatagattttaaaaacaaaacaaaagaaaattttatttgttaatttcttttttagaaaacagattttaaaaagaattgtataaaataacaatatatgtcaattacatattcattattacatatgtgacatttaacaacattttttgtctaatatttattaaaaatgttactaaatttttttggcaacattcaaaaaatatcgtcaaattatcaatatatgttactaatatgtttttgcaacattttatcaaatgttgtatagctcatattgctaaaacctaaaaatttcacaaaaagactttagcaatatggactatacgcaacatctaataaaatgtcacaaaaacatattaataatattttttttcataatttgacaacattttttgaatgttgtcaaaggtttttaacaaaatttttattaagtgttagacaaaaaaatgttgctaaagatcacatatgtagtagtgattatacaagatcgaaagggttctttatttattacagtaaagcatcaaacttaaaactaaaactacaaaattaaattataactctaattggcatgcatgcaattgatctttttctaagagttcaagttcttttaaggccttatgttcaaagtagagaatgaactctttgtttaagtgagtaatgactccagtgtgtcttaatgctcaaacaatggcataaaactcattgtcatgcataaaatacttaaatttgtcatcattatataattaagtttctcataaaaaaagaaaaatataagattggtctagtagttgaaaaagaggtgaaagaagaaagaaagaagcaaagatcacgagtttgaatctcccaactaatatttctaaaactataaactaacatttgtcgataaaaaaaaaaaaagtttctcatgaaaaatatgccatgacataaaactcattgccatactaaaaaagaaaaatacttatagcttcatttccctcttatcttggtcaactttaccaagtagcaatggtgctaacttgattttcaactcatcttttataaagaagcaattgtttgcatagttgttatacaatgctcgatagtcttattgctcaagtctccgaagaagatgacatgcatcgaaggaaataacatcatatcctatatgattctatgatatttccaagcagatgaaaaatatacaatataacatttagaaacttttaccttactttctttgttatgtcattgaaacttgtatggaagtggatgtttttgtgttgataacttattcaccatgtagttttatactacattttcacaccctttgtttattataatactagtacggtaccaaattcaatctatagtagaatatttgcaaaaagataaaatttgaatttcaaattgcacccacaaatgatataaatactaccgttgcaatagctttacttacatcaattgcatatttctacatgaatctttcaaaaaaaggactagcttattttaataaatacatccaaccaaccccaatccttttaccgactaacatctcagaaaatgtcacaaaactcttatctcttagtttttgacattttggaaatatattagctgatgaattagtaattgttgttcttgtttctttagtacctttagtggttcctatacatgtcatgctccttggattattcacaagcggtattcaagctctaatttttactactttagttgcagcttatatagataaatccatggaagtagaaggcgctctggtgggatcctcacgtatagaaaaagattgcagtcaatttgataaggatcgagtgacattgtttctttgatccaaaccaaggaatcccttaaatattattcaaaataaatcttattctatcgttgatcaaaggtttctctatgaaaaatacgaatcggagtttgaagggaggagtcctcaacccacaacaaatagaggaggatttttcaatcacattgtttgggctcctagaatatggtgcccttaagacttcctatttgattgtattaaaaaggcccaatgaattgagatttttctattgggccaagtcattttgggagaagtggatcatttatgacaaagaggatgagttttaagaaaatgatttagagttcttgcaaggtagaaccatgtaataccagacacgagatagatctttcagagattaggattttttttcaaataagccaattcatttgggacccatagatccactctttttccaattaaaagataagccttttgtttatgtgtaaagttagtgaatataataatggtgtagtcttttggtaccaaagatgagtagtagcaggtctactgtataaagttgatgtgaagcaaaaacacttcaaaaccaaacatatcttgttgatcaagctagtacttgcctggacggtaaagaaattgcaagataaattgttttgtatataataatataatgttatataataaattgatctaataaaaacatgtgaattgatcaaaatatttttcttttaaaatttaaaaaataaaattaaaatataaacttaatgatatattttaattttattcaaatatataattatttaaaataaaaaatgtataagttattattatgaataagcatgacaaatgggtgggagaacaggtatatttcaagttagtttgctaagaagttagttagaaatgtttatcaaatcaatgatcattcaatcaatttatacaatgttcttatatgatagtcctctactatatttcaaactttatgggtatgatgacattatgtttgtgctagttgtattttttttcaaaccatttcatctcaaatttctaatactaatcaatattggttaacgcttcaaaaccaccactacactccggaggagtattttgtaagctacatcaccagtaatataccaaaaaagtgtgttcgtacccggaaaaaaaactaaaagtattaacggttcattgtttacaacaattcaattttttttaatatcattttttagatattttagtttacaaaagaagtagggatatgtcacttccccaaaaatatattcaagaaacccgaccccgtgcagatcgtctttttagccattttctgaagtagaggtgttgatatatcacaaaaaaaggtgttgataaaatttaaattagatgatcaaatgcattaatttaattttggagatgaacatcacaagggggaaagaagtcagttaaggacgcacgtcttaaaaactttaaaagaaaaaaaaatccatattccatacaagataatattggtgtacccaaaaaaaaagatgatattattaaaaaaaatcttattataattataattttaattaactagaagttataagagaatataaaccaaattaattaaaatattcaatgaattcctaattataataaatacatagtaatttttgtatttatgagaaaaaaattagtcaataatcaaccatttatttatgacaaataatatcgtattaaatatttttatgttgacaattgttatcttccgtgatagaaaattttaaattgaaattataattcttaattcaaaatagggtttgggttaagaattgattgcaaagatctgtgtcataaatacaatattgatttaaatggtcaaataatcattaattatattttcaatcaaatcattatgttcaaatttaagatagtagtatcggttttacgaaataatcattgctttagaaattgtcatgtgtggagttttcttcttctttttttaaacattttacttttttatagaacattttactttttttaatgcaataaaacattttactttgtatatagtaacattttctttaacagtgtatataataacatagatagaattcacaaaaaaaaagtaacatagatagatttgttatctttgacacgtatctttttttttagggattttacacgtatcttaaaacacacccccttcccaaaaaaaacctaaatcataatggacaataattataaaaataaaatacaaatcataagggacaattttttaatatcctacgttgatgttcactaattaaatcattctccaatttcaattcattgtattcgcatgcatggctagtctttgattggacgagaatgaatagattaatctaacgcattacactctttaagattaatctaacgcattatactctttaatgtatgctctttcaaatacatgatctcctttttccccttcaagccaattacctcgtctatgccttttatctcttcattgtatgggtaatcttccttgttctattatggccaccacccttttgatcacttgtacaaaaccacggtgtgaaaacaatgtggagttgtggtcagtaatgtgaagcgaaatcatctcacgaaatattctacattcttaaaattatcaggttacaccctacctgtaatgggcatattttggctttcaaaattttcaacaaaacaatgtctcaagtaggtatattttgttgtctgcgttataacttgcttgtgttgcctggtgtcattttatccattattgtaaatgatttatttatttaacacatgaaattttgcaaaatttgctataggcatgttaagggtattgttaaagatatgattagatttgctgattatagggatttatttccctctttcccttattatttttatcccttcagaacacacaattccagcaataatacttttttttttttttttgtgctgaccggcaatacttgtttaggtattttattccttgaaacagtattttgttttggtagtcattcaattgttatgaattttaagtacatttcaatattttgttcacgattcaatttcaggaattttctgatccttgtcttgttatttgtctaatgtgatgagaagcattgcgattatttttatgcctgatggttactttacgcatatatcatcagtatgatttttacttcattgacaatagagaagttgttttagcctattgagacatacaacattgactaatgacaatacaatacgtggatcaaagcatgcatgtgttagttctctagagtgcattttcccatttggtaagtaatagaaatgtgaatgaaactggaaaaaatatgtaacaaatgattggagtgtgcaactatttccgtgtttatttgagaatgtgattgagcattatccattgttgaatatttgaaggtaggaaaaataattttaccttttgagtaagaatgctgtctttgtaggaatcaaataagtgaaaagacttaacatgaaaatttcaggccaagcgtatgccagggaacaattataactgcgtccctttaacaccaaggtctagattggaaaggcttctgagggaaagagagctaaggaaatccttcaagcttattcaaccaaccgaggaagcaagagatggcagcaaagagggagaacaattttatggtgattcatgcataagtgagaatgaaatttcgggtattcataaagaggaggagatcacggaaacgaattttacagatagaagccaaaggcaagatgagaggccaagcaaacaacgtttgttggtggtagctaacaggttgcctgtgtctgctgttagggagggtgtggagtcatatcgccttgagatcagtgtaggcgggctagtcagtgcacttctaggcaagaaaattttgtcaccttgcattaattgtttctttggtgtgttttgttaatttatttattgtgaagtttgtaattgtaactcaaccttgctaattagttacctttcttgatgatctcatagaggtcacaacaatgatagttatcttcacaacattctaataataatctattacttataggaatagattgaatttttctatttttaaagtgaaggttgtatgaagcttgttgtttttgttgaaggtgttaaggaatttgataccagatggattgggtgggctggtgtgaatgtgccggatgatgttgggcagagagcattgacaaaagctttagctgaaatggtattgactcaaatttataattcacaagcatgtggccactgatcaatgtagtgaataatgataatctagcaactcttctctttgcaataccaaagacacacaaaccatcagtaattatgcgttgttaactgcagcgatgcataccagtatttcttgatgaggagatagttaatcagtactataatggctactgcaacaacatcttatggcctctatttcattaccttgggcttccacaagaagatcgacttgctacaactcgtactttccaatcccaatttgacgcatataagaaggcaaaccaaatgtttgctgatgtagtaaataagcattatgagaaaggagatgttgtttggtgtcatgattaccacctaatgttccttccaaaatgtttaaaagaatacaatgaaaaaatgaaagttggttggtttctccatacaccctttccttcctcagaaatacataggactctaccgtctagatcagagctgttgagatctgtacttgcagctgacctggtggggtaagttattctcatgcatctccaacttgatgttgattatagtagtacattcacaagctaaattcctttggtatataggcatcaagggcatgcatttagaacaagctagtcaatctttagtcaaaaaattatcttccaccttgagatttactgttcttgcttgttgattgcactatttagtcaatagtatcaagtggtatgttgctgcttgctaggatatttgagaactctagacattttgtttaatgttgtgattttaatattttcattggtctgcgtcccagattccatacctatgattatgcaaggcattttgttagtgcttgtactcgtattcttgggcttgagggcacacctgaaggagtagaagatcatgggaaactgacccgtgtggctgcggtatatctgcatatattattttccctttctaattctatacatctaactgtgaaactggaatttcatcttgtgttgtatgtttatcagcattgaatagctttacgaatcagtatgcagtatctgatttcattctcatgatgacaatgttttattttttgggagtgtgaaacttcagtttcctattgggattgactctgatagattcattcaagcccttgaactccctgaagtccaagaacacatgaaagaactgaaagaaagatttgcaggccggaaggtaggagccatatacgccaaagtttcttgttcaagaatttgagaagttgagattttcctcagtttcttgtttctgttctacatctgcctttctctgaaaatgtgaatcattagaatcactttatgtttcttatcaaatggacaggtaatgttgggtgtcgatcgtcttgatatgataaaaggaattccccaaaaaatcttggcatttgaaaagttccttgaggagaattcacactggcgtgataaagttgtcttgctgcaaattgctgtacctactaggaaagatgttccagaatgtatgttatttctctagaaaagttaattatcacttgaagcattcattttgttagttctctatagttattggcatttttcatgactgacactattgacttaatgctttggcagatcaaaagcttacaagccaagtgcatgagattgtaggacgcatcaatggaagatttggaacacttacagctgttccaatacatcatctggttggtgttttaaacatctacagcatatatgtcttgtttggtatttgacgatgcaaggatcatgagtgtggatgctatctattatttgggatctcattgaaaatattaaatttctcatgtcactactatatatgagttgatccccgttactacgagatttgaactattgatcatctatatattgtctgtgttctatgcattgcccatttgatcattatgttgccacccaaaagctgtaaattcaatgtctaggttgatctacttaattcaaatttgttattctcaatttgtgttgttagctacattctctgctagctgttctacaaaacatatcattatcacaaacatattcacgacgtctcatttcttcatctctcttatttgatcaagtgatataagacaaaagtgcaaaaggaataaaaaagggaataaccattctagcagatgaacaagaaacctactagacagattctcctgaaaattaccaggaaatgaggaaagtcctctgaatcataagtgataaataggagttgcatttaatcacatcttattttttacattgcaaccttttgataacaagacttgattgacaagtaaagaaaacatacctatacaaagtactctgatgggattttaattctatcaaaatttccgtaaagttacctccaataacccgataaaattataaaaattctttcaataaatcttcaatagttgatcttcttttgtcctgcatcaccaagtaactttcaacctattctttctagattaccttgatattgttcagaatgtggagcttttctattacacaatcacttatttgtgtaatgttgtcaaacgaaaaaattatttcccttccatcaaaaattaaagttatatttattttttacaaatattcaagtaactaccttgactgttctttgcacacactgaccatgcattttgtctcgttgattacacatccttctcttgaattgctaaaattttttgggcaaagtaaatacattgctaatcttcccagaagagtgacaaatgaagcgaagtcatatgtttatttatcatacagaaaatattgttattgttattctgttgaccttgtaatgatttctggaacatctctttctatgattacaggatcgatcacttgactttcatgaattatgtgcactctatgctgtaactggtactcattttctgctataacatacaagatttagtccatgttgtccttatttattcaaagtaataatattttttatataaaagtagtatcatatttcaccattggattggtgaaatactcaagctgtaggacattctttcttgttattggaaaagaaatttcattatctttgctgactctttctcttttctttaatatatgttccaagtgatttaagtcctctgcttgtaacatgtacctggctgtaagaataaattgaactgattgatatttatttaccaggaaatgaggaaagtcctcaagaatcatatttcttgatttttaattcattgagaaaagaataattgaagtacaatgacttacagttgtttcttatattcacatttgtaatatacttctgttttatgcttaagatttgacaactattcctgggaatcagaaaatggcaacaggctgcagcatatctttataatatattataaaatccatcttaagtagttttattgaactaagtattcagcacccatgatatgtatcataccagtctgactcacatcgtatttagatgtagcacttgttacatctttaagggatggaatgaatcttgtcagctatgaatttgttgcgtgtcaagcatccaagaaaggggttctcattttaagtgaggtaattcagttttttaatgttctcatcatttattttggctgcatctcttggatactctgaatgtatttgagcttcatatttgagaaagtgatttatgttttactaagatcaccaacatttcaaatgattctgccattaagcatagtaatgttgaggtatatgtatttagctattttcataaaacagcaaaacataaaacaaatttactgtcatttaatgaataagactttcctaaccttaactaggtcaagctagcaagtcctaagaattataaacaagtttgtttttcctttatcaccatatattaatctttagcaccgcacatagtctttttttattttatttattttgaagtgtttacacatcaatggtgttaaagtttttctagtctcaagctcacagtttggcttgttggaaaaagaaaaaaaaactagcctagctaagctgagaagctcagctttctttttattttgtaacctgaattgtgtatagtttgttaggctcaactatagagaaaaatcatcagtatgttgtatctgtttcatcaatcatccgcgtcattgttgagctctgtaatgacaaggtctacttttgatggtaacctggttatgctataatgtgttcataagtatacttattgtttcttgaatatcaagagccagaatttgtttttgtcaaaggttaacatttgttgaaagacatatgtcaagagaataagctagggtaacatgaaatgattgcttttgatgcatggaattgtggttgctgatagactgaaatttaaataattataatcatcttcccctatcattatcattctataatccacgatgcaatattgatgtatatttatttttcttttaaattaactatgatgtccgtgttcttcatcttatcaccatcattgtgaatgttaaatatacgaaatgatcaatctattcaaaccaatatattttctgttcttagttgttttctatgtacaacccatgagtgctttacaaaaactggaatatttgtgataaagtgacagatagaaaaggatagggttgatactaggcttctagttcaagacttcagtaggaatgtaagatcatattgtagatcatattctttataaagttattgtttgtctggaaatatcatcttgtttaaataaaaacaaattcttatatgtccaattattttattatcacataattaactcctaaaatcactaggctttcagtataattcaaataatttagaattctttatttggtatcagtttgcaggtgcagcacagtctcttggtgctggtgctatcttggtaaacccatggaacatcacagaggttgctgcttctattggttatgcgttggaaatgtcagctgatgaaagagaaaaacgacatcagtttaatttcaaacatgttgagactcacacatcacaggaatgggcagcaacttttgtgaggttttaatcctataacactgcttgcattttgtttttcttggatcaattttgttccatattttatttttcttgtaatatggaacagtcagtcttacacaagcatattagatcgaccactaaagctagtttgaaatagtgtcaatgggaaaatggagaaaaatggaaattctgtctttgaaatagctatattggtcggtctattgctctagattttgtcctgaccttctatggtggtctctgccacttatgcttttcatgattatttattctaaaaacaaggttttatttttacagtgaactgaatgataccattgttgaagctcagcttaggacaagacaagttcctccattacttcccaacaaagtggcagttgattgttactcaaaatccaataaccgactaattatactggtaagctgtttgttagatcatcaaacactgaataaagggctgtcgcaaattattcaccctattttgtgcaataagtattaggcttacatttataaatggaaaccaacatgaccttacttatacaagtgcaccgcacgtgtttaagagaaacgcacatgaggacttatttgtttccacttgttttttgtgaataagtgagaagggccttctcaccaacatatgtagctccttttcactaaaacaataccattttgcctcaactgcactgcagggtttcaatgccactttgaatgaaccagtggatgcccttggaagggctggtcaaattagagaattggaacttaaattacacccaaatatgaaggaacctttaaagaagttatccgatgatccaaagacaacaatagttgttctgagtgggagcgatcgagcagccctggacaaagtactatcaagaaaacttcatatgtttttggattttcagcaacatttgcttttggactaacaactactttatgcagaacttcagtgaatttaacatgtggttagcagcagaaaatgggatgtttttgcgacgtacttcaagtgagtggatgacaaccatgcctgaaaatttaaacatggattgggttgatagtgtgaaggtaaattagctgcatgcatacaagtgtttctcttattaagttcctttagtttcaagtgtgattttttttttttcatatttttttataaaatttcagcatgtttttgagtattttactgaaagaactccaaggtctcattttgagcttcgggagacgtcagtagtatggaattacaagtatgcaggcatgtgaaaattttctgttaccatcttcccttttaattttcaacctacttatttttttctaggactaacatatgtttttatccttaataaatatttaaattttgtttattttttgataaattttttctttatattaagtctttaataaaacaataattttattttttatcattgtcactttttttttgtctatgataaattagtaaattttggatttgtttcttgataaaagaaattattttttattagtcttttttcaaaggaactaatatcaaatgagaaaaaattatcagagaacaaaaacaaaatttactaatttgtcaatattaaaaaaatgtcaatgaccaaaaatcaaaattttattttatcatggaacaaaaataaagaaaaactttattaaaaacaaatataaaatttggatatttattgaaagatcacaaacatattttaacatttcttctgataagacaattgtgctgatgcacatcatctctttactcccttcccagcaaagtgggagccttctatggttaattactaacttattgtgactgcaattaacactagatgttgagtttggaaggattcaagcaagagatctgcttcaacatctgtggacagggccaatatcaaatgcatctcttgatgttgtccaaggtggtcgatctgttgaggttcgcacagttggcgtgtcaaaggtataagcaatttcagctggctagtagagtctctcacctatccttttctgttcagaagctttatttcctctacatgctagcacctgacactttttttggtatagggagcagctattgatcgtatccttggagagatagttcataacaaaggcatgaagacgccaattgactatgtcttgtgcattgggcactttctagccaaggttagtgcactttatttgattttctattcttagttcacttgagactttgttattgttagagtggcatagcactaagaatgactagatcgttgccttttggcagtttggtagcaatgatagaacatcaattgataaggtaataaaatataatattgaacactgaaatcacacacaatacagcagtacacttactttcccaaagacaaaagtctcctgcagagagtacccaaactgcaaataactacaccctccttatttacacaacttactaccaaatatatactcctaatagataactgtcagtagttagttattttatatgcatgcagattctaatatggaactacctccaattcattaagggtcctttcctaaccaacttggatctcagttcccatcacctaaggactcaactgtaaatattagaatgaaatttctaaaggagcattgattttagattgatctacatcagaaaaagttacatgtctaagccttctataatgattaaggcaaataatggttggaaatgaactgtttcaggatgaagatgtgtatacattttttgagccagagctcccttctgaatcacctccattaccaagagctatgctatccaaatctaattcttacaggccatcatctctgccaaaattaccagccaccaaaaccgggtcgaaggcagctcaatacaagaaacaacgttcgttgtcaaacatagaaaagagagaaattgatcaatggagaccaatgtatagtgataaaatagcattgcatgagggttcctcagtgcttgatctaaaaggtgataattacttctcttgtgttgttggacggaaaagatcaagtgcacgttaccttcttaaaacctcagatgatgttgtcaacctcttaagtgacttggcagaacattcttcatcaccaaattaactgattgtctttttgttagattgtttttttcttggtaaagtgtctattcatatcatttgattatgcaatgccctacatgtctcttgtgatttgaatgaatctcaaactggcaacgtgcttccagcatgtttggaactctcagcatgtttggaactctcgaaactgtttgaaattctaacttaattttgctatataaaaaaattagttgtttgggtgtttcttttcgaattgcttttacttttactcatagcacgtttaacagaaagcaacaaaaaaaatgtagcttttgccttagattgagattttacactaaagtccactgttaacttgcgtaaaatcaaaatatttttaagttggcaaatttttaccaaaacattacaggaattgaatgaaggagtcccactcaatcattttcaaagattggttttaattttaaaaccagatatgatccaaatttaaagtagtttaaattaaatcagtttttatttgttttaccccttacgtatttgttttaatgtgagaaatgaacaaattttaaatatatatatatatatatatatattaaaataataaagaataagatggcaaaaacaaatactataattttataacataatacggcgatatgctaattccataccaataaacacttctattcttcaattgatattaataaatgagaatacaaaacatgggggcatacacttattcagtgacatacaaaatttagaaaatggccgcataaccaaagctttcactgtttaacaatgctcttgaacttttgaactaagttttacactatatgtgtattaaatgaagaaaagatgactaatccctaaatgaatgggtggatacatcaagaatacaatttacagctaccaaagaaaaattaactcaatgcaggtcctggttggggcagaatggtgttcaaaatatgacacaaacctcaatcaagtttagttccccttaaacaactcgaattaattcccatgagctattcttctagtcttggtttgttttggcacatatgcatattggccaaagtccacagtttttattggcctgagttaagacaagcaggacacaaatcatggtgttgatacaaatgtataagagataatgaattccagtttggcagaaatacattacctattatcagaagtgttttgaacatctttcagaggagcacggagaccactgacacgagtgccagaagtgcatctaaaggatgatatcacggagacaaatctttccatagacttctcagctatttctgaatactggcccagatgggaaatgtttgtcccaaatttttcttcttcagcattattctctgtaaatggtccgtcaacattgtgatcacagcaacctataatcaagaaacatcagaattcagagaaacttcagcctcagcgagatatttcctttcatgattatttaaaaaacatgcatatattcagtaaagttcatggcagatatctctgctgagcctgaataaaacaaatggaatccgaaactgagaatttactcctttttatcctcattgaagagtactatgttattcatatactcaaagcacgattttccataaactgagcttttgctaaacatgattttacttttacttttgctaaagtttatggatgtttgaacctctctttgtgatttcctacttttccataagggttaatagttaatacttaatactgataaattgtctatcttacctctccaactcagacaactccacaagtctgtactctttaccttataatactataccaaaagtagtcaatattaaattattaattatgtttaaagataagttacaatttagaatcaataggagcttttcattatccacaaaagtcaaattgcactgaccaaaaatacaaaagtcaaatcgccatgaaaatgaaaccgaaaatgaaatttctaaatgaagaagtagtcaatcagtatgcatagaagcttctgtgggagttgtaaagccacattcttaaaagatgataatgcaataacaacatcagtggtagccaccactttggacagcaagcaaaagacaacaaaagcaaagaacataattagtggaatagtaagacaattttagcaaacaaataaaattcataccattattatgaggaggtgaagaacagtgcatttgcctgggctgcaaattttcctggagaaagtcatttccatcagtgcatgagtaaaaggagaaagtgttaaagaaaacataaggtccgaagtttaaaaaatcctacattttgaatattgtcattaggggagatcttccttttcaggtctttattcttcaaatggttgttacataaatcactgtcagatatggcctttcttctcttgtcaatgacaatgccagaggacaggtgatcttgtttctcatcacaaacattattttctacttgcttgtgctgaaaataagcactccttacaattacctttcttgttgcctccctgctctttccttcaactgagtcaaggactatctggtctttattcttcacatcgttgttacataaatcactgtcagataaggcattttttctctcatcaatggcaatgccagatgacaggcaatcttgtttctcgtcacaaacattcttttccacttgcttgtgctgaaaataagcactccttacaattacctttcttgttgcctcctcctggtttttccttcaactgtgtcttggacatttgtgtgcccatgcaaccccagacatggtttatgaattggctgcctgggctgtcgcagtactgtatgttcagggcttttcttctcttcacccaccatagacaattcatgcaaacaatgaaatgagtaattaacacatgtaaaggcataagggattttcccatccaaagcaaaccagcagatttatatcttaccatgacatggagactctgtaaattcagaaatgtttgtggcagaactatatcgaatctaaagaaagaaaggaagaatatgtttaaaaaaatatgtaagtctcactaccaacaatgagtagagttttcactgttatagttcaatattcaggcaacttacatggctattaggaggaggggcactgccccaattctcagagtcaataaccgatgcagtagagttctttgtttcattagcagcagtaggtgacacccgaggagctctgaatttccttttcgcttcaagagaagtaaaacctttcatggctaaggaaaagttactctaaagaagaatagaaaaaaaagctgctagctacaagtggtatgttgtaaagaaacattgagcttaaatgccactgaaattcattgcctcaacttgattgttttaaatgttatatatcttgaatctaaatttttagaaaactggtaactaaagcatcaatagcatcaggcagtatcccagtgaagcatagaattctgccctgcattcatcccctttaaacatgctaaacatattaaaatcaattcaagaagaatgctttgtaggatacaaaagtacttagttaagagattcttctgcacgggcaaatcaatctttttctttgcactttcagaatgagttttgaattgactagttcccgcaattgcaaatctggctgtaagattctctccctgccatttaaaataaatagatttttaaccaacagtaccctttaaacaagggtttaattgaaggaccatacacccatgtatacttcttaaatgcttttaacatttattaaaaagaaaggggtgacaatctattcatatttgctcagaacatgtttgtgaaggtgatactaactcccaagaaaaccttgtaccagtactataacataaggcaaacaaaatctactttatatgtagaatttacacaaactcatgcacatccatgcaaaccaaaggcaacggttatagaacactagcaacagtcttttcagttgttgtcaatcctattcctatcattttcaaaattcatttttttttcacaatcatgcaaattgtccttattccaaaaatgaacaaatgaaataagtcaatttattttgaccaacacatgcaagaaaaacagaggtatttcagtttactataaatttattctttcactttaactaacacacactttggtatggatgaagataaagaagaaattgatgatgtacctcaaatggcattttggtaattggatcaagatccccttttgctattctttgtgctatatcttttggcatgggtgtatcccaggttaaggtataacttcaagtaagatcttagatgattgaacaaaatggagcagagtgatattaatttaaaatggcaagagaacattaaaaatgaaggatatgggcctaaaaagtctaactcatcaccaatatcatcagatatattagacaaatgaacaatattttcattaattggatcataaacccgttgatattggaaagtaagtatagcttcttgaatgactcttcataaaagggaggcacagaaactccactatatctcaagtgcttaagaacctgatacattgcaatttgcattagaaatacaaaaattcatatagaaagattacatacaagatttataagatatatattgttataaaaaacacttttaagcatttctgttatgtgtatagatgtagacctggctgcttaagtgagtttaaacagggaaaatgaacattgattgtaaataaacatgcttgttagtttttatggttctgaacatcatgcttgctaagtgtatcagctgcactcaccttgtcataacttctaaattttttaatgcttgcatgggcccttttgagacccatacctggcaaggactgcagataatcacagccactcaaaatacacatttcaagaagcatttgtctgttgaacccttcaaaactaagctccttattcttttgtagcatggaatactgaaactgaacaccttgaccaaacttgtccattttaaagataatctaaattttcaaggaagaagcaggccagtcaaaaaccagtgagtactcaaagtaggaataaatatacactagtatagaaagataacaaaaaacatctatagctaagccagtggtaaacttactcttgggcaaccaaacggtataagatcagagtcttcagttataactgcatcaacttgtccacttattgccaagaatgtcatctgggcatctgcctcgtaaggagcaacaatatactgcaagttctcctgcttcaatacctttcaagaaaaaacaaggttaaatatttagttggggatttaatgtaattattgtattgaatatattcaaacgaaatacatatgtgatacacacacacacacacacacacttcacaacaaccagaccaacgctgatatattgaactcctttatacctgaattagttcaagtgcaatttgaggtgaaatatcaactgctttctggtagcactcataagcagcagctgaatttccatctgactcatgttcaactgcacgtgcaagattatcctttctagccctgcacttgtagcatagaaatatttgattcatttgcaaaagcgcaaatacaatcaatgagattttaaggttcttaaactgcccagaaatcaaagcactcctctttggtgatcttgtaataaagctcataacctctttatcccttaatatcctttagtacttaattcttttggtaaaaagagagaaaactacgaaactcaggccccataacaagatgttgttttcatgggtgctggagaagattggtttttcagtatcttagtttgaaagtattaaattattaatcaattctatccctaaatcattcagtattccatccatcctctgtatttcacattaaaccaagttcattttacctcaatttcagaaacagaaaagcaatcaaacaatgacaaacagcaaagaaaacaagtatgcatttagaacagaagcagaacattgagcaagtcaagatcataaacatggcattactgctattttcaacaaattgtgcttgtgaataagaacctcatgtaaacatgaagcatacatggagacagagctcaagaaagttttgttcaaaattgtcagcttatatcatttggagaattccctacatgcagacccactgtacactgaggaagtgaaatcccacaaagggagaaactaatgcaaatgcagacagctggtacaagcacagcatcaaatccttctttgaattttgaaattagataactcacagagaatcaaattaaaagaaaaatgaaaacggttatgacttgagcacattaagcttcttactctactcaatgtaagactcataacattgccacctcctttaaaaactgatgtttacggaggcttcacactatcaacagaaaccctgcctgataatagccccttttcctcacctatcagtattggtacattataccttaatctaacctataagtagcccttaccatagttcaacgctcaacaaaagcataattgttatgacttgagcaaaagtggagagtccaatccaaaagactagttcgttatgtaagagaacttcatagctagtaccacattactcaacataacatacatgaaagcatcccattaacaattaaggtgacactcaactcaacaaaagataggtttttctttttatgccaaaaaaacttaaaatacccaattaagaaaaaacaaagtacaatgtcgggaagacaaagagagtacctggcacgcttgttctcttgttcactcttcattggcagaagccctccatcaaacactagaataggcttaaccccaaaatggcgcagcaaatttactctgtgcatgcaatactcaatgtgcctaaaacacgccaatgcataaaccaatctcggttaagccattttggggtgccataaattcaactaaaccccctttaaaaataaaaatcgaacttttacgagcgggttactccaaacaaaaatcaaagaaaaacccaataaaataatggtaaagaaaagtgtgaaagggaggttacctggtagtgggcatccctttgcagagttcggtgctgcaagagagggcacctttgtggagccaagagtaggtgtctaccgctacagaacaacccttcagatccttatgtggattggaaccataatcgacttcaatagcggcaaaaaccctgattcccattcctctttctctttggagtgaaattacaatgactaacactacatttcatttcatatatgcactaaaattgggcgcaaagttatattttggcttgggtaatggcggagtttaatttaatatcttcgtttaacgttacttttgtttacatgttttaatttttatataaacattttttagagaatttatataaattttattgatactaaaaaaataaaaatttaaatatatgtatccctaatatatattaaatttggtatttgatttctaataaaaatttatttttaataacctctaatatttaaaattttatacgatatttttgttgaaagaatatgttattttttatgtattgttaatttataatagacaaaatattgtaatgtgattatatttgagttggaattattagaaataaaatttttattttaattataaaatattatttaaataaaaatttaattaaattaagagaaaggaagaagagattactattatatcattttaatatatatcaatttttattatctaaaatacttacataagactaaaatgacactttaattttttttatcaatttgatacatgttgatttattctatttatttatttttaaacaaacaggtattgtcatgtctcaaatactagaagttctaaaattaatttgatgattaaagagagaaaaagataaatttatgaatatgaattcctcaaaatagtattttaacaaaattaataataatatttattaataaaaaatatgtcttaaatataattgctagaaaagcatgtctcaaacattgtttatacatataatactaatgactccaatatataatatgataacatgaagtgataaatctaaaatatttttttattttatgctatgctatgcttgatgcacacaaaataataaatgatattattatgttattttgtttcacacttattagatataaaacaatgataaaataagatataaattttgttcaaaatataaattctctttcattaaaattgtatataattttgtaaaaagcaacttttaatttatttttaatttttattgatataaaattataattttattattttttaattcaatcacactatacaaaaataagataaacaataacacgaaaaattatattatttttgcactaaatattttattataaaggatatgataaatatcaccaaacaaatcctaataaaatataaaatttatattataataaataaatatttaaacttatagattatattttaaatttatgatagatatattattaaaaaataattacaaaaaatatttatgatagataatttaatttgattaagatttttttagttattgataattttttaaaataaaatttagtttaaaaataaagataaaataatatattaaaagagataagaggttaataccaatttctctaaaaattatctttactaaaaaaatccttctttttacgtaagaaaaaacatttcctaaaaattcttaaaaatactatttttaaaaaaatctctaacacacttaattagattaataattataatttaagtaaataaataatttcatttaaggtgttaattctgaataataaaaaatgaaatttaattatgattatataaaaatatgaaaaattagttttatagataattttataataaattaattataaattttataatttaatgttacattagatcacattttaagacgaatttgattaacaatatcaaatgaaactgaaaagggcaagaagaagctgagagagaggggatcatccatccatgtagggaagccaatcgattccttgcgcgtttgcttgcttcgatccacaccactgcactctttacttcaatcttctcaaccctacttattcattcattttccgttaagtaagggtttctcaatcgtactcctccatgctcgtagctcgagaatgctaggttaacgctggcttagcacgtagctctaacctatgaacctccggaacggttaactgtttgttccaaacccaccgttccgcgaagaactcgtacgaattgacgatgtgggcttagtttcgttctctgtttccattctgtttcacttctttttctaattgatctgctgtatcgtttccgtgctcagtgccaccatgcctcgtaaagtaaattacggactcgattacgacgacgattactatgatgatgattatgatgactatgcttatgatgatgccgatgcagaagacaatggttagttactttaatttgctttattttttttttctaatatgatgctttgtttcacttgtatttcctctggtttggtgtcagttacactttacacagcttgtttcacattggtatctgtttagctctgctacattttttccatgcagtttctctgatttggagctgtggttgttatttgttaggtttcttgttattgctactaatttttttactgactgactatttgaatttttacattgtttattgttgatttattttttttctgccgtagcaggaggacctgatacaaagcaagagaccattaagcctggggtttggcaatgctccatttgcacttacgacaacgatgagagtatgactttttgtgatatttgtggtgttgcacgccgtcccttggttaatactggaacttccaacagtaacaaaacaggtaatccagttaatgaagaataattttgtttgttggttgggttttttacatttgttttgtatgaaaagcatatctcttttacactgtctaaattctaaattacactgtctaaattccatttgtggcttagggtgtgggggagggaaaactccgttgatgtggtacatacaattcttttgtcattctgttttgatatgggaagatgggacttggaatgtaaagtttctaaattcttctagctttactaatatcaacacattagtttaaatccgtgagatattttatttctatactccatccctagaaagataagctgagataaaaacttatctgaaattctggtttgtttattacttctaaggctatggcacggttgtagatacaaaaaatagacttgttattctcacagggtaggattagatgtggggaggaagcaaatcaagaatgaagcaaggctttcccgtctctctgtttgttagaaatggcaactgccttaaaatggccatatgaaagagtctaaaagaatgaagctgcgctttcctgtctctctgtttgactatcatgatgctgtatatcttgttcatagagcacccttgagtggatttgagtgcagttcagtttagatggctattgtaggaagaaacaccatactgtgaggtgtgttaggaatatggacagaatactccttataagactttggcaatcctcctcccttgactagcttttggaagtgagttaggactaatccatttctaatatggtacaagagcctattcagtattaatgttgggtcactcaaatgtttagtcttgcaaaactcacattctaaatatcctgtactgggcgtgaggcgtgtctgttaagatgtcctacattgaataggaatatggctaaaatactccctataggacttgggcaatcctattcttctgagctagtttttgagagtgaactagaccctgtccatttttaattaattgtaccatagttttcttgacaatagcaaaataatgaccagcaaatttaaataattgagctaaattgataaacaatactgactctggtattagttatttttggttttaacaacttggagggaatgcaacgctgttcctaaaaactgatcattttgcatcatccagatacaaaaaacgaaaaatattaaactgttacaaacctagaattaggaatggggaagaaaagaaatattttattgaatagtatgaaaagaacaaggaatagccaaatagaaagagcaatctcacctccaagggtttccgcttcacaaagagttaatgctcaatttacaaatgatacccgatagaaatgaaagctttccccttacatcttatttatttaactcactaacccctaattatctaatcaatagggacaggatttctcagtgtttctggttgtttggcaattttccaatttatctttttatgtaaggttaaataataataatttgctaataaaaggcgtagcaggaggatgaggaatcatcaatgaaggaaaaagaataatttaatctttttgcaaatctgataaaaggagaaaatggggagggaggagagtcagagaatatgagaacatgtatctggctgcatagtgtcaggttttcaacaatggccatgatattcctataacctattgaacaatgtctttggtgcagttgaagacataagcaaaagtcctggagcatccaagttggccaggtctctttttcaatcattacaacaacagattcccaaagagattgtattatttccaaagccagatgatggttttctgacagatgacaataacttctacaagcttgaaaatgtccgaggagaatttcatgaaattcataaggcttttagtactcaaaggcatccacatttaaacataggtcttcacaagttttgattcaggatgtgcatgtgactagtttaaacagtttcttctaaatttgatatttgaaggttatgcaatgcaattataattagagataaaggtcttattagttgaagatcagagtttttttaatgagtaatgacatatcatgatttagtttctgcaagttgtaactccttgcacatgtgagcaaattacttatttattcttttttaaataatagttataaaaccatgccttttttttttttttttgtatacagatcctttcaagtttgatgttccatccccagatgatgtggtttatactggcctacgttcttccaaaacgggtttgaaaggtatccttccctcaacaaatctaatttgcctatagagctcaagttggacaaaatgtgtttaatagttgagagagctactaaccatcatttaacctgaaagctcaatcatttttttgtggttcacttcaatattttctaaaaactttcaatccctcccccccccccccccccccccccctcccaaaagagaattatcattatcagggaattgattaggctttagctgttcaatttcaatatgttccctattaaagttgtgtccttgaatcaccctcgaaaagatttctaattcctggaggttgttttaagtccaatggcaggaagctttcattgattatgatagtcaaagtaattggaaatatctcaaggccaaactgggatttctaacaaaatctttatcacagtagctttcacccaaaaatgaaaatatatttctaggaaaaactgtttactttttccatattttctgtcttcaaattcttattcgttgtacataaatattaatccatcttatttgtgtaatgctttcagacaaagctacaaacactaaaatttctcagctttcatcaagcatcagagagaagaatgaactttctgtacaatcaaatgctgaaagttctgacaacttatcatccttaacgcaaaagagcagacagggtagttcagctgagagcaaggtttccaaaaatgtagcaattgatctacaaacaagtggtaaaacttcaaacagcttgccagaatctttgtcaaaagacaaaggtaacaatattaataaaataaattctttgaaaaatggtacaattgatattcaatcaagcaaagaaaagtcaggtagtttgtctgcactgtcaaaagtcaaggaaagtgataacattagtttctcttctatcaaagatggaaaaccagaaagtatttccagcagtttcaacaatatggctctcaatgtaagatctggaaattctgataatactaatgctaagggaactcgctcacatgtttcttataagccagaaaaatggatgctccctcaacaagctgaagatacattgactcagctgaatcttgcaattgtatgcaaatggccaattcttttgtacattccaggaaaatatttctcggaatcaatgacactaaattttttggtttgtctattgtaggttggccatgttgattctggaaaatcaactctatctggtaggttactgcacctattgggacggatttcccagaaagaaatgcacaaatatgaaaaggaggccaagttacaggtaatttcactgtggtcatcttttttgtgcttttaaagcttgatgtttctgaactcatgccaatttctgatccttttttttttgttaatcagggcaagggatcctttgcttatgcttgggctcttgatgaaagttctgaagaaagagaaaggggaataactatgacagtggctgttgcttattttgacaccaagagatatcatgttgttgtgctcgactcccctggccataaagattttgtcccaaacatgatatctggggcaacacaagctgatgctgcaattcttgttatagatgcctcgcttggttcatttgaagctggtatggatggcagcaaagggcaaacaagggagcatgcacaacttatcagaagctttggtgttgaccgggttatagttgctgtaaataagatggatgctgttgcgtactccaaagatcgatttgattttataaggcagcagctgggagtttttctccactcttgtggtttcaaagattcttatctatcttggattcccatgagtgctatggaaaatcaaaatttggtggcatccccttctgatgctcgtttaaaaaactggtatatttttttattactctagatgtgattttgactttccatgatgggcaatgaagagggatatagaaggggtggtttttttaatgtaaatttctgttagaaaccatacttttcactctgtaaatttgatatatcattcatggtgtctggggctcaaaagtaccatttgaaacagcactagtaggtgatttctacctcccaactctttggtacagacatttctcaacttcttttctctgaaacaaacaaaaaaaatgtatttagagaggacatggtgtgcttacctgtgcaatgtatggtgatggcttttatactattaaaaaatgggaacctcttgttagaggagtattctgatcataaaccccccaattcccaggactgagtatttagagcataaggtttgcagatactttttggtaagaaagatggatactatttaaattggaaaccgtgcaattggatagaatccatactgttacaatggtactgccctagttaatataaaaacactgatagtttggcagcattcatgatatattataaatttataataggtgtttatatactggcaatctatgcttgcatttagtgtgataacattttagcaacaagtcactttcattttggttttgattgtatgcaatttgtactgctaaaagaatgatggttgtgttcattgtgaacaggtatggtggaccttatctattagatgcaattgactctctccaacctcctactagagaattctcaaaacctctactaatgccagtatgtgatgtcatcaaatcaactacacttggacaggtgtctgcctctggtaaactggaagcgggagctcttcggatggatcaaaggtataccaataaggcaatgttatggctgttatgaaaaatcaaatggtagattaaatttggaattctccaaattaagtgttatttaccgatatgaataactgtatttctgctagacattaataatttttagttaaatattttattctgtgtttttactgtattacatagagagaaataaaaatgttgaaaaaggactcaaaatataattaaggaccaaaaacttgtgagtttaatttatatacagttagtataattttttatacatactttcaataagatttgactattttattacatcatcctatttgttaatatgatgtggggatatggtagatttttattgaatgtatgtgtaaaaatatttcatgctgaaagtgtatataaattaaatcaaaacttattaagcattattattttataaaacaaatgtttacttgatgaactcattgaggaagcaagggatgttatctaaaattttattcaggaaaattgtctagcatgaaaattgagataataatgtctctcaaagggcacaaattttgattttctagctttctacttttgtatcatgcatgaaactatttgtccataactgtaatttttgtttgataaaaaaattgtaggtcttggttatgccttcagctgttgtgggaacagtacgttcattggagcgtgactctaatgcttgtactgttgcaagagctggagataatgtagctgtaacgttgcaaggtgtgatggaaatcatgtgatggcaggagatgtattatgccatccgactttcctgttgcagttgctaagcatttggagttgaaagtgctagtgttggatggtgcaagtcccatattggtgggcacacaggtgtgtactacagatgcgaatgacgttcttgcactttattttccagtttttttttttttattggaggaaaaattgtattttattttttccatctctgcagttagagtttcacatacaccatgcgaaggaacctggtagagtttcagaatattatcagtacttgatcccaagacgggtaaggtgaccaaaaagtcacctcgctgtctcactgcaaagcaaagtgcagtaattgaggtgaataaacaatgcaaaactcgttgtttcaatgatcttcacttttctgtcatctatgatgccgggattaataaaacttagaaggacttttattgtgtctgatttttaggtgattttgaatgagacagtctgtgtggtagagttctctagttgtaaagctcttggaagggtgtccctaagatcaatgggaagaacgattgctgttggagttgtgacaagaataatcgaagaacaaggttaatttatgctattcatcaaataagataaaatgatgataacaaggagcgattctcaactacataccatgcatctttgtttgccatcctagtctagattaagttgtgctcccagacaacaggcagctatacaagtctcgatgaggttatggtttaatatgtgaattatgaattatgtaagaatggtgaagattttttgtatgtttttcaccatatatgtatcataagagagcgtttcttttcaaaagatctagacttatgtaccatagcaactagtcgaccgcgtcggatgcaattgcgtttattctttaatgcccaatcttcagcatagattgatctacatctgcatatctataatcaaattttgggcttggaatggaaatttcgtggtattttccttgggaaaggcatttctttttctactacagtctcttggttaagtaatgtggttgggacagtctagtgaatccctgaatgaattggactaaatagtttttttttttctttttctttggaaggcttgcacaagtaaccttaatggagtcattaataggtatgtttggaaggaaagaaagggttaattttttatttaagagctatataatatttataaaataaataaaagcttaaggcagtaagtttatgtggggcaaagaaaaattaaggccactatgaggaaagtgggctgtccatgcacttggggccgaaatgacacctactttcagttgccttttcgagcaattgtgatgtttattttccatttttgtttttcatatgtatcattttatcaaattagttttgcttgtaatatggtttgatattaaatatagacatttcttaatgggatttgaactatagttagttatgtggttgcactgtttcctaggagtttgagaggattagtcttgtgactttcgcatgtgtgaatactttttttaaaaaaaaaaaaaaaaaaaaaaactatcgttggtaggaagatgctgatttaaatcatataggttgcttgacttctatcatgtacaaggaataataacatgctggtctgcacgtgtaaccttgtttttcgagttactttgccaggatctcaatccatctatagatattagttacctcctttatacctcgaagtctaaatttgctcttgaagaaatgacagcccatattaggaccaaaacaaagccagttaagcatatatctattgtgcattgcacccttcattccattgattatgtggatatcctcaaatcaggcaaaaatttggacattctctggtcagttctgtacaatccaagatatatacagttacatacagacatatcactaatcaatttgtaacaaatactcaaagttattgccccctttaattaaaattcgttaataagaggacatgaattgaactgagtatatgtgcagattccattctctacaatgttttgcctttttcattccctctcttgctcgtttttattctaagacctattatgagctttgccttagaaagaatagaaaagaaaaacttctctatatgaataaagataaagaagtaatttcagtcattgatgaaaatattttacaataatattctaacaagtctgcaattttattatcaactattgatattacttattttatcgaataaaatgagttgctgattttaaaaatgtcatatccattaaaactaataaaataagtaatgacttcaacaaggataactctttgtagcatccctattcataccataccaccatatgtgaccttcccgggaagccacttaattatttgctcaaatcatataattgccagcttatttccttctattgctttcatcagtgcatgaaacgtctagtgcaccaaaagatcatcatggtctctccatcacttatataaactccatataaagagacatcttctcacactttaaactataaaattttatagcaaatatggtaaaatatgaaacctatctgagagtctcagtctattgctggcctctctcttgatgttctcttggagtcactgctgagggaaatttctatgaagatattgagataacttggggtgaacatggtggtgtaaatatactaggaagcaactctctcgtgctttctcttgaccagtcctctggctctggctttcgatccaaggcagaatatctatatggaagaatagatatgcagattaagctgtctctggtaactcagctggcacagtcactgcatattatgtgagaaatcctctgattctgttctcatgttaaatttaactgttttacatttaatgccgttaatacatttcatgtgagaaattctcgtgtgcactaaaccaaccaacattaaataattatacaaatctcgcgccacaaaaatattctatatttaaaaagtgatcatgcatcaattgttaattggcttagacagaagaatccactgttttgtatgtaactttttagtttaataggtatgccctgttagtttagaagtctttacattgttaatcagttttttttatgacttttaatataataattataaaagtcaacaaatttatcatgacacatgacgatttagttaaatcttttattgttatcattagttttttatgattttatataattataaagtcaacaaatttatcataacatgacggtttaattataagtcggataacaatataaaaaatctttagattatctgtgtatctattattattcataacttttatgatgcttttgactgagcttatgtgacatggtgcagttatcttctgaagggccaaatcatgatgagatagattttgagttcttgggaaacctcagtggagagccctacatagtccacaccaatatctacacccaaggcatagggaatagagaacaacaattctatctttggtttgaccccactaaacatttccacacttacactattgtatggaaccctcaacgcatcatgtaaggaacataaagctttcattgtccatcaatcctataatttaattctctaaaattttactttggatatcttttttctctatgaaattatgtttggtaaaaaaatgaaaattttcatggaaccatctatgatccatatgtaatgtataactagaccattgatcctctatgtttcaacattttggctagtttcatggtagataatatccctattagagtcttcaacaactatgaagccaggggagttccatttgctagcagccagcccatgaggctatactccagtttatggtgtgcagatcaatgggcaacaaaaggagggcttgtgaaaaccaattggtcttatgctcctttcaaagcttactataggaactttgatgctaaagcttgtgtgtggtccaaaggatcatcttcctgtccttcaaactcagcttccatgctcataataatacttggcaagctcaagatttggatgcttatggtagaagaagtctgagatgggtgcaaaaatattacatgatttatagctactgcaaagattacaagcgattccctcagggtcgacctcgtgaatgcaggctttctagattctcttgagtgtgggataagtaaatttaaaattaatttgatgatttttttcatttatgtgtatttaaaattccactcaaatacggttgaatttgagtaagttcaatttgattttacttttgcttgcttgaactgataattatatctctgtttatttacttatttttcctattctttctaaacaatgtaaaattattaaaacgaagtgaactcttcattttaaaggtgttccaaacatacaattttatttacaaataagttcaatcccatatttacaatgaaaaatgctaatcaatactcttatgacacaagttaaagaataaaaaataaaaaaattattattagagtgcactgttttgtaatttccaatgtaacctcaacctattttcaataaacttttttatttattgattccttaactagtttttcaagtacacctcgttaacaaaatccttttacagtacgttgaaaaaatgataattgattttttcatcaaatcaaaccaattccattcaaaacgtgagttatattattatttatttagtgaaaacgttctagagtaatttaacagacaactgatataaactctcgataaaaacaacaaaaatgaaaaaaataaaaaaaaaaaaaaactaacaacatataaaaaaaaaaaaaaatgaacatgaacatgaaaaaatcataaaaacaaatctccaataaaatatttctactttaatttcttaattattatccttaggacactcgttagcattttttctataaataaacatgagacaaatgaaactgttcaaggcagtagaaaccacactgctgatcatgatataatgacttagcattagagtcaggttcaacaaattcaaagtgaataacactacttgtgcttgagaaagcttttatctgcattgtgtgttcatgcacaaaaaagaatttcttttgtagatattagagaggtcagaattggcttttgaggcagtatggaaacaactcatgggtcgtctgcatgatgttatgaggaaacaaatattaattagaagggggattaggtgcttctatttagcaaatcgtccataatgctacctttgtagttctggaagcattgaaacaaaaagtaaagttcaagcggtcatcactataatatatatagcaaatcgatgtacagcaaatgatttgatccagagtacatcaaataatgtacaaaaaattcaataatatattacatataaattaaactactaggaccaatggcttcattccctattccaaccataaggtatattaatccataactccaataccttcaagcgacaaaaaatctttcatgtgttacagaagagtatcgactccttgtaccaggcaccacaaatttccccaaacctacaattcatgagaagcagttgggacaaaattttagagacgcaagtatgaaacaaaatggtgagaacataaaaaaagtaatatcagagaaaagaaaatcaaggctacattgttggccactatgtttttttttttacagaaaaataaaaaaaatataaaaaaaggataagaaatagtcgaaagcaaagcacattaggaggaaaacaaaacaaaaagtaataaaatacagcagagcttcccaacctatgtactccaaaattttgccataaaagtttgacctttatctagtagtagaaactgctcgccaaccaaggatcctaaacaaattttcctataagatggtaactgtttcacaatgcaattgcaaagcaagggtccaattgtttctgaaagcagtcactacgtatagtgcctgcgtggaaaggcgagagaaaagctctaagaaaaaaacatttcacaccaaacatcctccaaaagtctgaagcggagaaaacctctaagaaaaaacatttcacacccaaacatcctcaaaaaatctgaagtgaggattacccaacaaaacaacaatagtagccttatcccactcatgaggtttactacatggatcaccatcactaatagacttggttaaaaaccaaattcttagggatattattcaagtgagaaacacccacatgtagaaaattattgctctataaacttttgattgataaacaaaggagtttatcaaatattcaatactttaggcataaaatgcatatctgcacatattggccagaacatataaatgtttgaggaggaggaggagcaaggtagagtagttatcaatagcaaccggaggcccaaaagcacagagaggggcactaaattggtatagatggttgaatgggttgaaaaatcctaaattggcctcactaaaatctcagtcagcagtatcaaaaaagggattctcaatctctgctaggatttatgaaacacctatttcatcccagtgtagtccccatcatcacctcatgcttgcagtctacttaggttttcaatcctatttcacatgaccatctctgttttaaccccacctagcctcacccagatccatcctccatttttacactatcgctttgtttcacactcgcacaaggtttcatgttcaattgtattacactattaccagtttgtgaagtttttatgttgtatcctctacctttgatgtgtgtttgccacaatcagaaaccattcaatcgtgcaagaagtcttgctcttagcagcatttcccttttccaaataacttccacctaaaaaggaccagaatgataaacaatttttgtaaacgaatactaactttcaatttcccccctaaaaaatactttcttgtatcactttggtacattgaaagtttatcaaaagtgtatccaaaatcacattcgttagaccttccatctcctagtatgctagatacactaatcccctagttaacttgtgatatgttattctgttatacacttgccaatagtattatttacataacgggtaagactttttgcacatgcatgtattgcacttttgaccaactgaaattattaacatagtttcaaattcaagggtagatatcagcgaaggattagtcaacttgtgtatttacccattagactattgattaacaaacttgtggtattattttagaagagaaacaaaatcattatacatgggtacaagcaatcttcacggaaacaaacaggcaaaaaataacaattgcaatccacctccaaacttcccaaccccaactacccaaattcagatatatcttggacttggccatatgcaattgaacaattgaagaaaaaaaatggaaaaaattaaattcgtgaagaaaggatttattttagtaggccctagaagtccttgcatcacccatccaccatgtatatgcttgcaacataaagtagcaattttacctctactccaataaactatctcatacttacaaagcaaatcttccagatccacaagcacatgaactctcgcgacacaaaggcaacataagaaataatcactacatacattaacccacagacagaggatgggtgctgcacacaacacaaccttaatcaaccacaacattatacaatcaacattttcttcaccaccttccatccattaagtagcaaagataaataatactcatcaatctatgcatatctcttacatcactttatcaatcaaagaaagaccccaggcataaactagatcaaatccttggacaataactgtatgctctagcaccaagaataactacataaaaataccccagaggagaactgctagcatattgaaaatgaaatggagacccacatcagaaatgctggtaataaacccaaagtggtagtgcttactcagagacataacaagttcagaaccaaagaagaggctttaaaaggaaaaaaaacaaaaaagacaagtactttaagcatcaaaactaaaaccctatgagaatagaaaatgagggagaaggaggaaggggataaaagttacctttagagcagaaagcatgtgctgaggatgtgggtatgaaaaatgccatgggactgggaagagtgagtgagtattcgctgaagaaagctgagcgaagaagagaatgcaggaagctgagaccttatattacagaagtgatgagaggctcttttctttttccgaattccgaggtaatgtatttggtttgaaaatgaaaagccccaccactggttgtgttgtgttgtgtgctgtgcacccattgttttttcttgggtgctgagaccaatggtttaagaacatgaaactttgttcaaacaaaaaaaaaaaatgaaaataaaatataagaagagggtgaaaaaaagagagtaaagtgccaattttttgcatggaattttcatccactgtagttttagtctttaaatttagggaaattaaaaaaatctctcaaattacatttcatttaatctaagtattaaatttaataattgttgtcattttattctataaacatgtattaatattattatttaagtgcatgttccaattgtgtttcattaatataatagaattaattgatgaaagatgaaaatgtcgataacgagttttgttgagcgattgtgaaatgaattaacatacaatttgtggacccagaggttaaaatatgcgatttaaataacggaaaatcaattattttaaaattatatttaaaatgattagaaaatggaaacaaaaccatatataatttgatcattttgagccaatacaaaatcttttgaataagggacgacactatgtatgagattataattttcgatatgaaagataattctaaacaaaaataatcaatttttttggttattaaacctactcacataaggtataatgatatttttgtgtctctatttaattttctcatacttatctagttcttttttatacaaaagtcatgtcaatctcatctttaccaaagaactttcaaatattattttattccaattctcacctatttctcttaaatcaaacaacaacaaaagcataaactcgatctactctaacataagtcacttcacaaaaaaaatgagtacttgtttccggacaaaacattttacttcatttctcttttttaaaattatctcttttctattttcatttattctatttctctcttctaaataaaaatatacataattttaaattaaagtaataaacatatcataattgcaggatttttttcataccttgttaattctagatacttaaatgacaacaagtcacaatttcatgaactaaactcatcattcactaaaaaaaaaaacaatacaaatcgggggcagttggtaataggcacattaatctctggtgtgtccagagaccaaacaagttttaactacagaaaaaatattttgataaaaaaacgactatggaaaaaaattgctttcattttgagatatatttttaaaatgtatatgcccaaaaaaaaaacacagagatgattatatatgagtgtgagtgtgaaatgcacatataaaatgatcgtaaaaaaaaaaggattaactacaataaaatataaaaaatgtaaaataatttgtatgtaagtatgtacatcaaaattaatccattatgtacaaaaaattaataatccatttattaaattacagtacttaattttagattgttgcattcttgcctctaaggacatatttttgtattcctccccgtccagggttatgtggtgagcgatcttaactccaaaaaaagtaatgatagataagaaaactatctaaaatcatttttaaacaaatgacaacataattgacaaaatctaaaaaagataagataaaaaaaaaaagaataagtaaaataaacaactttacctccttaaatgaatccgtgccactaactcgaattattcaaaatgcaatataatctcaaatactgaaggtttatggactattttttatatatagaatatcctaatacatatatagatgtactcctatttttatacccttaagaattattaaacgcaaccttgatattttaagagaaaaaaagcttagcaaaataaagcaaactagttattaatcataatcacccaaaaaaaaagctccatttaaaagtaaagtgtactctacaactaagtataaaacttgatcaaacagtccccaaaagaacatgatctcactttagggtaatacatggcccagtccattagttctgtcttgcggatcacgatcctcagttactagaaaatcagacatctctttccattggacctaatgacatatagatacggctaaattgggattgtataaatttaaatcttatcatacttcattcttccaatatgtactaccacaaacatgaaatgatcatcaacaaagacacatgtattccaatcaatcaattacaatacaaaatataaaagtaaacccgtgtctgtggccgcaaagtaaaataataataataataatggaaaaactgtccgcaaagctagtgtcaagagtcacccttgagcaaggacagaccacatgtatattaccccagagcttaacaccttgtttttcctttttcttcattttggggtaacacttccatcaattccactatccgctacacccctttttcttatcctctttgagcagtgcagtgcaaaaccaaatatgggaaacaaacaaagaatgaatagcacaagatgagtagaacctagtaaacttcaccagccatactgctagaggggattctttgtcgtttctccacatatgcagaaggaaaccatcctgctttgccattgcattcgccttctgaccatcctgatgggctcacctgggtaagcatttggaactttggtaaacatggaggctcaaaaagattgagagattaaaccaaattaatcaagcaaatttcacgatgacatgacagtgatagaagcaacaattgatgactttatacaaacctttcgcacaacaacaaaatcgcccttagaaaagctcagttccttttctgattcagcactgaagggatgcgttgcctgcaagagacgcacccaagatcagttgatgaagaaataatagtattagtaatagtgataaatgataatcatcacaataatcaactgaaagattaggtttaggaatttagcatacttcagccaagaagtacattgttttctctgtgccattctcagaaatacctactggaggggcagattctttcttctgtctatctgagaccatctgagaagaagttccaatgagatgaaaattattgaattacgaaaatgaacacaattcatagaaacaacaccacactcgaagaaaaataagcttaaaatttcaggacagttggttctcacctcagcttcaatttcaccaagaatagctgcaactcttaaatgaaaagtcttttctccttcaacctataaaattataagcacagactataaataaaattctactccctccattccaaaactattgatgtttaaggttagggttaaataagagtaaaatattaatttatttagtctataatacccttaattaatacaggatataaatgtggttcactgtttgttgaagtggtcattaaataggctgtaagtacaatattcctcttaaagatcaaatataattatttaaaatatgagtacattcaatagttttggaataaaaagaaaagactaaacaccaatagttttgggatggaaagagaaaaacaattacaatttggcataaaagtacataaaaaaaatcaagtgttatcataccatggcaacaagcctttgaaaagtaagtctctgctgttgtgcttcaacagcggccaatgccgctgcagcttctttacctagaactgccatgtttgccttcagctcctgcatccttgcttctgcagcatgcagtttggcaacctgttcagcagttggagcttcccgaacccgtgcttgtcttctagcaatctcctctccctgattgaattttaaaaccattccaagttatatgattaagaagaaacaagtatgaacaccaaactctgaagtgaatgtaaatatgtaatagataagaaccaaggattcaccaaaaataaaaagataagaaccatgttataaaatggtagtcttcaattcatcaggaaaaaaaaatgaaagagaaatgacaatctgtgacagcatggaaatcaaagcaaaatggaaaaggcaaagaaaagtatctctcagctaccaaagttgtgagcccaagcaaatggctgaaagattcccaaaatgcagtccaccacaacaacctctcataaaagctatttctaacacaactacatccactcaacaatcaacataacaacctcctctcatatttgaatcctatagtgtccactctttccttcttgaataaactcccatatttttggtccatggcctaattgacccagcacctgcccatatcttctttgggctcaacttctcaagctctatcaacattgttatcatgtaacagctatctggagtctttctttatcaataatttcaacatatattgtttctgcctttctggtttatcatgcatcaaacaaaacatgaatcataaacttcactattcattccattccatatatgagaatgagatacagagttcgaatcacaattaagttaaaggttgatccaagagcagagctactaatccattctaaactttgacttacttgtgcctctgcttcttgtctcatccgactatatcgttgagcaagatggcgagcatcctccaaaggaacaccattgatcatttgcctcaaaggatccaatacctggaaattgaaaccattggattcatgtttctttccttatacatttaaagataatgcaaataataaattacattgacctcccttgaggattccaaatgtcatatagacttcctctgtagtatcaaaacatacaaatgttccttagattttcaccttttctgaagggtttcaagagtggcacatgtttgatcaaaattaaaaattgcgctatgtatggcttgaaagtaggaggtcaatgcagtatttaataaccttaagagatatcagtataatttactttaacatataaaaaaaagtataagcaaattggctgtattctatcttccaaactatctcctatgttgaatgatcagtttgatactcataacctagagatccacatcagagtttttttaaacattagtgtcttgttcatctgaactaaaactaaatttcacactgaaaaggtcatgcaaagtaatattgaaatggtgacctggtcccccatgcatatcatacacaaacagtagcagaatatggctatttatgaattagaatatctaaatccagcctcatttatggtcaagaaacactatatactgaaaaatatagttaaaatagcaacatggagattttaaactcctctgtaggtcaatgaaaagattctattactgtttcatattttaagcaccaattctttatcaacttttttaaacaactacttactcagctaatcattcacttgacaattagaacacaaaatttggtcattttaggacttcatcttactttattttccagtagactcttcaatatgattaatgtacaatagaaaaaacatgacagtgattgcttacaaagaatgccctagaaattgtagtttagtacagtaaatatcaattgacaatcaacatcaacatcaacagcacctttaacccaaattaattggggtcggtggtagatgaacccaatgataaatcgaaaataaagcaaaagagagaaacagagttaaatataaaagaatggtgagaggagaagagaaaagaggaagaaaagaattaaaacagggaacaactggaacatagaactactaaagggtttaaccctccatcagacttatagcttttctccactccgtcctaagacataccgtccgccaatctaaatcccactccattaggtcttgtttaactacctttccccaggtaagttttggtcgacctctacctctctttgtatctagctcttggtaacatactcttgttctaacaggagcatctaatggtcgtctcataacatgcccaaaccatctcaatctatgctctctcatcttttcacatactggtaccactgatacctttcgtcgaatatcctcatttcttatcttatccatcttcgtgtatccgcacatccaccttaacatcctcatttctgctacctctattttatgctcatgttgcctatgtgctggccagcattccgctccataaagaattgccggtctaacagctgttctatagaattttccttttagcttaataggaatcttgcggtcacacaaaaaccccgatgcactccgccatttcatccaccctgctttaattctatgacttacatcctcatcgatctccccacctttttgcaacattgatcccaaatatctaaaaacgtctttcttgggtacctcttgcccaagcagatgcactgtgtcttgctcaccgtctttaatcctcgaaaactcacacttcatatactccgtcttgctcctacttaccttgaatcctttagactccaaagtgcttctccacaattccaattttctattaacgccatctttggtctcatcaataagtactacatcatctgcaaagagcatgcaccacggcacttcttcttgaatatctttcgttagttcatccatcactaaggcaaagagataaggactaagagctgaaccttggtagacaccgaccgtgatagggaaataccttgatgttccattacaagctttcacacatgtggtagccccatcatacatatctttgattgcattaatatactttaatgctacctttttcttctcaagagtccaccataagactttccgtgggactctatcatatgctttctcgagatctatgaacaccatatgtaagtcttttttcctttctctatacctttccatcaattgtctcatcaggaaaatagcttccatggtacatcttcctgacataaatccaaattgatttactgaaatcttggtctccctccttagacgatgttcgataactctctcccacaacttcatagtatggctcataagtttgatgcctctatagtttgaacaattttgaatatctcccttgtttttgtaaataggcacaagcatacttttcctccaagcatcaggcatcttgtttgtttgaaaaatcctattaaaaagattggttaaccattttattgccacatctcccaatcccctccacacctcaatagggacatcatcaggtcctaacgctttattattcttcatcctctttaaagtctctttaacctcatatgtattaattctgcgcacaaatcttctattcagatcattagaaacgtcctccaattccacctcactcttgtcaccatttccattaaaaagattgttaaagtagtgtaaccatctttcacttacatcttcatcccttaccaaaagtttttgattttcatccttgatacatctaacttgggtgagatctttactcttcttatctctcatctttgcaagtttataaatacctttttccccatctttgctcccaagatttttatacaaatcatcaaaaacttttcctctagcttctcgcactgctttctttgcatcttttctcgctactctaaatttttgcaaattctcctcattaggacatttatgcaagaagtatagaaaaaaaattcatatttcattaaaaatatcgtttagttaaaaatattgtatttttctttcaaatacatgcattgtttctaatattattaataaacctagtaattattattattattcttgaaagttgcttttcaaactaaaattactcaaatcttttttatgttacatactaaaatcttatttgatattaactatgttatgaaataatttgaatgattttgtcattttatatattgacagtaaaatgctagaaatactttagactttcttataaaactttgatcaataatttcgtaattgataataaaataaaatatgacaaatattaaattaaatgttaaagaaaaatatagaagagagcacaaaacagagagatgaaggatctgtattagagagatgaacaatgcaaggacagaacagtgaacagcacggcagcaaaggtcgcggttggccagaaacagtgacaggttcgccagaaaatggccataaaggtcaggaatgactggaaactatggagaatagaagctgcagaggttggggatggcaaaaaactcacataaggcccgaaaatgcagggaattgccaaaaatgttgccagaaaagggtgtcttggtggaaaaaggataacaatatgtcataacagtgtgtgtaagtaattgagaaagtagagtttcagttgtgattcaaagaagggggcaaaatcattgcccactaaaacaccctaaataaagttgtttaatggttaaattaaaataggtttttttgtgacccactccaataaagcctgctccaggagcaatttctgctattttgctagatatgacagctgtgatggtcgctactgatacacttttcaattttcatagcatgctctagccgctctgcaatgcaattctgcgctagcaccactatttgttgctattggcaactagtcatataaaaactgaaaataattctttacgtgaaatatgttaaatacattcagcacattgctgatactgaatgaataaagcagcaactacttccctatctgaataattaaatgacataatttcctttggtgtcaccatgtttagcatctaaatgttttaagttttcttaattaaatgagtttttcagcacttaaaattataatcttttcaagcaaaacacattcgacgtataattttacaggtttatcaaacatgcctttaatgtaagtaaaccaactcgtgcatataagaaaaccaaaagcaatcaatcacgaacggtgacaaggcatctcaaacctgctttattatcttttttgacgcatcttgtaatatttttggctcagtaacgactttccgcttttgggcttcactgtttgaactacccctacccacagatgaaactggggctaaaggtgacaaaacaggtatttccaaagatgactttgctatcgaatgtgtagaacttgaaattccctgaaaggaaaacattcaagtaatacagtacgaaaaatgaagctaagagggtatgatcatattagcaaaagcaattcatacagagatacaaaatagtaaaaataagaatcaactcattagtcattggaaaataccaacatgccaataacaccatgcaatttgaaaagaggataactaaaaattacctgatacgtcgtattgtgatgttcatttagtcgagtctcttgaagtgcagctagttggttcatcatgtcagcctcctcgttaattggtgaaaaaattcggtcaaaataattgggtcgaccagcatctccccactctgctacattccatttcaatgcttcccaccagatgctttctcctttgatgatcttcaaagatttgcttgacaactctgatttggaaagactttggagacttgggcaataataaaatatcatttcttctataaaaggtccaacatgtatgccattgaaaatgttgaccaattcaggaagatagagaagcgatatcattctcaacttggggaggaaaaacactggtttttgttctggtgtggcatgacttatcagggtggttacttttggacagtcttcaataataatctcctccaaaaaggaaagttttttaagagaatctaaggtgaagatggtggttaacatggggcaagtgtgtaatgctatagactttaagcagagaaagaagggactactcccttcgcagacgcttcttaaattcttcatatagaatacactcaaaaacttcaacattagagaagctggcctatcaggtgaattgcttccactgacaattgtttccatttcattacactctgccaatatgcatacttccaacccccataaagacaaccttctttgacaatattttaaaaaaatcatttgtatctggaaaatatagttttatgaaattacaacttaaaacttttcaagactggagttaaaaaactgacttaattgggaaaaagcacagagagtgatatgtaataccagtgcacagctaggaatactcatataaattaagatgtggctaagagataaaactaatataatcttgttttgaacttgtacacctgaacaacatatgaaaagtccacctgtgtagataaaagccgatttaattcttcgtgctccttttccacatgcttgcgggcatcaccatatactgatgcagccttagctaatatgttgtcactgttgttctctgctccatatttacagcaatcctcagaaagtttcgttcctgtctaccatgggtattgtttatgaggatttaatcaaatcataagtcgataaacaaaacttacaggtgcttctcattcctgaacacatgctatcaagacttgtcaaagtaaactgaatttgcaggaaaaaaagaaacaaaagctaattttcacctgtttcaatatgcttataacctatagctgtaaatgtttctgctgctttaacaatttctttctggaagtcctggatcagaggatagttttacgcacatcaatatacataaccaccacgaaaagacaaatcatttaagataattttttttatgaatgttgtatgacaactactacaactgtggttcagaaaggctgcacagccatgtttaagttaactccacccccaggttaatttatacattccccatctctctctacatcacttaaggtaaagctgattaatagaccttccataactaacatgtattccaagagatataaggttaaatgtaggatatcaatgtttggggtaatgacagcagctacaagaaaatcattcaggataactacccccaacccttcttttccaaaacctctttacaaactgccaaatccaagcttgacataaaaaatggatttaaaagttgttgcaaaaaaaggtttaaaaaaaatgtgagtccataaatctggcaagcacagtaatgtcactcaccatgcatgaacattgaatagacttccctaataagcatatataacattctattttgagttaatatgaaataggaaattccttgctgctcaagcatagcaaagctaacaatcaatctaaacacaaagagaaattgcataccttcccagcacgtgtggccctgtacagcttttccagctggtggtgtctctgcatttcgacctcatcgatgaccacaacatctgaactctcataaccactactgctgaactgctttattactgcctgaatcacaagtacactgacaaagattacaaactagcaattggaaaacattacttttccctgttactataaaagtgtgaatctaaactaataaaacactatggttggttgatccacaagaatgtgccaaacacaaccagggaaataataattcaacatcttgcttaagaaaatgagcgtctccacttaaaaaagccataacattagtcgaactaccccattttcaattgcatttcagaacaacgaaagaagaactaaaacgtcaaaagttatcgccaaatactgggaatttggggtacccagatgcgaatttgagaagagaaacacggtacttgaagtgacaacacagaaaaagacaaccttgaagggaagtgagagcaaacctgttgctgtttggcaacttgctccctgagcttgctggcttgtttcctcagagcgtccatggcagattctttcagctctctattcttaattctcagaatataaaagacagacaacaaagtatgaaatcagatccaacgaatgttatctgagaacccagccccagctcagctaaacgttgtcaacttgaattatgtcactcttttcccctcttttttcttcggtaaatcccaaaaccgtatgtgtaatatgtaataagaataaaccatatatgcaataaaccatcaatttggcaatgatatatcactctctcttttaaatatattcttaaggtattagaaattatgttatataattttttaagaattgaaaaaaatttcttcaaattaatctcctagtattagtaaaatacaccaatccaaacactaaaataaaattatagacatttaatactttccaaaagagagagagcatttgattttttattaatgaaaataatttagtttctcaactttgacgttaataataataataataataataataaatcaatagttacacaattcttttcctccacttattgataattatgttgtcttaattttgaatcttcccaaattacgacatcaagaatatgatctaatgtaaatagtagaaattaacgaatcgatatattttaataaaaataaatataaaatttaatataatataaataattttttaaattcaaacatataaagtttgtatctacagaaaccactttttacaataatttatagcatataaaatggccatttgaaattaagaagacgttgctctaaattttacattattaatagttagttacgcgttttagaagattattttcattaaaatggtttccgcttctgaaaggtgttgttcattaaaaaataaccaattaaattcagtaaaataaataaacacaatcaaaagaaaacctatgaaaatccaaaagcagatcccagaaaaggtaatttgtgattttaattaatgattaccataaaaacaaatttgaaagtttgaaacttttctcggtgggaagcttgaacatgacaatgatatgacacgcttttcacaagcctaataattctctttgctgtgtcactgcattgcaacaatatatattcagagcacaggagaaacattcgtacatacatagctactagcagttcactttcagtctctgtagatttggtttgtgttcatttccccactgaatagtgaggggtagcatcgcaacccaccatcttatttcactctccacatcatgccttcaggtgctaggaagagaaaagctgccaggaaaaagaaggcaaaggaacacaacatcaacccatcaaccaacaacccccaaggtaccatttttcactcaaatgcatgtgcatctggcaattaatcatagatgggtccttttcagttgtgcattatatcttttttttggtctttttgttctattagggtagatggagttctgttaattattcttgttttgtttactttgatttggaatatgcagcagtgattcattgtggttggggtagtcgagttgggtacactggtatttattaatttggttgttttaattgataatagcttgattgattgtgtaaataataggaaatgatggtttgaagtcacgagatgagaaaggaagtgatcgtggtgagggtaattctcctgcatttcatgaacatggtgaccatcgtaatccattcaatgatggaagtgaagatctggaagagagaggaccatcagctactcaaccgtgtgcttctgatgtcgagaccctggaagaagtccctagtgatacttcaaaggaatcgtgttatgagaatgggaatggtggcgatacttcaaagggtgaatccctcgctgagaagaactcagaggatgggaattgtaattcagttgaagaggcaattgcaagtcatgagttggttaagtccattgattcttcccctttaaaatgactttgattactgaaatggcaccagttgaggagactgttgattcagctgctaactcttctgttaatttagttactgacatggcttctgtgtctgaggtggaaaagagtgatactggaagtgtgttactagagaagtcagtagtccatccggtagaagtgaccaacgtcgcaatgaagataaacgaggataacacatattccttaaccaatgagaatgtgacaatgtcaagtgcgggggagcctaagccaaaggaatgtgatagtaaaatgttaacttcactgtctactagtcctttaactaaatttaccaatggtgcagaacatattaaggattgtaagactgcaaaacgttctgaaaatcaggttttacattttctcacatatacactacaagtttttcatctcaattatgatttgtaaatttttgtgaaaaactaattttaaatatatttttctttgctgaattaatttgcagcctcatgtagcattggctccaaatttggtgcaaaagacccctggttgagttgctgtggattgtttgaagttttgtcaagttcaaatagataatttcaggtttttcctttgaagttactttaccttgtaaaatcatgtttgtgtgggttctctttcaacttaaaaggttgtgtttacataaatttgctaccctcatgtatgcttgcttatggttgtttttagctttagttttgcaatttttctaattggtttggtaatttgcgctttgtgacttttaaactattagagggaagtttggtggtgttttctttcactttttattgtttgtttgtctttggtgaatgcaggtgtgtcatgggtctttggaccaatttgtagatactagctttaatggtttcagtacaaatgaggatgctaaattattgtgactatcaatccatgctattatatttggtcatttggtgcatttgggaagagcataatgctcatatttttacgagatatgcttggctgagcagctattttggaatgtgattaagcaattagcatcaatttggttttaaacacatggtctttaaggggatttctgtaacatacacggggttaggtaacttcgctccattagtgatttgtatttttctgttattcattttccaaattctttgttatggaggatctcttattctccaattgtcttgtaattttattttcttcatgctgacaccgtcttgttcatgagattcatgagcacaaagggagggtgtgattcttctatacctgtgtgtgtgcatatcattctgaaggtcatactctgttattattctagttcaacttagtctgagcgttatcaaatattcatgccttttggatatggatttaaataattaagatgtacttcttagttcttcatttggtatcaattggttttttaagttatattattcgttctaataatgctcattttggggattattgttgtagtatattgtgtatcagtatacaatcatacattttaaacttgcaaattacgttatgtttgacaacatcttccctctgtttttcttgcagaaatacaagatacaagcatcaagcgtgagtatctcaactgatgggtcaaacttgtgaagatttagaagaattttgtgatattttgatttagattctctcctttaagcttttcaaaaatatagcaggcaaccaggccaaagtgtataatccatacaacttttgtttacattacagtggggtttgtttgtagttattgtgctagcaacaattacagtcttttaaactgatttgttaattctgcgacatggaatttgtcacaatactgtttatttcgccctttctaattaatgtagagcagcagtgagacctagaaactccttaagaaaattcactttgatctttttcatctaatgcacgattctcatgcataaagcacttagaacagtgtttgcagtgcagcgcactttgggtgcaactttaaaagtttatctttaatcagattaactaccagaaccataacgaagcaggactcttcgtgttctaacttatggtgcaatcatacctcggatgtgtccctgttcaaatgtccttagctatcatcttgagaacttcattgtagactgatgaaactttgttcttgccctggtcatggaaatgtccttctttgatatttggtttttcttgtcaaggttacggttcaaagattactctttcatgtttttttgctctagaccatcctgtggataccaactgaagatttcgtaattattgtgtgtgaattgcttttctaggaaatatatcctttaaaaagatctaaaaacctgttgactttgcatacatggtctttgtgtaaaaatgtttgggttttattgtaccccatgttcgttaaagacttataaatgcttatcaaggttatgcagcctgatgtccctatcatgatcaatgctcacagcttactcctaagaaagttggaggaaaagaaatagaaaataaagatagtgttctcctttattgctcttgtaaatggcatattcttgattcatacaaatccaaattccaatcattcaaatcaaaccacaatgctaattctcctttaacttgtatgaattaaaagtcttgattggaccgacagaagagaaaagaaaaagcaagagggagagaaaaacacaagcacaccaatacaatccttcttggccaacaaaaaaagaaattccttcaaccttcaagtttatcttctatacgcagcagcactgtgaatagcaactatgtagaaaagctgtgtagctgaaagtataatgataaaagcctccattgttttctgtaaaattggacatttcagaggcctgacacttgaaaatatactacaagaaagttattaagaaagtaaatgaatcttcctgtcttaccaggcgtgcatttctgatacgaagctcaatctctttccaggcaaagcttcattaatttaattatagttagataattaaaataataccacaaaattatttttttggaggggataaatagaaaatagaaatcatagagaaaagattaccccatggccaggagtgtaagagtccaagccattgtagcaactgaagctgcagatggcaagctctcagcagtccatgactggatatgattgattcctgaaattgctgatgcagcaccaaccactccagcaagcaaagcaaatgtgacaaagaatccagtggatgcattgcccattgggaagaacaagggtgaaaagtgtgctggtagttttaattctggacctgcatagtgcatagtttctcaacataagcaagctgaagaaacacaaagaaaatgattggttacatgagactatgagaggacacataggtacatttggacattttaaattttcatacctataataaaaccatgatctattgctctgttcatggcccatccactaatgcccaaaactatggcatacatgcagaagttcagccccaaaagaagagtggctataggcttcatttgctcattagccatatgtgttgctgtttgttttttggataaggaaaaagctgttttgaactagaaaagtactaggggatttcaggaacctaaaaagcagtgaaggaaagtctataaatccaaggaccaggagctgcatatctttggtacaaatgagagttcttatatatatgagaaatggataaaactgaaggttgggttcttttcttgacaaggctgctagttagctaaaaagcttcatgcaggcctgtaaagatgatgcttcacaatcatacttagacattaaattaaaatatgtatgattcttacttgtctcttatttttaaggtttgtttaactgtaaataccttcccaacaggcaacttcttaggagttgtcaattgtttgttctctgaggcaagtcatattctttgccactcctgaactcttctcattcacaacactctggcccaatccctattaaaaaaaacccttacactgtttctaacaaatttaattatatcgcgcaagtatttattatttagttttatatactaaaaaactttttatttttattaaaacagttgttactatcccaaaaaagtcagatatagaaaaatatgaaaattctaagattagttaaaaaaaatattttgttatttgatatacaatgagacaattacataaatgtcttatattttataattttgttagtaataaaataaattatactatcagcgtttaacacacatttttgtttacaataagtgataaaaaaaatactcatctctgatatattaatatcaatatgattttttttccaaatatattgtaccccttcctttattatcttaaactttatacataatgcctaaatctataaatttatttaaatgttaattgactaaatctgactctgaaatgtatgtgaacaaaatccaagttaaaaaagaaaagaaaaaataaactttacttgagttttatagtaactaccttgaatactaatggtgattcttaattgattgacgtgtaaaagtgtttacactggtcacgtacgacaattaaactcaaaagaaaaatgaaaactctaacaacccttaacttctcttaattctgtaatttttattttatctttaatgtgcaaaaaaacataatgccgatcgacagtattacatgactatgagggtatattccattcttctttataaggtcacaaaaaaaaatgacgttcatcaatatttcttataagttggttaatactataattcgaaccatgcctgttgaaattaatttactttaagaacaaatatattttacagttttcataaagcaataaaaagggatatttctaaaaaaaagtaaatgctcaatcacaaaatcaaactcaaaatctatataaattaattgatataaaattattctaacttaattgagatctcaagttcaatctgagtaatacatcaaataatcgaggtagagtttatgctcatagtaatcccacaagacttgaacaaaattatctccgtgaaaaatacttgtaattcatataaaagtatctcatcgcatgagattgctttaatttaaccaaatgtctcattcaaattttgagtatgcaagtatgttctcatgtgaaggatataaattctacataaataaatttttctgcattatatataccacttttatactaaaaaaaatactttcaataaatttacttgagacccaagacttacattttctacaaagctaagtgctaaccaccaaaaattaattcggtaaagtaacaaaaggaattagctattttaaagcaaaaatatttttaataaacgttacaagagggggaaataacatattaaaataataaaataaaataaacttctcaaataaactaaaataatcttatatgccacaactttttaaaaaaaaaaagttaatagagcttaacattcttaccttaaaatagttttacatttaaaaaagtctcataggttagaagttttcaaattgggccgaatgtatcaatagacatttattaaatggaggagttggccaagctttccataaaatccaaaagacaacaacctaagccaagagaaactactatttgggattttttttttattaattattatttgaagttctttaattattattcaaaataaacaagcataaatctattataacttctgaacgaaaagtcataatcaatttactcttctacttttttaattgaattcgtaaaatattttatgattttaattaattttttttataaatttacaactttaaaatcataaattaattttttaatttttttataaaattcataaattaatttacgacttctcttttttaaaatatttttttaaaattgtaaatattttttatttaattattaataaacacatatattttttttttagttttatttaatatttttatatattttttatatgtttaatttaatatttttatttttttatattgttcattttatattttctatatttttatatggttttatttaatattttcctatttttggtatattatttatttaatatattttttatgtttaattttatatcatattatctaattttttgtataatttttatttaatatattatatatatattttatattttttttttactaatgtaagattattatttttttataaattaaaaataatataaaagattaattaaataaaatatcagaatatttgttactaatattaacttataatttatcgaataatattaaaaatttaattaatttttaaattatcattaagtaaattaataattttgtacaataatattaattaattttattttaaaattattttaatattaataacataaaataattcataataaaaatagttgttaaaaaaaaaaaaataataattaatataaaataaacaatacaaattaaacaaaacataaaaagtataaacaatattaatagtcaatttgcttatatgaaaaaattactataattatgttctttagttctaaataataaacatttcatttaaatttaatcttttacattattttttaatttacaaaataaataataatccttaacattagttaaaaaataaaaataaaatatagaaaatatattaaataaaataatatacaaaaaatatttaaaatattaaataaaaacatataaaaatatacaaaatattaaataaaacaaaaaaagtaaaaatacttttatttgttaaataattaatttaaaaaattatttacaatttttaaaaaattataaaaaaaaataacaactttaaagtcgtaaaaaaattaatcatatgattttaaagtcataaatttaaaaaaaaaaaactgaaaatttacgactttcaaaagtcgtaataaatattatgacttattcacttttgagtaataattcaaaacaaatatccaaagtaattaacaaaaataatcgaccccagttgtttgcctctaagccaacacctaaactgaattgcaaacatccgtagaggcaactcaaaatttgaaaccttgaaagacatgcacttaatttgaaagaaatatatctattacactcgtataatagattttgttattagaaagaaatgaactaatgagtgaatgatataatttattcatcagcactgaatcacattcctctttttcttcgttaagttttttggttctggataaaatgctatgaaaccatttttttttttcattcagaagacacagtcaccccaccaaaatctacagtgtagtacaaaggcatgttccatgcatgcaaaaattaacactaccaatcattatggctgataaacctcaggaagctgaagaccaacactagaagcagattttccaagagtcctttttacttcatctgacctatccacggcaatattgtatgaaaaaagtaaatcctgaaaaattgtcaacaacgatgcatgatcaaaaagccagatggacaaaacgtagtttttcttgaaaatatatttattcacaggcataaaatgagtaaaaataattatatcaatgataggatacaatctgcagaggatttctcccggctcggccacaccttggtgatgctgatcactagtcaaaaaccacatcctcttctgtgcttttaatttaactatatacataccttaactaaagctgttgagtgttgacaccttgtttttaactaaccgagtttgtgtaaatctcatttgaccaataataactgttcaatcaaacttcttacccacaggcacaaacaaatgactatttgaattttgaagcaaaaatgcatcagagagcaataccttgtgatggtgtacactgttaagaagataagtataatcacgagcaagctttattttctgttggatagacacattgtcagacaaattttggttgttacggaactctgaggttacaaattctataaaatgtttcttgttctcttccttcccaatatgtttcttgaccgccttgagaagaaggcgataaatgtgagctgtttggaaggcgtcggatctcatttgtttctatcaatatccactacctactttcctgcataggatgacaagttttaaatataaacatttataggaatcttgtttgcagaaaaaattaaaattagaaacctaaatgatgagagggagaaggtataaaagaaagaaatgctactatagagaataaagaaagattacaacagaaaaaggagtgcaaaatttcatcctaagaaggtgcaaagaaacgaagaaaagataaagaaagttgtatagaacgaggatcttcaattcctgtgtaaactaggatcaatcttgggtttggtagagttcctaattcaatattacgctacagcaattttcttcttagaaaatcccagaagacatgcagagaagaagtttatcctatgtttatgtataaccattccattacaacatgcacttaacacaatttgttgcatctcagaaaatattttacaaatgatgcaactagttcaaaacaacttgacttattgtactaaatggaagccatgataattcaaatttgaagtcaattccatcaacaactgaacagtggaaaatacttataatgatgccatgatcactctgcaagaaatcatcaactcttggcttgaatatgcagctacagctagcatatttttcagattccttgctctgtgaacactgtcacaatgcatatgcaagatgttgcaacaagaggcaactaaattcattaaacaaaaatccaggtgtgtatttgaatggtacatttgaaaatcctaggaaactcaattgcttcaattgaatttccttcatttgtaaaatttgttagtctgaatgagtaatcagattccctccattcataaaattcaatattaggataaagtaattaaatcccctcaataacaatgataattttgatatgttatgtataacttcatatggaatagacaacatagagcttagcctacgagaaactctaggcatatactgtgtgtcatatgatcatatatgtggtctaataaacaactgagaacgaaagcaaggggggtacgtcaaaagaatttgttgtgaacattttcattaataatattgatcatatatggggtctgataaacaactgagaacgaaagcaaggaggctgaaatcacaatttgtttgtggctcccaatgtttcagaacacacatcaaacagtttgtgagcaaaatcaaatatactgcaaaagtaaaacgcaacaatatgtggagcataatggaatgggcaaacaaagtaccatacaaggaaaaaataaataaaagtcagatccacaaacacaagtgggcagttagcaaaataaacagagagcaaataaaaatgaggaataacacagcataatatcatattaagaaacaactaaatatccatattttgcaactatgaaaatgcagaaagaaagttcattgacatttgtagaagaagcgattgaagtactgcaagcaaatcaacgaaaatcaaatcagcgttgcttacttcctttcttactcgctgtggacgaggctgaaatcaaagcgttgctagttgcgtttgcgttgcaaagaaaggtgtctctgcctctagttatctaaacgaacaaaaacttgtttaaaatgaaaagaagaaaaaaaaatgattaaacgaatttataactttcttcgaataattaaatttagcttttatatggaaacatataattttagctttgaaaaaaaaattgtgattgtgggttaaaaacatattgagtattgagtagtaattaataaaactgaacactaaactaattaatctaattgtttgtaaggtttttaatataagttattaaattagttaaaacatattatattttcgaaaactaatggtctaagggggaaaatattttattagaacagtctatccatttatgtgtgtatatttttttgagttaaatgttattaatgtaattgtgtaaaatatttattgatttcataatttctgtcgcaaaattgattaatcacttttaagttaatgcatgagtcgagctggttaatattgctttgtgcaaaactcgtggaaacccaagttggtgaacaccgctttgttcatttaaatatttttaagagtttaagggctttgttaaaaactgctaaacaataagaacctatttaagaatttagtaaaactataagggcctacaaagtaacttaaaaaaagttgatgataattagataaagttcagaaacaacaaagagaataattaaattagaagatgctaatatgccctatcattttagtatcaatagggatgggtagtgatgtccaacaccgagtacttcaacacccatgaaatgtcattgggccacatattaactacaacaatgatttctcttttttctttttgtggggtggtggatgagggtgtcaattgtcaaaacttaaaataactccagtttacaaatgagagaaagtttgagtaacatcaattcaggaaaaattgatagaattgtgtctaagatggtttggacatgtgagaagaagatcaatagagcctccaatatcaaatggaggatagcctactaattagaagtatagatagaccaagaaagactctgtgaaactattaaaaaggatctaaaattaaatggcttagctgaagaaataagaattgcttttggaagtacacaatgactgttcaatttatgcagctgactccacttagtgggaacaggctttcatttttgttgttgttatattaacttgcctttttgctggccgctcaagactttgtaaagcctcctggagaaatttggagtttacgccaacaatctgatcactaagcaagctccattgatctttctctccatattgaaatccatgaaatacatgtttttgctccatttcaatgagtttctttttggctgctatgagatgcttttgaaactttttcctttctttccattcctgacaccattaagaaattatccagaaccaattaaatatttgtatcaattatccacggcaaagagcacccagtcaaatattgatatcaccacaaagaaattattccgaaaaaggaaatttagaatccaaataatacaagtacaaatgttgaagtgtaaagcagaatgccaccttatgaaaatcaaattccacttgggttggtataatgtaagtctgccagcatgacttacatacaaatggaaaaaaaaggtacaaaaatcatatccaaatgatagataattgttccattttttgtgtgtgggagttacagcacaattcacctttgaatggtagatactgagatatgtaacatagcagcaggaataagaacaaaactaaaaaaacatattcagtgacaataaaaactcataaaagtaacaaattagtagtaatgcattagggaagtatggctcactagttggcgcctttcttttttggacctctcatcaaatcgtaaatttaattctaggagtcccttgggcggtgtaacatgcatttctcttcttttcatatcaacatctggaacaatggcttcaacgaaaggtaccaaaacaagctgatcagatgcatcttctgctgatcttgacttgccacttttgtcaagcatatcaaaagatgaatcgagtacaatttgtagtaggtcattggctccactattgaaaacattcacaacagttcccacaagtttttcattttccagatgggaacaagcatggtcaacaccttcaaaaattgcattgaggattacaaaatcacaataagatgacaaaaataccgaagtagaaaattcaaagctcatacaaaccaatataacaatatctttaagttatttataatagtccttttcatttttatcactatattagcacttggtatttcatttgctgaatccttggtacaaagggacagctagcggtcacatatgcatctagaaaagagcttaaaaaaaaggatagttcagttttatgaaagggaacaattatatggtaaacaattggcatttctgttacgatagcacacttgtgagaatcgccaagttaatactgaactccaaaatataacagaaaaacagctgatgaatataagatagagaatttcatttcattagtatttagtaggtgatactttagcaaaactttaaataatgaacaaggaaaggagaaagtggtttgtcttcatatatacacaagatatgtgactaagaacaaaccttcataaaaactctcatccctatcagatcatgtgtataaaattcaccctcctctaattgcggcctgtcttcgtccgtcacaagcaaggtagcaccaataagcatcttagcctgcatgacatattgattagccaaggccaaaatgcatgcatatcatatgatcacacgagccaggtctacataggaaacttgacgcttcccacttgcaaccacaagtgctacatccctttcaaggatcaataaataaaggcgagtagaaataattttgacagtgtaatatctatggttgttattgtggcatcaaactgactttaaaatatgattagtcaatagatgaattcactaaggtgcttccactttcttgaattaacatatacagatatacttaaatactgaaataagggacatttggaagagcttatttgggctaatgagaatagcttacgactcctatataggttcttttcagcttattttcaataagcatgacttatcaaaataagctctttctaacttcttccaataactttcatgatcaaatttattagttatgacaaaagctctcaagtgacaagaactcaatgaataagcactaaattaagtgttgtttaccaagtgcacccttgttactaatcaacactcacttcattcatccaagttcaagatgcacgaaacatggaagagaaagaaaatgaatcagttaaaaagatgagagaaaaaatatatgcacggatagtgtaaagtattttttacatcaccatccaatcataaattgtcacaggtttattgacttttataataagacaaatgctaactagtacccttagagcattaaggactaaaaggagaaagattttattgggatgcacaattcattacacttttttgggctctcccatgattcccacaataaatactttctttttttaattccttaaccaatatcctaaagaaactggttaacaagacccttatacttaaaagttaattgtttctaattggttgagtgtaaaattttctatactgcatagaaattaaactctattgttcgtacacaacaaagatgggctggtaaacaaaatttgtaaaattagacagggtacgaggtattgaaaaacctgctccacggtgtcaattcctctgaatttgagtatccaactcttgagtgcagggtgctctgtaccatcctccagctcaacttcttgaacgctttctccacccaaaaccttgctcttcaaccatcttctcccaggctactcaacaaacaaacttagccacttgaatttccacatttccacaaacacaagaaattaacaaaaatcattacagtggaaaagcgcagttgaggaaaatcggtggcgggcttgatttaataaaagttagtaaaagaaagattatattcattttatataatgaaaacaagtatagaaactaaagaagaaagattatattcattttatataagttagtaaaagacaatttttatttatttaataaaagacaagttagtaacaaaataaaacttaattctataattcaaatattagaattaaaattaactaaaatgatttttcaagttgtctcgtcccatttacaacaaaggactcaaggtactccctatctgtcaatcgcattaagaggtcataattactcaaaagtttatcgatttcacattaaaacttgaagagtgacgtcaattaaataaaagtaacaacttatagttaattatgagaaaattaaaaaatactaagtagccttcagccgttaaaattaatagtgggtagaaatagaatcagaggtaaaaattgcatttgtatgtatcatactatagtagctatagagagaggagaaagaagaaatgtcaacaatggcaatgcgtgtgtcttccacttcaacttcaactgcactctctctcttcaatttcatgcatccgtgtaccttctctctcttgctcttcgccaccatcgctctcctacaccttcaatcctcttaggtactttccattcattctcatctcactctatttcactctttctctttctctcactttgcttttccgctttaagaaggtccttcatcggtcacgacggaatcagaagcagaagcgcagggtttcgtctgcattgctacgctcctgctcctctcaatcctcccaatttgcaatggatctctaccatttcttcagtgtcagttcacttccttttctctatttcatccttttactttttcaattccgctatttatttatatattatatattctgaacatttgatttcatggagttatagactacgcacttttaatattgtatattaattattcggttattttattccactgtctgacgagtggaagaaacatatattattgaataattatttatttctgatcttcgattaatttgccaaaaaaacagaaatgtttgttcatgcatgtaacttaatcttataatgaaattctgcgatgatggatgttcggaaatcggaacattgtttgtagggttttgatactggcgagaggccccgcggtgccgaaatcgtatattgttccgttgtttgctttgcaagcatctgcaggtgtcgtttcctggatcaagtatgtcgttcattcattctgatgttttgttttcttgttcagtttatatgctaaaactgaattgtttatttaacaattcttatttgttcaacaatattttgtagagtattattattcttaatttttacaccaattggatgtacagaggtagatatggtgtatggacagcattcttggcacttctgattcgtctattcttctatattcctggtatgttctcttatccatcacgtgaaatttaggaaatattgaagaagaaacaatttgtactgtagatctaaaagtgtaaaatacaccttttatagccctcattgaagttggtgtaaattaaagcatttttctaggaacctcaggctgggctctatatcttctctttgtataaactgcgaaacatgagaaagaaaatcctggttgtggagtgtaataataagaaaaagttgtgtattttgttttttcatacttgttggataatgattgaacattgaatgaaggaatcattttcttctgggtctttttcatttctaggtgaacttgagttgccatttctggcattgctcttggtgatggtagctccatacaaggctatgtaattaaggtaagcaagtccatctttttgggactttgggctgtcgcctcttttacctttttcaaaaagtaaaataaaatgcttcaacatctttcttcatcagggatacaaaagaaggtgctgggatttcattgttgattgcagtgtatctggctttccagcatttcacaagaacaagcttacatcaatcatttgaccaaggttcagttgttgccaccttagctatcatttgtatcactgttgtatctttgttgcttcttatttgagttggctttgaaatgatgtacactgattgtaaataagaacaatacttgttggaatgacgatataaaaaatttatggattatgttggatactcaatcttgtacttttcacttgttaattcaaataatgaagttggaatccgtatttggtatttgtcatagaaattgtgtttagaacatgatgttctttataccatagttattaataccaaatcaaaccatccagttaaccataaaactgtttcaataaagaactgtttttgaaatattcaacaaaatgaatattgcatttgaactgtggcaagttaagcattcaccatgaacacatttaagtgtaaacatgttgaatttggtgtttaaaagctagcatccgatgtaataaagtttttttggtgcttctctatcaaaattgtttaatagaaatgacaactaacaccatcaagccatgtttatgttgtgtgaccacatcccatgtttatatgtcactgttgtgaataaggtagatttttccaaagtagccttctgagcgtcctggactcaacaataacatgttctagaccaaacatgatggttttaagttctttaatgtattttattctgtttagtaaataaaatggcatgctagctgatattaattacaaggattttctatggaagagaagctaatactgtagaaaaactgtctactacctataaatccttttggcttgatcaactaacagccatacatagatgaaaggtataagtaattttaattgcaagacttgttgactctgactcgttgaaattttgcaaaaactgctggaagactgattgaattccagcgcatcacataaagaatgactgaaccttgtttatcgtctagatgtaatttgatagttgaagggaagccaacaggccacatgtgaacagcagcagcagggaataaaatgcagatgtggctgtattggggcttcctgtaggttctgaaccaaagacagttgatccgccaccgggatttagcatgcctggtggagttggggtcatcactggagttggtggacttggtgggctgacaaatgttggtgctggtggtggttgattagtgctgcattggtgagataatatattaggatgtataggattgcatcttcattaatatagggtgaaaaagagatataggtgctgcaaattctcaccttgttgacttggacgatgcgtatttgcaattcccactacctgcgatggagttagatgttattttctacttttaaggtacagaagcacaagcaaaagacataaaacaaagtagaaattgtttacaggcgcagcctaatccccttaaaaaacaattaaataaatgaagcccacaatccttagagtcatgatgtaaggaaagtaagctaattgaggacattcatccgttgctgagaaaggcgttcaacagacagcagctggaccttcatcagttgcttaaagaaaaacattactatacttttttggtacaaaaacattactatagttggtttcgtggaaggggattcattcctgtttataaaataaaatatatattttttaaaatgacttcacttgatgccttgtcgcttgctccacaggtgaaagtatgagttcctggcctggtaagttatgggtaagtagagactgtacttcagaaaatcttagatataggtatgtaaagatatatggttaaattttttaaagctagaaacaagggaagtggggtgatccaactagaaattattgagttatatagtccctcaactgcctctcaagttatagaaagtttgcataagaatcttcattttatatgaaagaagaatagtgacttgagctatccaagctgtactctaaattcccaacaggtctgagatattggatgcatgatggtatgtataggatacttgctctgtgcctgacatgacgtgttacccttaagacatgtaaaacattttaaatatcatggtcacaaccaagaaaattatcacaagaagataatcatgctttgaagttcgatgaaattcttacttggatcattgcttgtaagagatgctgttcctccaaatacacagctggtaggtgctggattcttctggtagtagtcattgaatgcataggaagcatgatcacggacagtgttcggattataacagcttgctcctggttgtattgctgagcagtctgcacctccatacccacaagcatagtcaagagcaacctgtagagctgtgtctgaagctccctggttagcaacacaccattgaccacctgatgatgttggtgttgtagttggtgtggtgggtgttgtggttggtgtggtgggtgttgtggttggggttgttggatttgtgtttggggctgtggggttttgccctgatgtgtcaggtgtttgaggagtgttagggtttcccatatatggatttcctgtgccaggagttgtgggattgacgatagggacatcatctaattgagtacccaattccgatgatgagaagatttcctgttttttgtcatttaatattttggttgttcctagacctggaaaaagaaacggaaatttaacaccttagtaggacaaatgcgaataacttttgtgatgcacttgagctaaatattaccctttctaaatcaatttacgcaaattgcaccaaatcaagttcattacagttgtacaaagaagtgtgcatgcatgactacgatatcttagaactggaaactatcatcatttgtagacagaatttatctatcgaaaaatgattgaagtttaaagataaactttgatcatattttcaattgataaattgtgtacaaaattttatggctcttgatataatggcttgggttgcatatcttctcaatccaaagttggttttgttataaatgcatggaaaaaatggtacctgaaccaaagaaaagacataaggagaataacacgaggtgccagattctagcattcattgctccaggtcggcttgtgcttggactgcaggtgtttccttaagatttattaaacaagggcagctccctgctgttcctgtgaagaggaatttcattacttaaactttttatattttacatataataaaatcatgaagaatcatagctttcttggatcaaagagagaaggaagaatataggcaaacttgagaaaggaggcatgggataattgaaataagcaagcaagagaaggtgcaaactgaggggaaaaaaggtgcatgacaaaggaaaaaggtgaaaggtgaaagggcgatctgatgcttgagagctgcaatgtatatataattaatgtgacggtgatgtctctgcaacgtcctttctcttttgtgccactcttttctactgttttatgggactgaaccaaaaagtaaagcctgagcaagtggcttgccttttgggtttgtaacgaagaatgttgtctcccttctattgtttttatcctccacctcttaacacacaaccacaagtcattttctattccctgaataagtggttcctctggaatgttttcgaagtacgattcctttcctacgaaactcaagttatctactgctgccttgtatcttgtcatgcttaagcaaccttgtctcaaatctaagttgtctattgtaacaaaccaaaaaaagtgtctattgcaaaacttaagtaacttaaactataattttttttttttttttggggggggaataggaaattcagaatgcgattgaaaagattctcaataattgcagtaagggcatgtcaaagtccccacatataaacattattaataatttacttgcaacaatcatgatgagaatatcaaagagaagtcatagtactaattttattcatatatatcaatatattttcatatagaatgtaattatcaattttttagaatattacagtatactaacaattcgtctatacatatttttcatataactcattatatgtataaacattttatacttaatatatatttttcgtgatcaaactaatttatgtattaatatttgattgataattaatttattaacatgaatctgttatattattgttgattatatttgtttgaattaaaaataaaataatcttatttaatatttttgaaaaaataatataaaattgtaatgtgatctcatctcatacaacaaaatattctttatatatattagataataaaatggaaccaaacgattttccttaaatatcggacactgagtttatttcctaaactcctcctatttgcttaagctttaaaataaagtaatttttaaatataatttcttcaaaaagcattttttataagtaacttttttattataaagaaaacaaatagtacaaacgcagttaacgtaagttcttaaatatgtcttaaataaaataaagattttcttaaaaaaaagaaagaaattcaaacaaactagcataagtaaggaaaggaggaaaattactacaaaagcagaggaaggagacaccgaagttgattttcctgaagcttttaaccttgtgggtgttggtgtcttcagttcaggtaatttgtaccctttatttaaaatcaaattactttttcaaatcagatttcgaatgatttaataatcaattttccattgaataatcaatcgagacactaatttaggcatgcaaacttaaaatctctttttttttttttcatatagctgtggaacaaagatttgaatttttaatcgcatgcgaattcataaaatacctatttttttcacgattagaacacatctagtggagccatgcgcaaattaagttcaaataattcaaatatctaattattccgcgtgaaataggtttatggcttaattagttttttagcttttagattgcaagcaataaatatttattttatataaataaaatgtataataaataaaatatttttaaatatataaattactatatttgtttaattcataggaattaaaaataatatcaaagaatatacaacaacaagactatattcaaccaatttagttagatttaatcatgtgaattttttaaaaagagtcatgtgactttttaaatcttgatcgtccatgattaattatatgattcataataattatctcactcttacatagaatacatttttctcatatgatacatcatctatatgtgtaatccattaaatatataattattcttaccggattttttataaaatgataaattagattttcttataagtgttcttcttatcaaaaataattatatcataatatcacatttcgatcttttctaaatcctttataatataataaaatatttttctatattttatttattatactaaaataaatatgtcaaaagaaataattatcacattatatttcaatcttgaattttgaagaaagtaaaaaaaatcaacaaaaataaaaataaaaaataaaagatggggtatcaatgcttggacatagaattataagaccaaataaagttcgatccttttcggccctattcgttataacccatggcctccattgagtatgtttcggtaacctattttgttacctaatacaagtataaacaactagtttttcaaatgtgtgtattttatcccttttattaccttatcaatgtgtatattctaaacctatattataacagtttaatggtgatacactaacaatataaagtagtttttacactataactaattacaaattatcgttgatatgactttttaaataattttaaaaaaatcaacaaacttaccataaatgttaatttctaattggatgaccctataaaactcattacataactttttttttcttcatattatagtacccttttattagaacaaaataataattaacaagtagttagtttgagtataatttaatttagatattttaaataagatttcaaactcgagacttgttaatgaagatagctggggaaagatccaccagcatcaaagatgatcaatcaagttcttctaaagatattactcattgacaaaacttgtgatacttaacacaaataacatggtttaaaaaaaaaaaaaaaaaggaagacaagagtaagattgcgtacaatatccattcctcttattttcacatatagaggagtttatgggcaatgaggtatgtagttgtttttttaaagaaaggcaagaatgaatccatattgttacattgacatatgttataacccttttattatcttagagtatctttagcgtcagatcttgaacaaagatctgatattcattatatctctcaataaaggagatgaacaaatctccaatggcaaatggattattgtagaaaaatcctgaagatttgcataatattcaagaaaggataattttttcccctctctttccttaagatctgaaaatgagatctatcactaaagaaaaaaaataggacatatctttaatcctacgtgacactataaagtccatcaaaaagtggtttaagatctcaatttagaatctaccactaaaatgctcttatcaattctattaagtttattccatgtaccgcacgaccatattggagtgtataaagttacttcaatgtaaaaattaagcaaaatcaaacatgatacctgagaggaggaacacattccacataaaaatgaaattgtcgctacatttcaaccctataattcaaagaatagtgaaaatagaagcagtaatgattcccgatttcctttttcgtcattgtcaatatgtaatgaattctttaccaataaagtggcatttttccatgcacttgaacaatcaactaatacgtctggatacactgtaatattggggaggatgtggtgcgagctaaaaaaaggaacatagtatcaaaaggttcataaaaatgtacaacaaagcttctctatgttagtatgcattaaacccaggttacttcagttctgcactggctgcttgaatacaaactcttgcatgcgtcctagggtcatttcttctcatgtaatatcaactatacacttcatcttgaatggaacggttacaaatattccaagccaatcttgggtgttaggccaatgtatgttaaattaaatgccattgttgccaagaaggctaggcaggccattcaggcatatatctatattaacttgaaattcttgagatatacatagcagcttccagccagcagattcttcaaaagtttcaatttaaatgataaatccaaagcaatagattgcgttggaataccaaagaaactgctttatccctgttgtggcatactgcattttttaagatgtcggtgatatcatcccatgctgcaaaaatggggctcagatcatgcaccatattaccattttgactacggaggaaaaaaagaaaagaaaaaaaaaaaactaattgtacctggaagtttctggaagtcaggctctattccattgccgtttatgtccttgtgatttggtgttacatacttcccaacagtgataaccacaccagatccatcatcaagctcaaatacagattggattagaccctgatagaagcattgcacatcaaagtgtcatgaagaggttgttacaactacactgaatgcatcacgtaattatacatgtgtaagagctaaaccatgcaaatatttttatttttattttttaacaacaagtcactgaaagacatcaatatgattttctgctattatctccctttagtaagagaagcataatgagaaaagaaacccattttatagaagcaaagaaacgctgcacagtctttgcggtacactggtgtggtactccttcaaaagatatacaccagaaaataaagctaacgtgattaaagaaaaatgctttcagatggacatggggttctcataacaaagaatgcagatcaaagtctacattggttgaaccatacagcagtgatggaaaatattcataaaccttgccatatgtgcgttttccaacaagaacggctctacaattatcatgcagtgcagaagcaacctgaaataagtacaacagctatagtgacatcataaaaataagtggaaaatcaaacaaataatatattgagaaattgagctcctcactatttcacttgcactagcagttttgtcatttactaaaatctgcaaaggttcaaaccaaaaagaatcataatccttgtcatgaagtcctcaaaatgagaattccattgatcaatgatatataatgaacactcatacggagactattttaatattcgcttgcatgaccttgctcaatatgacgggaaaacactttatcacacatcaagaataaccttataaaatgatcaaacatatagatctcaacttaattcaaacttttagctagtcatgtgcaaggggtaatgaatttttccagaaaacttgagaatattctcagatgctctttaacttatttatttataatgaatttgtggaattttctaataataaagccttatctcggggagtcagctagattgaccaaatgatgtcattggagaattggacccatcaaaaaccaaattttcaataaatccatttttgaataatggtttcctaaatttttttcaatatatcccattggatccacttttagcatagggtcaccagttggatttctcctcagtcctcatattacccaactatccatcatttcctcaatgggcatgctccacttttgtctcaaatacacacttgttctttttttttttatttctctgtcactcgtccaccttgaccttatcacctctaggctagtcttattgatacccagtagaatttgcctttgaatttaaaaagcactttgtatacttaaccaaaaacacttggattcaaaagcttatctccacaacgcaaatttagacattcaacttatcaactagaaatatatcatctacaaaaaaaaaaaaaattgagcactggctcctgaatgtgcaatttgtatttactcaaatggtggcaataaatcattgacccataatccataacatatccatcatagttttcaatagtaggaaattctgttactgctccatgtgtttgcactcaaatcattacctatcatacataacatattcaccataccatagcttcacgcattgcacaaatctaaaatctttatctgctcctttatttaaagggaaaaaatccacaataaattcaatgtatcttaggttttttccctatcattgtattttggaatatctaatgcttatcttaccaaagtttatcaaatgggcatctagaatcactatttatcagtcaaacaatcaataatttcatcaaatcagatgtctttgaattattcctgccccaatgataaaccaaaaaagaaattcagaagtagaaatagttccaggaagttaattcaatgataaaaaatcagatgtagaaatttttttacaacaacaggagcttgaatcaatggtgaagtatctgtaacaatagctttctgtaactgaggatctcttccaacagtgtagatcacctgtcatggagacattagaaaaggacacgtctaagaaactaaaatgtattcgaaagaatagttgaataattatcacaaaatagcagactttttaaagatcagtgttcctacagtataataaaataaagcaacagatatatataacaatgtctaactctgaattcacatgatagataacagatattgaatatgaaatcataaaaccaaaaaaggatgccaaagcaattggcatgttactacttcaacatgtaagcaactatcaacttggaccattcggcccagaaaaggctgactgtagaagcactaacgcccttcaagctcaacaattgaggggtcgtggactgtcctgcctagaaaaagtcgaccattagaagcatccacaccctttaggctcagcactcaaggctgtgaacagtctggtcacagaggtcaaccgaatatagtgaatggatcgtccaatgtagaatgattgggtattctaacctttggcccaatcacattcaataaataggggtgacccccttagtcacctcaagtcacacaaaaagggcttactagggtttctttgaggactccttagtatgctggacataaagattgtttttgacataataaagacctcattcatttgtaatttcatcagtcattgttttggatgtcacatgataattctattagatatttagtgcttttcttaagggagagtgtttttcacacaaaacgtgagggcaaggagctcgtttgcaccatttcaaaccctaaggtattattgacatgtgatcataaattgaaggaggtaagcaaaacttatcctaaccattacaatcagcaatgagcataaaacgacataccgtgtctccttcatttaggaaaagctttgcaatttcaattccggcctgaacgagttaaacataataactacattagacagttttaaaaagcaaagaaaaactacattcaatagagaatgcagcatcatttatcttgtcatcttatatcaaccaaagcatatgtaagcacaccatgacagaagaatacaaatttacttaaatttctgaaaataagagaatataatttcttcataccatgatgcagttgcaataccttcctgcaaaggcaggttccacatatgcaacagccaatatgtacaatacaagttcttagaatgtgggtttggacctaactcaatcctacaaaatcagcttgtaaggtgaggttgcccctacttatatacactattttgaccatatcactaatcgatgtgggatctccaacacaagtgaatagatatatattcaatttgtcctcaaagctgcacaattagtgactcaaaagtaaagagctccaaagctgcaaatcagttcgcaggttcttttgtggtagacttaaaatatcaaattcaaatatatgattaatttttcttagagagctagtcatctgcaaaaaggtaattcttttaactatttgtgcaacctgaaaacagaagcgaaataggcagagtttacaaataggacagtcagcccatgtcaacctacaacaaattataggtctatatccattggcagatgcaccttatctgttacctacggtgggggcaatcagattttttttttatttgttaatgtatataaaaaaaaattgcccccataaaaaaatttaatctaccaacttggaccaacatcaacatcaacatcaacagcacctttaacccaaataattggtggtagatgaaccaatgataaatcgaaaataaagcaaaagagaaacagagttaaatataaaagaatggagaggagaagagaaaagaggaagaaaaataaaacagaaacaactgaacataaactactaaagggttaacctccatcagacttatagctttctccactccgtcctaaacatacgtcccaatctaaatccactccattagtcttgtttaactacctttcccaggtaagtttggtcgacctctacctcttttatctagctcttgtaacatactcttgttctaacaggagcatctaatgtcgtctcataacatcccaaccatctcaatctatgctctcatcttttcacatactgtaccactgatacctttcgaatatcctcattcttatcttatccatcttctgtatccgacatcacctaacatccataagacattcaatacaaaaactacatgataagcccaaaccatttagccaattctcattactgttacaataaaaaaaaaaaaaaaaaaaacaccacactgcatagggcacaaataaagattatctttatttagataacgattagctaaatatatcttttagtaaaagaaaagatagattaaattgttttcctttacatatctttttgaaaagatattagtattataatatattagattgaagataataaaaataagagataaagaaatattggttaaacaaatttcaaattatgtacaaatacaaggatagacaattcattttcctagaatcacacaaataaacagtctctcttgacattaatgggttactcaacgattgagaagaaggaagaaagtggaaaattttgttgaggcaaaaataacgaagaagtcaatttacttgcttcaagaggtgactacattttcaaaacttccatggtatacttcttttatgagcgtttttttttactgtgttcttaaagaaatcaagattaatgttttttagtgtgattattttaatgaaggatgttacatttcacactaaattagtaatgacaatgaaaaaacatagaacatttttaaagtatgaaaatgcgtaagaacaattgtaatttgtagaagcttaagtactttagatttttttatcatgatatatgtattttgtagtacttgtggtattttacttttgtgaaaatattagaaattatttcttgctcccactaagaaaaatttctggatccccactttctatatccataggcaaaataatgagaaaagttactatggtcaatgaagattataaagaggaccccatcagctcatgtcaaccataactaagtcaatgattttatgttcaagacatatgcagggccatgctaaaaaaacaaatcgaatccattcataaagaaatggtttaatgacaacttacttatacaccatttgtgctacttcaagattaggtacacgtaatatatttaattcataatttcatatacataagaaaatcactactgtagtcaatttcaaagaagtgaatcaaaatggtaaaggtagatagggttatatgcaaaagcaacctgtactagcccaccaagattgtctctgagatcaatatgaaatatgaggcacccatgtcttgaagtcgtttcattgctgcaaaatccattatttttctagtgtcacgtataaaaaagtggaaacaactaataaaagagtccagaagcaattataatacaaatcaatataaggatccaaaaaagcagcagccttactttactaacaatgtatggtattcattcttgcatgggttacatagcctagatgacaattttttatactaacaacataaggtaaataacaaacccctggcagatcaatgtcaagttattcagaggcgaaaggtgtacttaacatactaggggtttttaatgcttgaggcaagaagcacgaaaaagctcacatctgactaagaaagggattacaattgaaaaggaaaacaaaaaatattaaagtattttacattgattttccaatatatccattattcaatcaaaacatttgccgattgtgatcattaattgacttctaagatagacttgataaaagcatagaacagaaccccatagtatattgtatttcatctccatcctttacaagtctgacttagaagtcaattttctctcctcaaaacaatatgtatccgtaatcagttggtctcaaaattaatttagcatccactcagagtaagaattagtaaaagaagacttttaaaaaaaatgctcttattgagaaaacattattattttagttttaaaaaacacatatgaagctgagaaaagcttaccaatgactaagtcttttctggccaatgcattgaactctttgaggcgtatatacccaacaggagtaacaccattgtccaattgttccagccgataaaagactggggtacgagcaacaagttgccgctggacttctattgattcaacgggtccacagttgccatgcttgacctgacagtaatgatctaatattaaacttgaacataaaatttaaactaaataaaactataaacaaaggctagagcagtgccaaactaacttggaattagaatccaaaacctgaatagtcacagatgttccattagggccttgcaacagggatgatacttcaaatgctgattttccctttacctccatgttattgacagccaatatttcatcccccttccagagaaacagaaaaagtaaaggaaacatattatataattcaaaatagttctttgtgcctaccccatttgcttctaggagagaaactaaaggacagagtatattctgataaatggtaaagacagagaaagggaagttgttttgaatggttaaaagaagcaaaaaaaaaaaaaattgttcacctatttactgtaatggataccagagattgcttatgtagcaattataatgcaaagcatgattatttgacatatttatttcattgattaaaaacatagaagtgaaggcaagagagatgtatgtgtagattttgaaggtgaagaagatgatgatttgaagagctgcaaattattaagaatgttcatcatctttgtgtacctgtctaacaccagcagaatgagcaggaccatccaatataattcccagtacctccagtctgaggtctccattttcatcaggaacttccttaaggtttattccaacaccagtcatgtcatacctcgccatcttggagaacttttaacagtggaaaagtccatatgtcattcattaagtaagaaacatgagaagcacagcaatagaaatcaccacaatctatataatctcatacataagaaaaacaaataacagtgaagagaacaatgaaacaagaacgcatcacaagtttcttattgttaggaacctggttcagatttagagaagaaagattgaaaagaatggatcttttatgaaattggagaataatctcctgcagctacaattgtgataattcgaggaatcatagcctcctattacttccttgcttacaagctgccttatgctcagccacccccctcctatttataatttctgaccccttcccaactaactaactaacagcaacaaaatattactatcaatatcctatcaataacctccccttcaagatggaccttgtccccaaggtccaggtaatgaaaaacctgtatttttcagcaaggatctccttcatcttcttcttccattatcatcaacctcagctacttgttcttgcacacatgtgttggatgatatttctcttcacatgtaaaacactcacccttcctcattttctcattcactgttgctggtgacaatctatggatggttcttctaccttgccagccattttcctctgtactaatagtttggacagattcactgtccttactattaactggctgcccttccttcccatttcttgaacccaataaactgggtttcagaaaagtttgaagctctttcctcagttttggtagatttcccagcaccttatgtttttcctccacttgccttgctttcatcatggtatccagcaaagacttaggttcatgcaccctcacttcagtcactatttcttccttcaatcccttcaagaaaatttccttcagaaaactctcatccaaacctctcccagctccaacttgtctttcgaactgcccaatgtactcttgtacactatcatcctgtttcagagccaacaaagcctgaaaaggatttgcaacaccagctccttggaacctctgcaccacatccaatttaaatccttcccaagatcgagtcttgctccactcttcccaccattgaaaccaagataatgcttctccttccaaagccaccaaaacagcttctaatttttcttcttctcttacctcctggagccgaaaatacctttcaattcttgagacccaaccaactggatcatcacccgcgaacaagggcaactccatttgcctccagttgcgcgctactccttcgtctccatccttgtttcgtcccttcctttccttcacgcaaatcatttcctccttttccgaattatccagcgtcgcagccaatcgatgtagtagattctccatcgaacccagtctattctcaatcacgacctggttcaactggttggtttcactcaattcctccattgcgcgttccagtgcttcgattttggcctccatcttcttcgatcccattcacctcacaaagccccaagattggagctctgatactagtgttaggaacctggttcagatttagagaagaaagattgaaaagaatggatcttttattgaattggagaataatctcctgcagctacaattgtgataattcgagaaatcacagcctcctattacttccttgcttacaagcagccttatgctcagccacccccctcctatttataatttctgacccctttccaactaactaactaactaaaacagaatattactaacagcaacagaatattactatcaatatcctatcacttattcactgtaataaatgcaagggcagcaatatcttggaagattcatatgtaatgtgtgtgtgtgtaaatatttctgttaaactatatagacatattaactgttagatttcatcttaaaatcagttggcattaagtgaaattgtccaacatgtatataggctccaccccaagaattgaattgagacgggctatatgggactttccaacactccttgagattcacattgacaagtgactaatgatatgaccaaaatagtatccaagcgtatcctagtagttgttttgtagcttattgcgccacacataattgggtcattattgtgttatcagaccacctgataacgcaaatatacagtcatgcaaactagtatataagtggggcgcaacccttaaactatggagtagctttagtttaaaggattgagttaggctcaatcctaagtttagaccccttccatagatgtctgctagctaaaacaggtgatggcgatacacagagagaggctataacaagtaagcataaaagctgcaccccaggaattgaagcagacatgtgggtctttccaacactaatactattgattaacaaacacagtaaaaaggacccatgaaaaatgacctcatcaggcgagagaaagcgagtataaggatcggccaagctggagagcattcgtttgatgatttggtgcgcctttgatcttgtctgaatggaattgctcaaaatagcttccctcttcagctggaaacaagaagcgctatattagcatgagccatgaagcaaccaaccatgagacactatgagagtaagagtagttgatgttagttacctgccaagtgtcctgggaccatctgtggcgaccagtgtcgagaaaggtgtcgttgacaatctgccatgcttcctcaacgaggccttggttggtgacaacctctggagctgtttggagcgtctctagtaagggcaccacatcaggacaagtttgggaagcagagacagaggggaaggagaagacaagcccgaaggagagagcagcgccgaggagagtgttgcgaaccaagggaatgggaatgggaatgggaagatgaggagctttggagaggaaagttggaggtgctgagagtttcatacacacatagccactcatcttctgctgctgtcttttttctttgtcttgctctttaacattaacatcgtttcagcaatgtaggcgtcgccacttcactcgttccttatgtcatccgtaggtggatcccactcatcatccccaagacgataggaaaatgtatacttttaactcatcaaattttaaaattttaatatttttaaaaatttcaatactttttcattctgtcaaaaatgtttattttcgtctatgttttaaagtttaaaataatcaatttaatataataacgattatcactatctttattttattttaaaattataaaatttgaaaaaatattatcatccatcatcttcttcaaccttctaccatcacccaaaacctccaccccaaatagaaaaaatcataatccaattattgataattccaaattcaaatcaaaatcgtaaaatcatatttcagcttcaaatcaaaatcctaaaaagaatttgaaaaccaaagcttattctctttctctctcacacattatccatccttgttccagactttgtttttctgcgtgctttctccgttgtcactcatacaggtaactcagttgtgttgcttctacctctgcttccacttgaaccaaacaccgtcattggatattattatattgacggtatttgtatgtatgatgtagtcgaggacaatgtcaggtgttcctctcttcaacctcgctcctaatctcactgtctcaaggctctgcttaggttactctcagcctcattcccgaaccatgaaattctattcattcacttacacgacacttgtggttgtgggtggcaggaaccatgactttcggggagcagaacacgctggcggagtcctttcagcttctggaccaagccttccattccggcatcaacttcttcgactccgccgaaatgtatcccgtgcctcagcaccctcgcacgtgcggcatgagcgaagagtatctcggccgttggatttcacaacgaaaaatccccagggatagcctcgtcattgcatctaaggttctcttctctgtctccttcgttgctttgtctcttttctttagctcaacttgttcttattgcaagactaggttgctggaccttctgggcagatgacttggattagaggtggtcctaaatgtttggatgccgacaatatcactgaagccattgataataggttacttcctctcttaattctttctcaattcacaccctacatgcagactaatcttttatatcgtatatgtagagagatgctggacaaataatactagtggaaactgtttcaggtcttttttgctcgatctaaaatgaattgagcttctcctgtaagctaaaattaacttatgcacttaacttttatagaagctctctcgtttaacttctccaaaagtctttttttaacaacccctccaaaaaaaaaaaaaaactgtaaagagtttcatttcagctggactatagaataagaaaggaaaaaatgatcagaacaatagtgatggagttttagattgtgatggctcataatatacactcaagagaaacattaagatgggggtggaactggagaggaggggtgcttgtttggaagagatataagatattattaagtttgcatcttatgattctctttctagtaataaactctgaaagcttttgttattgaatttatgcagtttgtcgcggatgcaaatggattatattgatctttatcaaattcattggcctgatcggtttgtatgtttttgttagtttgaagatttggacatttgtttacattgtttttgaatattacatgttcgtcgacttcttatttttgtcccagtggacgtgcaatatggattttaactcttgaaatgttacaccttgtagttatgttccaatgtttggagaaactgagtatgacccggtccaacaatatgcttcaattagcatagatgaacaacttgaagctctcagtgcagctgtgaaagctgggaaggcaagtggtatttttaaatagtttcaaattgtcaacctgtcactcttgtaattcctgaatcatgattcatgagtatgaaaatgaatgcattttttgcagatcagatttgttggtcttagtaatgaaacaccttatggcttgatgaagtttattcaggttgctgaaaaatatgcttcacacctgaagatatatctttgcaggtttgatcacttaccatccaactccggcagtatttttgtttattttcatcatggaacctcaccctacaattccctctatgaaagtttatttcttacactaatttttttctgtttagtgacagaattcatatagcctgctctgtagaacttttgattctgcaatggccgaatgctgccatcatgagaggtatttaatattattgttagatatgaaatcatttatgtgccttcacccagcaacttccttttaggatggttcacaacatggtatgattggtatcaaagcctctttgactaagtggtctagagtttgatctttgttgaccctattcttctagataaaagttaaattttaggacaaggtagggggctagtgcattgtcccactttaagcccaaaggttgcagagggggcatgttagatacaaaatcatttatgtgtcttcacccaacaacttgagtttctaggatggttggttcacagcaattttaaatataagtttgatattacttgattttggtcttccaaaagaaggtatctaagatattctgagttgttattcggattgatatgaaatgttggggtttggggacataattgagagggcagaatggattaacattaacaagcagatttatattatataaatcagatttaatacaagcagagtcataaaattccatttaatttagatagatggaacattggaagcttaatgcatgaaaatttataagtttactacatttgttggcctaaatcattctcctgcattttctatgaaacctcattgtttataattatttatcttttcagaattagtttgttggcctacagtcccctggcaatgggtatactttcagggaaatatttttccccaggcggtggtccaacgatgctcgtttaaatctttttaaaggttaattgacatctttatagatatgttttgtcttaccagctttttcacctcttgccctccttcccaacaggaaggaagggaaaataaatgttcctggtaagtatgagtttgccaatgatactattgttattattcccagggaagtattcagaaggagaatctaggtacaacttgtccaataaaattataaaggcagctactgtggtagtggattcttgtcagcattgttgcagattgcaatgctaatactttgattagcttattggaatctgatatacatttccttagttttcaaacacattttttatttttgattagcatatataaagttttcttaatttaagagcatacgatgcgatgtgaatggggaaaattgttttaatctgaactgatagccttagaacttaaaaacatgtgcaatagctagatgctaatattcataggtgtggacatttaaaactgaacctcatggttaactgttgttaattagaactctgttcctattatttcttctgtttactgattttaatctccatattcatatatttccccttctgcagaaataccttaatattgcaaaaacacatggtcttcatcctgtatctctggctataggtttgataatcttttcctagatcttcatgtgcaaccccgcatccccacccccttttatattagtgatgtaatttgcatgactccaaacgcatcaaatattaaatcagatggctggtccaccatattggttgatagttgataccgttttacaaggaggagttgctaaattctaatacctaaagtagtttggtagctgcacttgtactgacattgcctttttttagtccccatgcatatgttttaagtaaattcataggtaatcaattacactgcgtatgtagaattcaataatggacagtctgtcaactgtcaacactgatagaagttggtaaattgggataagtcatgccttcaaagttggagtttttgcttcttagtgatattggatgccgtacattggcttcttctaaataaacaagaatgttctgtttttttccttccttttttgtcttactattttaaaaggatgccaaaaaatggtttaatttagtagtatcttatcattgctggagatagttattaatgcacacgcataatgcaattttatccatcatttgcaattaactcatgctttttcattttttaaaagcatccattgactatgttattgttgtggtccttgagcttatccattagaggttgtggacttgtggggcattagtttattttttaattttatcctaattttatttcctgttcatttttgttttgagcagcttttgttttgcgacacccccttgttgctagtgctgtttttggggctaccaaatcatggcagcttcgggaggttctaaatgcatgcaagattgagctcacatctgaagtaattgaagaaattaacaagattcattcaaggtttccaaatccatgtccctgaagaatacaaattattaattaataatatgacgaacatgtttgaaatttaggtaaaaaaatactttttaaaaggataaggattttttattttgctttcattttatttttatctattagatttatattaaaatgtgtggggcaataatttcaacaaatcaaacatttaccatctcattatcataaagaggcagaagatagcgtagtcataactcgtaatacattatacaataatcaattcgcgacccgaaaatcagaaggcgaatataaaaagagagcatgttgaatgatatattttcggcaaattgttaagtatacgcaataaatataatattagtagtatatcaattatcaatcatttgtattcttcgtggatcaatactcctgtgggtcccacttttactccatatttcaattgaaacccacatcgattattcaatgaacaaagaaccaaaactatcttcatttggtttaacaaccatattttcttagttttttaaaatctttttattattccagaatagtgcttagtttatttgcatctatacgctactatgtctcgatgcatatgaaaataggagagagagagagaaataagttaaaatatttctaaggtggatgtatttattcccctaaattatttaatatagaattttgttctcaggcctaatggctaatttggttggagagaagagaaaagaatggaagaaaattaaaaagaaaaagagatgtgagatctaaatcaactgtgacattttcttttcctttcactccaattttttcgcagtcaaacatactataaatgcatacctataaaaaaaaaaaaaacaaacaaacgcatatctcatgtataattggaattgaatattctttgcccatataattactattaacatagcctaacctaaaattagaaagaagatttgaattttaaaggagaagttgttatcctattaacatcgatctgggctgcattaacacatcatttaaagttctaagtgaaattacagtaaaaatgatagttaataatattttactacttatttgtacacttggaaacgaatttaaccttttttatatatagaatttaatattcaagttttttttcattttaatttaactttaaaattatcaattctaaaagaacttttttaaaaaaaattgtatataggtacatgcttaattctttttacgaaccctagtgaaggctggaaataaaattgtatgtaggttataatatgccgttaaagatataataggtaaaggaaaagtgaatttttttataaaaaagatatccctttattttaattttttgaaggaaaagatatccctttattattagtattgtatggagtatattttgttattagtgttattatattgttttaattaattattaactatttagtattttctttccaagggaattattagcatttttagtaaagattctattgctcataaacactataatccgattaaatgaactaagtggagtatattttattcagaataaatactgttatcactcctctaaaattacgttgaaataaaaggatacacacacgcataaattaatcattgttaaaacactaaatcagaaacaaagcccttactaacgaagattttcagtttctcacaaattgttgattaatggttatttccagaaaaaaggaggaaaaaaaagaaaaggaaaaaactccgaagagagaagaggagggttttgtttcgtttcgtcctctttccgtttcgggtgcaaatcattgacaggagagagagagacagaaagagtgcgtgtgagagagagaaccagcgcgcggagagatattttaaacgcggcggaaccctaacgaggcgagcggcggcgggggcggcggaggcagatcggagcgcgagcgaggaggatgagcggcaaaggcggtgggggccagaaggcagggattcctccggcgagtcggaagatggttcagagcctgaaggagatagtgagcaacatgcccgaacacgagatctacgccactctcaaagactgtaacatggaccctaacgaagccgttagtcgcctcctctcccaaggtataacactgcactgcactagggtttttcaatttcaatcacaatcactccttcgaacgtgcctaatcttctgtatgttcgtttctcgttgtgtagatacttttcacgaggtgaagagcaaacgtgagaagaaaaaagaggtgcgttttgagttacctttagttcgttttgtctttatttttgtagatgcttgttatgaggagttactcgagttagttaatactttgtttatgtatttgcttgtgatgctcagtgacgagatttttttttttattcttcagggtaaggacacaacggattccaggtctcgtgtggtaagcaatacatctagccgtggcggtggtgctagggttggcgctgaccgttatgttgggcgtggaggcgctactcaatttagtagtggtggtggtaagcggatgctggttgctatttttgaataatgtttggattaattaatatgctcttaacctaatactttatcaagtagtatttcttatgtcgctattgttgttgtgttgttgcttttttattattgtttttgttgtcatcatcatcatcaccatcacatatgtttggaggtcagattctggtctcctgcagggaaaacctgtattcaaaaaggaaaacggaacacctgcttatggaggtcttactgctcctgcatctagcgcattggacaataatgtaaacaggcaactaccatcctacaggtatattttccttcaataattttgtgcactactggaggaactaaaggaattcttgtggttatgataaacaccagttcgtggttatgatctgtttggaaattcagactgttatttaattgtatttatttctggcatttattatgcttcctccagttttttctgaaaagcaagttagctcacttggttgttaaagcatccaatccaacttttgcaagctattttcaatgcagattcacttcgattcttttctcagacagttggtgcattctgtaccacttattcactggattactctatggttctgctttatctcgtgggatgaactttataaccgtgcaaatgttcatttttctcttccaaagatataagacaccaaactgatcagaaatgtcttctatttgtaaatttttgaatttattataaatattttaaattggtcgtccaataaaatcaaattatctttcaaagtgatatattgtcatcaaattggtttttggaggaagactctgatggcattagtgatcatttaaggatcaatatgatgttgcatatatgttgagtgggccaaagttagtgtttagttgtttactcatttgtcttatttttttcaaacaaaagttttcccgtaagcgcttgaatactgagcacacttttagtatgtaagatagatggagcgtctcatgaatgttcaaaactgctgtagtgattctgtccgtgtctgtgatggtctatcttcatcacaacatggtgggttgcaatctcaatgggcggcgaacccaggtcaagtatcaatggctgacattgtcaggatgggtaggccacaggccaaggcatccatgcctaactcttctgtccacagtggtagccatcagaatgtttttgcaaccccagcaacttcacataccaatttgcattcattgcaaggtcatgcttctaaggtgtcagagacaaataatgaccatggctttgctattaactccaatgttgaacagaatgatgaatggccatcgattgagcatcaaccagctgtttctgtatcctcggttgtagatgatcatctaacatctgagtaccatacaaactcatctaactctggtgaagctaatcagcagctgaagacccatgtaaatgaatttgtagctgaagatgatcatgttgagaatccagaaaatgttggatctgcttctatatctgctaaaagtatatctgaagagaatcccgaaagtacatctgtttttgatggtagcttgtacaaggacttaaattcctaccaacctcatcggcatcctattgaaactaatgaaggtgactaggatgtttatcagtttgcatgtcttgtatgtttatttatatcgagcatatattttttacataaaatttgttaagacttagtgtggataaacttcttgataagcatttgtagaaaaagaatttggaggtaaattaaatcaaacttctcccttaagttaaaagtaaaatatgcaccttagcttttggaaaagtgaagttagatcaaagagcctctaaacaaggaaagaagtttgatttattttacctttttttgttctcctataagttcttattgagaagtttgtgcaaatagggtcataattatcatgtaattagagggatggtactggcacttccatataaaattgctttgaaattccttagttttcatgttgttatctcttttatccacgtatattctgatttggttgattgggctgaatcgttgaagtcatagaaatagcataatgaaagaatatttcaatatccttttacaagtcaatcaaagttcatcattgttgttattgttattttgttgttgttattattattattattattattttgtttttattttctttctcatccttttaacatgtgaatagtttaaaaggagttattttattactaaaatagtcatgtgccctgatctctaatggtttagagagttattataatacaattatttgaagttcattcatgattatatcaaacattcgcctacatgtaagtcctaatttcgtaacgttttctttcagctgaaggtggtgtttcatcagtggccgcgaacttagagcagctaaatttacactcaaatgatcaggggacagaacaagaggaggaaaattcttctgtagtaattccaaatcatttacaactccattctgctgaatgcttaaatctgagctttggaagttttggatctgcaaacgatgcttccctttctggatctgacccatatgcatctaggcccttgaaaagtaatttggaagatacatctggagcaaaggatgtttcaacaattgggtcctcagatgttaggcatgtgcttagacctcagtatactttgctgcactattctggtcatattttacttatgtgttttttttttcttgcagaaaccgtgactttatggcgatgagcatcttactactacctctgatgggaatgtagctcacataactggtgtggatgctgggacttatgagcattcctccatttcacaatcagaggctttaaaatctgaaccccctgaaactgctcaggaaaatcaatattcatttccttcttcttcacacgagtttacttacgaaaatgcccaacaaccgatgttacataccctcattcacagacaagctcacagatacagaacctgtctcccttctctagtgtaatggtaatgcataaattttatatcttatgacttgcaatattcagcatatttcaaggctgggtcttattttgggtgttaagttaattagagttggttctaaaatgatttgagatcttatagtgttaaaactaggggatgatcagtgctgctattcatctctttgagaataaatcaaagcttattctctccaaacaatagaacttgtggtagagtactgttttactgtaataaatactttttcgaatggacatttttaagtatattttatgattgaattgggaattgggcatagaaatgcctccatttggatatttcattcatattgttgggtggtgtatgatttctatcacaggtaattgagttgagtgtgaatttcaatgctcagttgctttacttgtatggcaacttattactacagtaacttgtacttttttccagaaaactataatatggtgcaggaccatttattgctttactgaagtaataagccatatatattatgtagtttcttttatcttctaatattaatatatgttgctattctgctatttgcactaatcttatagtgctattgtttagcaggcttatacaaattctttgcccagtgcactttggcttcaactgttcaaacagcaagggaggatatcccatactcacccttccctgcaacacaatcaatgcctgcaaaatatagcaatattgcttcttcaattggtggtcccactataaccatgtcagaggtgaacttctgctctagcttattttagtttttctatgtacaagcttttgagacaggttggatcataaataaatttaggattacagcttacagagtgttcaattattcttgtttccaagaggatgtgtactggaatttgcatgtacattatgtttgggggctgcagttatataccaatattttggttaacaataagcactaaggatatgtttgcatgtacgtgtattgaataccaactgtccagttgacttccatgtgacatcagttaaagatctgacttacattaagagcatcacaaatcaaaagattatatcttggttcaatcacttgtgtcaaaacggcattttgcatgttttgctttgagctacttgagtgcttactgattagtgtcttcacatgagctgatattttgccaataactgttttctacatatgaacttacaaagtttatattaattaattaattaattattagcaacataagaggatgtattggatgagataaggcatttggatttttatgcctaggtgtcacatcaattgtatcctgtacccattttgtgtttgattcaatacaagtatttctacactctgcagtgcaatcttgtttctttgcctgataaatggctggggatctatctgtgataaatcttgtgtgattccatttccatgtatatacattttattatactactactagacaaatccattcaatgttactagtcattttggtttcccataaaaatatgggtgaaaaatttgtagatgatatatgtatatataccgtgtgaaggtactggtcttgcaatgctatagttatttttaaaaattaagatcctggtgagacaatatgtattaaataaaatgtttatatatttaaaaataaaaattaaatttatcaatatgtgattatcctatcctaacccaagtttcatgctttctcccactgtcaagtcctgtgatacttttatggttggcaagtactttgagggtgttcatatttgaaaacagacggaagtctaaaaacacaaatatggatgtgtatgagtgcatcagtattgaatatggatttgatacaagtatctgggcattacatgcgtgtgaaagagaacacaggatttatcataaatctaagaaataatataaagtcatgggtgcaatttatattgaaattgttttccaatgattacatttgcacagtttaatgttatatctgtatatatgtatcttgattttattgttttttattaagagggagaacatgggtatttggtatcattaattttatttgtcaactcgtaggctctaagagctaataacattcaacacctcaacctaatccacaagccatgcctggtgccaatgttgccactggacctgcacttcctcaacaccttgctgtgcatccctattcccagcctactcttcctctgggacattttgctaatatgattagctatccattcttgcctcagagctatacctacatgccatcagcatttcagcaggcttttcctggaaatagtacataccaccaatctctggcagccatgcttcctcaatataaaaatagcatttctgtcagtagcttacctcagtcagctgctgttgcatctggatatggttttggaagttccaccagcattcccggaggaaattatccattgaacccacctgctgcgcctactagtacaactattgcatatgatgatgttataaactctcagtacaaggagaacaatcatatgatttcactacagcaggtataaagatcttcattttaatgcacatttaactgtttttgttttccatatgcaatttttctcttgggagttgagccaatttggtttcaacagtgcaacctttacaaaatagttattttttagtttttctatttatgcttgtgtaaaaccatgatccttttaaagcatgtaaacaaaaggtttaagatgtgtttcattttgttgtcaacaaattactgtcattttttgttgtgagggaatggggtagactgattttgtgttttcttctgtcagaatgagaattctccgatgtgggttcacggacctagctctcgaacaatgtctgcagttcctcccagcacgtattacagcttccagggacagaatcaacaaccaggggggtttcggcaaagccagcaaccctcacaacagcattttggatcccttggataccctaacttctaccattctcagactgggatttctatggaacatcagcagcagaatccaagggaggcatcccttgctggttctcaaagccaaccaccaaagcagtcccaacaaatatggcaaaacagctactaatcttattcacctcccggtttttaagggtcttgatgtgagtttgaaagtgactggtcacaggcatttccgcggtctaataattaaaatgtgccattgtttggtcccaagagaccatatatggcccgctgctgccctgtgcgaagttgtattctatacaagttataattatgctcgtgatgtttaacttaggtatttaagtgtgctaattttgtgtacaacgcacagtaccctttttatcaacattcttctcatctggttatagtggaaagtttcttggatgctactaccttggattttactcctttcattcttgcccccttcccttttatatatgcatgtctgtcgtttacctgagagttaccttgtattactgtctttgttccttttaaatataatttaatgtttttgctttttattgaaattatctaattttgtattatatactatgtttaatgattattttgtcatttattatttatttttctctttaacttcatgatttataaattgtaatttaagtgaatggaagcatatgattaataaaatagtttaatttttagaatgacattctagcaatggtagtttattgttattattccttccgatcttatttataaaacacggttttgaaaaacattattttttctataagactttcaatatctcgcaataattatttttactaaaatatttttatttattttaattatagttgattgctactcttaattgtttcttctctgttgaagatgaatagattctcaatagtattaaggacaaatttggaaaatattataaatataggtaaatttaatgttaatacatgatatgatagaaatagaaaaaataaaatatatcgtggagtgtttaaaatgtaatctcacttaaattttattgcaacataaaactttcaatcaaaatattacggattgtgtaattttgttttgcaaatccaattcaatatgatgataaatgagttgggttggtttggattaattggatttgaatatttaaaaaatattttttttttttaaaaaataatatttttaataataaattatttttgtctaaattttttaaatatataatgattgaatacattcaaaaagatcaaattgtaaaaatatttaatttatagattaaaatttcaatactaatacaatattcttattttagataaaataaaatataatattagtatgtgaaaatattaacaaaattaaaacaagataagataacttaaaaagaaacaaaatcattggtgttttaatttaaaaatttaataaattatgtgagttcaaaattattaatatattttatatttaataattaatttatatataataaataaactatataatttaatttatatatatattcaacaaatatttagaaattcaactcattgaattggattgggtcacgactcacgagaacaatgaagattcctaacaattataatcaaagtttatatcacaattataatgaaatgatacaaaaaaaattgaggttgtttttcttaatagaaattaaactctaacttgtattatttcaaaaaggaaacgattttgtgtttttttaaaataaaaaaggcatacacatggtattgcaatttgaccgagactcaaggaccaccgctaccctccaccctaaacatagtagtgcagaacaaaaaaagcacctaattatgcatcacaaaaatggaagctaacaattcatagctgttctgttctgttcctatgggatactaccatcacaaaaggaatgaccgtctcatattattatcataattattataatattccattcgcgaccttcatttttctcggagtttcaaggacgtggttgcagtggtggtggtggcagcgacagcaatggcgcaaggcatggcgagtaaccgcaaccggaacgcgagcgcgcaagaagcgcgcaaggtgatggtggtggcggacccgacgcgggaatcggcgggcgcgttgcagtacgcgctcgcgcatgcggtgatcgagcaagacgagctgattcttctgcacgttgagaaccctagctcgtggcgcaacaccatatcgacgttcctgaagatgccgtcgttgggaagctccaccactacgtcgctggaccttggaggagggggagccgcggcggatggagaagggttcgattttctggaggagatgaagcatgcatgcagtgtttctcagccgaaaatgaaggtgcgtgtgatgaagtggagatcgatggaagagacaaggctagcactattctttctctgagcaaaacgcatggggttgatgtcgtagttattggccagaagcgcaatattacttcggcgttattagggttagtatactacttcaaactgctatttaattttctgctggaattattcattcttatcaaaaatgcattgttggaactggattataacgccaagtaactttagattaaggggtttccgctatagcccaacacgggaaacattcagtcttcttctatctcattttcatcccatttttttcttaaaattttcctatttctttttcattctatcaaccttttttcttttctctctatctctctattttccattccaattcaccccaaaatgggattatatttgagatctactttctgtattttcttaaattcttgtctcaatgaagagaaagacagattcaagtattgtttccatagtgtttgattaaagaaaaaggatttttaattttttttttttatttcatttacaagtttaaacaaaggaaatagaagaaaaaaagaatcaaaattcttcctctgtctctttctatctctgctttgatatgagatttgaaaggaaagaaaaatgtataaagtctgtaaccttttgtgactggattatttttaatttgaatacttaatagtagaatttaattagaatgtactaaaacagcctacttttgtaataatttaaaattatttataattaatccattatattaatacaatattagttaattttcttatggtagaatcaattaatttcacgtttggttcatgatcaatgcattaaaaaacttttaaaaggaatttaatatgtgcagtatgtgttgtagaatgctggtgtagaagttaattttatgttgctaacttatattcttcttttgtgtttgaaatttgaatgcatggcaacagatataagcgacctgctggtggatctatgaaaggggtgaaagcgatagacactgcagagtatttgattcaaaacagctcgtgcacctgtgttagtgtacagaggaaaggccaaaatggaggctttgttctcaactccaaaacccacagaaatttctggctcttagcctaaaggcttcacacccccatggccatggatggtagacatttttcattacggcttgaacatatcaatttcgctgaggatagatttaggagaaacttttaaatagacatcatatcatatattattattacattattcattaggcactcaaatcatttaactcccagaaacttacatgggtcacaactaataatttgagtgcttatgatcaataatgtctatctaaaagttattctagatgtagtgaaattggtaagatttccccgtaactttgttgtttgcaaatggtgagaacccatggatgttatcccagattacctaaaaacaccatctactcatcttaaagacgaaaattttctgcttatctcaatgtttccaaggagaaaattctgctaacaaatgtcataaaaatgttagttaaagaattaatcaatagatagattaaaaatcacagtgtgttgcttgataaattaaatgttaaatttttacaaacttttcactatggatttgttagcaagtgttcttaacttactagcagcaatctatcatttataaaaggacatacacttaataatggaacaacactctcattctaagattcctccatgtatgcaaacaccctagcagtataaaaaggcagaagcttatctgaaactcaccagatcacagttctgaaatagacgtggataaattttgttaaaatatttgcacattcttcatcagatttgcctaaaagcaaatctgatataacaggccccaacgcaaagcttctcttgtttaatgttaataagcaaatccgtaaagtcaagccttctatgactgtataaaagaacttcatagaagcagacaaagcaaaacaatccttatttcatttgatctcatttgaatataacagaactattgttgcttgtaagctatgagaaacaatttaatggaacgaaaaatttacttatccctttgaatctttgatttcaacctttcggttttaatttcatgttttagtacacgatccgtgatgagtactcgtgtatacatatgagaaaaattcacatcaagagaaaattaaaagcttaaaaatacacttgccttcataagttagtgcacacaatttaaagaataaacaagcccgttgaattcttcaatcttcattacgcattatattgacgctgtgatgaacaaatcatgtaactccttttctttcaacgggatcaccttcctccacatccaaatttccaccatatgaagttatgagttctcaacataattgaagacgttatagaaaatcagctccaagattatcttcaggaagcaaaagttccaccaacactgtgtacactctaactgttgacataagaatttcatttttcaaaacaccacaggacgctccaatcttgaaaacattcaattgtgtgcaacttacaccaacagttacaccttcgtacttatcatagaaaacccacaaatctaagtgtgtgccatagtttcagttctgagctaataatcactgcaatagaatccttgtaccacagcaagtttttaacagcaatttaaaaaataatctttaacagacgtgttgaacgaaataatcatttcgttactaaccttgtcactcacctccacagccacccaaaacaaagtttcctccaacgtcacactgttctctgtccaaaacaagtatccattcacagttacacactgattactactatattgactacaccactgaatattttcaactcgaacagcacaagtttggtgaaataaccaccaaaacatgcattgtttgtgtttacaaaagagtgttgaaatagaagcctatgagacaatgtggtggcatcttatgaggaagcaaagcgttttgtggttccatgattcgcttggtttgtcttgtagctgggttccaaagaaaaatggtagagctttggtccaaagaataatgaacgacacaaagtaaaccgttacataaacccacaacttgaaacccatgtcagaatctgtgacttttggaacatgaagttgtttgagcttttttcttttgacatctagcagaaataagtgatggccgcagattttgtccttccagtgaaagcgatcgaggattagaagtgtgtctcttcgatgaagcgaagaaaatggtttgagatgaaggacttgacactggtcagcaaggacttcattgatggacttttgagaatgactttgatgtttcttcttgttctaatgaataggaagaattttcatctcatttagaagagttgggtgctaaacatgagaagaaaccttttttttttttttttgaattctgaattttggattatacagtactactgtatcagctctaaagaaatactactagtactaggcttaattttacattaaaaaatttaaatgagcattgaaatcaaaagggtagaatgtgcagaagcaatttggaatttcgaggctgtcttgcaatgtgagtcatattgcagtaattggtgagttgatttcatttgatgaatgatgatggcttggtggaagtggaacaggttttaagattagatcaattggcggaaacagtgaacctaattgatctctgaatgagggatatgataagttacaagttaacgatgattatccacctcaataccatacattcaattttgtttcttaaaaatgaaataatttccatatgttctccttttctcatgcagctaggtgagtaggtgcctttttcatcttgtgagatactgattgacttgagtagaatttgaagggaaaaaaaactcactctgctctgatcacttgagataaattagattagattagtttcaatattttttttttctcaactaactcaatctaatcataatcaagttttaaatttagactatttagtcattaggttgtacacttgcacataattaactattttataaaaaaaacaagattaaaaggagagcaaagtttcatactatattatatttaataatatgtttaatgttatgcaccaacggtataaaacaattttacattgtcattcaatataaatcactatatgaattattttaaataattattttaaaaatcaatatacttatcataatggtgaattataattggatgattgtaaaaaaaattatattgttagtgtatagcccattttttcttcaattatttgtctaatttttaattttttgaaatcatatttataaaaaaaaaaaaaaagataaagataaaagtttggatgtgtgatcaagtttgattgggtcaacatgcaaatcttacctattgatatattaagcttaacacaattgatctatataaattatgaaaaacaggtggtttgaattttttatttttttatcaattaataggatctaactgctagatcctattaatatatggatctaaaaaaattcatcatcacaatagaggggatatcatccattctcctctttgtgaagaattactcaatgtcaattaaattgaaataattctagagaaaattgaacaaaatcataggacaaagactagggagctaagtaaaaatcgtttgagaatcatgtggtaaggtaacaataaaataggggcctaaaactattaattgatcaacctactttatttctcaaacataaatagtagtagttatttagttatattattctacaaaaagattcacacatttcaaaaaggaatcaattatattagcaaaacaataatatcatattccgtaaaaaaggaataatatatcaaaagtacaaatcagatgcaaatgcatgtataaatacagaccttgtctccatggaaaatatcccaaatacagtatggagtaacaatgtaacatgatcaggaagttatacttcgctaatccagatcagtttgaactcatatttcacatgtcacgaatgagcttcaattttcaaatattgcaaaagtaccaaaatttccattaatgtaccccagaaaaataactgcaaaagtacattgtactaaaatcatgataaagtgtagtagcgaaagtagctgataaagtgccctacacatacggctctttcattctatacatacgacaatttcatgtgtatctgttgtattgataaaatcctaaaatactacgactaaagctataaaagactacagaaaataacataaaactgaaatatttcattcattgattaataatattaaagagaatacatttatatagacctaagtatgtcaattaataaataataattatgcaagtgttttttttttcctttactcaaaatttaggagaaagaaatgacgtcccaattcaaacagaaaaaacctattttaacacaagtaaaataaaaattgtaatttataaaatacatatttaactccatcttacatgacccttcaatcattttattttgggcataaaatccattctatcacattgtcactgggttgtgatcaccgaacgcagcagttcgtctcctaaaatcaatctgactttgtttacccattgttctcgtgaaatattttgttcctgactccaaacagattaaatttaatcagttactgcaaatttttaccttacaaattaagcagtggataaaaaaacacaaaacacaataagaacctgaaagcaagacaattatttaatattgatcattactttgaaaatccggtagtcttttgagtaacatagacatttgtgctggtttcaaatggtttgaaacccttgccactatatcgggaaatgacacatatggtgattgaggtttccgtgccccatgtatctctggatctgcacaccaaaaccaagaaatgattaagccttgatccaagcacttgttacaaatttgaaagagaataactgcaactatgctttaatatactctttctaacatattatttattattaatttgaaattattgaacactataaaatcacaggcaagattatttaacagaagtgaaagtcataattttcaatcaatttcagtaaactactaaaaaataaaaaactacttacctcattgttcggagggtccacgctatacgcagaccataactaacgagagagatattgtactcggtcttacccttgatattcaaagagactatttcaaattcgaatatccataaccaacaaatcactaagacacaatttactactgagtaaacaataacaaaattatttaaaaaaatgaactagggaatattttatatacccttaatataattatacttgaaacttataatataatttggatgaatgtgtgtattcatataagcagtccatacaatatgtcttctaggtgctgatatatcatccaccccagtgtcatattgcttagaactaggttggctccttccctaatatcaccttgcatagtagcacatgcctaaaaccatgttcatctgccacggtacacatagcactgtgaattaaatgaacaatttcttagctctatttccacatagacataaaattagttttttttatagacaaatgttagtgtattagaatgtcagttttattagtagagtggataaaattcataacattttttttatcttttcttctttcttaaccatcaaactcaccttatatcccctctcaactctattttcacatagacataaaattggtataacaaaaatagaattggttcatagaaaacattattgcacacttgcacctacctatcaatggaaaaattggcagcaaataaaggaatagcaataccatgacactcgtctttatcaccatctcgtaatggtttcgtattcttcactccttcaacttacattaaccccttcgtaatcgagttctctattggctgctgcatgtttatttatttatttatttattccgatacaataagatgattgatatgtaagtaggctatatttgttttgtgcacttgtaacctcaatatgcgattagcaatgcatgaaagaaagggttgaatatttatgtaatttgtcatgggcatgaacctggaccaagctaaagatgtttccgtgatgaaattatatttataatttcatacccctcagtttaatggatcctctctcatgtgaaaatcttcaccattaactgataattaaaatgacataactaaaatttatttgatacgaaattaaaaaataataatactaagcaatatttttttgctgaatataatactaagtaattacaattacataaaactaaaatttgggaatttaatattgtaacataaaatttaataaattaacttagattttttagggaaaaaatactgcagaagaaaagtttgttaaaaaaaactattacaaaaacagacgtgttcaaaatgagaattttgaatttgtaatataagaatttttttaatttgtaatataagaatgaatatgttgataaatgaaaattgtgtgattccttgtcactatcaagcgtgagtgattctctacattggctttcttaaggctcaagccaaagcagtgatgataaacggtaacagcttccacattgcatttcacaatgcaaattgtgagcacctttttcttttctattatcagtcgtgaatgattttattttattttattgtttttcaccttcctagttcctacttatcaattactgaattgagttgtgaatccgttgtcaaaacaaagttgaagactcccattagatttttttcttttaattttgatgacgagttagcaatagcatccattatctggacgtctctctctctctcccagaaaaaaaaatttccttaattttttccttatgataaataaacaaaacctaattctcatcattgacaataaaaagtttcttatgatacttgaaatgattttatcatccttaataatgatgataattatatatttatcacatttaaaactatataaaaaaacatgcagtagatgtacaatttgctaatcatattaaaattacaagtttagataaatataattttactgaattttatcaacacagttgaacttgttaatcgatgaatcttaacataaaatgtcatcccgaattccattgatcctattcgatacaagttcagctatattcatctaacttactatttttgccgcccgtactatgatattatctatcatagccaggtactattgttacattaacaacaacgataaattatagttagcatgtattagatgttcttatatatatatatataagaatgtgtaagaagatgttctgagctctcataatatggaagaagattaaatggcatcataatcccattcgcacacgtatttagttcttattactaccaacgaaacatcaaaatttcacaacccaaacactgcctcagaaagacatgtacaagcatgcaaccagccaatgcatgaccaaaaatgtttgcctaaaatttgttggaatataaaatgctaagatttaaataaacgctactttcagaaaaataattagaacatttttccttcaagaacaagggcattgaagataaaatgcagataccctctttaaatgcacaccagcacaacctgcaaaactctcccttttctaagcactgggaagtagatgcctcctagattcagttatactttaatcctcatttcgactttcatccttgacaagcttgatcatgtcatcaattcgaaggatagtaatagcagcttcagtagcaaactgggaaaaaaatacaacttatcagacagctgtataagaagaagctgtatcttgaagtcaagaactgttgatatttaactcaatacatacctgaataatttttactttgctcattgcaggctcaatgactccggcctccaagttgtttctaattttcccttccgaaaggtccaaacccatactggggggaaaaagagcaaaataataacaataattagcgagatagaaaagaatgccaaagtttatcaagcatcatttcatatgtattctccattgttacttttctctaatattcattaacgtattcacatgttggaataatacctgaatctacatattatgggcagatgcacaaacttattttacctgccaaattcaacatatcctgccctatatttctccttgcacacaacacccaaataaccaaaaatatggcacatgatattgcaaaatcacgtgagtagcttcatgtcaaatggttacgaagttctgagtgagtgtgtgcataataatcatatacgatgaattaccattccaacacaggttggaagaaatactaatgtttaaaatataatggcacaacaaagataaattcaacaaacagacccgaagctaggaagaagataaatacaaaggaaacaatatagttactattactagtaagcaaataccttgataaatgtttcttatcgctttagtttgtgctgaatggtggtaggcccgtaatttcgcgaccagctcagtggcatccttagcagcattaacagaaagcacctgcaccagttaagtgacaccaacatatacattgtcagtgcttaaatgtttggaaataagaaccaatcaattaaaagtgtctcaaaagagtgaaaagaccaaatatttaaatataaagtcaaaaagtaaattgtttaccacactaaccccacatgaaagtacactagactaaaattacagaatttaattattggacgggagatgaagacaaaactcaaactttacaccatgtgttcaactaggcccaaccaccctagttatttgtaaaataagcagaagacccaaaccttaagccattaatttagcttgtaacttaccttaggaatgattaacagagactcagcaaattctgctatagccaactgctcccgagatcctaacgttgtagcaaggtactccaaataaactgataatgctgcttcaacagcacctccaccagctaccacctgaattttatatattaaaaaaacaagcacaaggaaggcaaaataaaaagacatcatttgaaaaacttaatctaaagcaacattttgatttcaaccaaagtaggattaaagctacgtatgcaggataccatatttgattcaagagttctcttgacaatggacaatgcatcatgcagagctctatccatctcatcaagcatatggtcatttgcacctcttagaatcaaagtgacctacagaagaacacagaatcaggtgataccgcaagctatccacaatgtgcaccagataataaataataaactatcagtgtccccccgtacgagcatgcgtgtgtgagaagatgatgagtaaaaaatatcatatttcttaaaaaaatatttataaatataattttaatagatatccaaaactccttgtgcttttctgtctacaaataatctacaagttaataaaaacttactgcacttgtagttttggtccctttgatcataactacagcatcatcagaaattcgctcctcaacaacctcatcagcagatccaagaaaagatggttcaaatgtttcctccccttccatatcagcaaatgttgagacctgtgtcaaagtaaaaatcaagtccaatataataaaaggaaatagtattcaaaacttctatccaaaaaagaggatactatacaagagactgatgttgcttgacaaaaaatataaactgagatattgttaacacagaagtttggcattaattcaaggaaagtcaataactattaggggaaggataaaaatgcaaattgaaatgaatagaatcgaggataatgattacttctctggttttggcattttattaactacaaattcatccctcgtggttgctaattaagacacgaagctcttcttttttgtgccagaaggtatttaattacaaaagagaaaccaaaatacgattaataaaatgccctagcaaccactatttaagtaatgatcaggcatatataaaagagaaccatcttaaaacatcaagaaacttaaaatgcaatgaaattagaaaaccattttactgccagaatgattaaaagataatgaaaataaatcccttcaccaatagagaccccgggtaagacaaagattaatttagttcaatttaaatttgacattaacaatgttcatatttcagaatgcaaaagggtttcttggatggcaagcttttaaaaatctaagattttaagcaggaaatattcagagtcatcaattgttagaatgcattgaatcagtcgcattcccaccaacccataaaaatagcaacaactagtaaaaaggagttaaaaaaagaaggaatggagccctatctaatcaacactcattatgacaaatattcagctttactgtcaacttgctaacattgcaatttaaatttataaaaagaaaaaaggaaaaaaaaggctaccaatgttgcaccagtagccttggcaacatggcgcatgtcctctttccgcacacgtcttacagcaattgccccagcctcaacaaagtactgaaacaagaataaatgtcagaacaaatgcataaattcatgacttatatgtcattcatcagtaaagaacatgtatcttgaacagagaaccacaaaatccatcaatgcaaaaggaagaaaaccagaagtcatgtttaaagatccataggcacatatgtcaaaaatttggtgtattttcatcattctgaagttagtaaggtcaggcatttattccctaaaaatggaccttggtaactgaattccacaagccacaagggttataacttcaaccttttgtaccatttggtcctcagttttaactatagtccaatacaagtaatgataccgcaatcaaaaaaaatgtataggaatgaaaagaaaattttaagtaaaaatcctatcttctgtcatgtcatgagttcctgggtgtaatgcctcatccgctaaagtattaaaaactccccatcaaacccctaatactcagcttgaatttccctaaatcgataaatccatcaaacaccaaactccaatctaagatgtgaacttcacgcacccaaacagccaccaaacaacccttgtaattgatcaggatgagtaatttatacaagggttaaaacatgacatgctcaactgtcaacagatatatattatcacataatacaaaaagataaagtcaaacactttctttgacagcctaaatgtaagatttataactaaatcctcttgctcgaagaaatatatcgaagaaacataccttaagagccatgtcatcaattcctttagttgtcagaataacattagctccagccttcagcagttttccaatgcgttcttagtcatatcggcctctctgcaattagaaaaaaaggccattagtcaaaatgtattatagatattacttttttttttttttttttttttttttttttttttttttttttttttttttttttttttttttttttttttttttttttttttttttttgtatttactttatcttgcaagatgtatggatggagaattgtcccaaacaaagcaaaagcaaattcccacaatgaaacttaacataagctggcttacaaattagaacaatagtctttataagaactacacaaatcaataactaaccataatattttgagtatttagcttaacagggctttggattgatttcatgctatcatccaagttttctatttatgcctattttatacagctcttagaatgtgggtttgggcctaactcaaccccaaaagctagctaatggggaggttgccccccacttatatattctatctttgtcttattctagccaatgagggacttgggtttttcccaataacagcttattcaataagataatagatttattctcattatatttaaggaaaatgaatccagaaagttgggtatcatagtaatatagaacccatataatcatactgacagtacctttgacgaattttctctagttccctaggatcagtaactaaaacttgaacacccaactgcatttttgtcttctgaagattgaaatcaagacaggcaattcttgcaggggcaccctaagaggcattccttgagcagcacggccagtatttagagcataaccattcatcaaaagctgtctctagcactttttccatgagctttcaagatattgattccctgaagcatgaggcacaaaagaagcaagaaattaaatcaattcaaatcctatgaacattaaagcaagtaagaagcaagattaaaatatatactacagatgttcatattgtgcaaattggcatctttcatccaaaaaagaactgaaatcacaggaattctactaccaaccttgattgggtatttaacttcaccccgagcattggtcatctttacagcttgcactgcgtctacaacctgtgtaaattgcacacataatcaattaatagtgactacttatacctacagtctacactctacagaccaaaaaaaaaaaaactgtcccaaaatagcagttagcatctttttcgcaactaatccataacttcagaaaataacccttcataatgaaaacagagtttcaaaaatcacttagaccatatcccaaaaattcaatttattgactataaaaagtctcctagaccgacaacaaagtttttttcagtttcatgtgacagcacacatactgccaaaccaaatatggtcaacaataaacaattttacacatttaaaacacagtagaaacagatgaaatcaagaaatatttgaactcctttcctctaaagcagaaagaaagtgtaaaatctagtaaggttaggagattttttattttacaaaaatcaggttttaaatgagatgaggattgaaaagaatatagctttatcaatatcaagttttcaattactaatccaactaaatattgatacaagaaacagaaaatgcatataagcttcattcaattggatatgcactagaatttgcagaagcagtagaacatggtgtgcatcaatcatgtgataaaactctcaacattctatataaagccaatgcaattacaaacataccaaactggcaaagaagtcactatcaccagctatcaactttgaggacatactggtcttggcacagttaattagtgaatcctttcccagcttttcaacctaaaagtcaagagaacaatccaactgagtaacacatgatatacaacaatttgcaaatgcattaattaatagttggacataacataacaatggtcatatggtccaaagtaggtttttcaaaatataaaacagggaaccaataaccaagagatgcaagctttcgtcctcagtcctcacatcccaaacttctttttgcattagttaatgattgtatcattgatgcaaggaagacatgaacaaaaaatatgcatacaaaataaaaaagtttattaaggagatcttaccttgacagctagtttttcttctacatatttacaagcctctcgcatagcaagctataaagaataatcatcataaagagaagttagttaaaccatgcaaattcgcaattcaaatagaagaacagaaaaattcataatggtagctacaaagattaaatatagcaatcgacaattaattaagtttaagaaattattaaaagacacttactctatatccactgataatcgaggtaggatgaatcttgttcctgacaaggtcatttgccctctgcagaaaagaacactcacactcgttagttagttacatctgagacaaacacaaagacaaacaaagtgccaaccaaatagagagcgatgcagttactttgagaagctcagcagcgacaatgacgaccgaagtagtgccgtctccgacttctcggtcctgaagctcggcgagctccaccaaaacctaaaaagcaacacatgtgagtaataaaaagcaatggaacgagaaaaaagagaaagcgaagagcgagtggagtgtggttcaccttagcagcaggatgctccacttcaagcatcttgagaatcgtggcgccgtcgttggtgatagtgacgtcgccaatgtcgtcgacgagcatctgaaacgaatcgcatcagacattgcttacttcgtctaagatctaactatgtatagagagagaaagagaaagacagagagtgagagtaccttgtcgaggccaacggggcctaaagagcttttgacgatgttggcaacggcttggcatgccacaactgcatcacagagattgaacgatgttagaaatggttgttacgtttttcattgtgaaaaaaaaggagagagagacggtaccgttttgggtgcgaacgtcttggccggactgtctatcgccggcgatgtcaggggtttgcgcaacaaccgccattgcgaagtgtgtagtagtctagggcttcagtcgcagagggttttggttttttcaacttcgcccttcctttacttttctttatgctaagctatgctttcttttccctcctcctctttatttctttctttttcactttcaactccaagtgcattttttttaattatgaaaaattaacaataataattatattttaaaatgagtttatgtagattttatcagaaaatttataataatttacagatctcaaacaactaaattaaccctcttaatgtttatcttatttatttattcttttttaacatgtaataataatttttacattgattaaaaaataaaattgcataatatattattaatatatcttgagagtaagaaatttaatgtataatgatttttttaataaggataatgatttgataggttatgatttaaaaatatatatatttaatttttctatttatatatatatatttttttttttttttaaaccaacattctgttatatacttttggacatgattttcactcaatttctcttattttacaatattaaattcttaaattacataacaaatcaagtgacaaaaattaagtttgttttttatatattatgtaatttgtataacacggattttatacattttttgttttgtttctattttataagatattttatactataatttatgttgataaaattagttaaaaaattaaatgaaaattataaagttatcaaaaattaattgaaattgaaaaattaattggtagttgaaaaataatttattaatttataatgttagtaaaatgttgttgaagtagtaataagtataaaatgatgaagtaataaaattataatttattttaaaaagataataaaaaattgaataaatatattgaggataaaaaaattagaagttgtcatttaaaaatatatttcaatagagtttcaaaaaacgttaaagttattaaaaaaatttttgtcaaaaaattttcaactagtaaaaaaataaaagttaacttaaatgttttataaacatactatatttgtcaaaactaaatgaaaaattagttgatagttaaaagtcaaagttaaaagttgttagttggaagctgaaaatatatcttattaaatttctagtattccacaaattagatattgaatattgaaaaatgacataaacataataataaattattattttgttttaaaatgtaactaggaaattagataaaatattaaggataagaataaaaaaatataaaagttagaaactagagttaacatttaaaaaatgttattttaagtagtctttaaaaaatgaaaagttactaaaaaaatttattttccaataggcaaaaaaaattcaattaataaaaaaattaaaaactaactataatttttaccatcataaccttagtcttttttctcttttttaattctataatttttagtcttcataaattttttattccatgttaatatattttgacaattttaaattatttttataaaataataatagtagatatttgttaattatgctttactaatttcttttactaaatataacttaataattacttttaaatatatattaaatattgaatgtagtacattttaatttaaagtaaatttatattgttaatgtgatatttttttaacttgtttttacttccaaacaatattgatattaataatcagagcttaatggtatgcattgtaactttttacatcgtgaatcaaccaaaaatattgttaaaataacttttaaaataattgtatcacataaaagtcaacaaattcagaatactattatgatttatagatgaacaatagtacagtataaaatattgtgtcctatcattaagtaacttatttcctcaaataatggtctggtttagctttgggtgagccaaggctcgtggatctacatttaagttaaaagatggtgatttaacgttgatccaaaataagattagaattgaagtattttcaaaacatttcaacactcattatgtgtttggtagtgttaaaaaaataaaactaatgaaataaattaaggaaaaatatttaaattaaaataatatattagaggtgtgagactcacactaaattttgaaatataagatatttttgtaaaataaatttgtgcaattctgtttcttatcagttatatatataaaactgttttatctatgttatataactaaagtagtatgattttaaagtaggtaatatttttaattctatatattttaaaaattattatacatttatctggagttataaggtggattggatcattaaagaaggagaaaagcgagtaaagataactgagtttgatttctgcttgcaaaattaacagttctacttctaacaactaatattttttttttcgaaaaaattattatttatttttatattaaaatgtgcatgaacctaaatgaaaaatatgctcttgatccttttgttttatttcttacttcgtactattattttggtagaatgactcacaacattcttatgattatgtttaaatattgaaactaaatgttatggtaacgacaaatattcttctatagtattttttatgtttttaataacttataagtccaatgaaataaatatttttgaaaaacaaattgcgtaatattgtttgttcttagttttatattaaaaaaattgaatttagccatgttatataattgaagtagcatgattttaaaatagctaaacatgtctaactctatatatttttaagttattatttgtttatgttgtatatatttttatttttatattaaaatgtccatggagaaaaaataaaataaatgtttgataatttttttcttgtttcatattaattattataattatctgaatgtgaatcactcataaattttggtacgtacgtagaatcacccacaatattattaatttattatgattatatgatataaatgttatgttcacgagaaatattctatagtatatttttcttttgttaataacttataagtctaatgaaataaaatatttttgaaaaataaattcgtgtaatatttttcttctcattttttatatataaaaaactgaatttaactttattattatataattaaagtagcatatttcaaggtaggtaaacatttgtaattctatatattttttaagttatgtttcatatattttaatttatttatttttatattaaaacgtccatagccaaaaataaaaaataaatgtttgatgatgttttttgtttcttacttcatattaattacctaaatgtgaatcacttacaattttattttggtagaatcactcctaacattatttatgagtatatgctataaatattggaactgaatgtccacaagaaatattatgtatatataaaaaaaaattgaatttaactatgttatatatttaaagtgcataattttaaagtaggtaaacattttgtaattatatatatatatatatttaaattattatttatttatttatcttgtatatattttaatttgtttattttatattaaaacgttcatataaaaaaaatgaaaaataaatgggattcaaaggtagagttatgaaagttactttagtatttgtaagtttgtttgttttttttttttttttttttttttgcatttgtctcatagagacccatctagcctgccaactgcgaagcacaagatctttaaggatatataagtaatgcaagttatctcatacaatgatttgacatatatcactattcccctttctctggtaaagaacattatcaagatgttctaatatgtcaataccacattatcaaaatgtttaatacgtctttcttgaatttttttcctattaagattaactgcaaaaacattactggttctctttaacctcaagcacattccaaataacttagttccaaatacacacattactacaaacttttagtcccaaaccttcaaacacaacaaaccataaaataatacaatccaagctattttttatcgagtttcttgcaataaactaaagaaagacaaataaacatttatttttcacattcaacaggaattcttacacgcatgaaagaaaatatctaagaaaaatactcattagaggcagcaaagatgggttgcaatcgctgataccctcgttgtttgtccactccaactcatcccaccactcttgctgccctttaatggactttaagttgactgcattgtcactgtctagtggtaaagttttcaaattaggacagttatgtatccttaacagctccaaagaggaccaagccaatgtatgagttgagcatatagttttgaagttaggcaagttaaccagcagaagtatttctagttttggaagcacatccctttctctttcaatgttttctcctataagtacttcaatttttgaacaatcttcaagttttagattttgaagttctgaaaaatgttgaattgctccattgctgaaaatgtcactgagtgatggacaattcttcaatgacaaaatttgtaatttggaaaaggttccactgtgcaagggacctctaaaaacacatcttaaattgagcaaattttccaaatataattgctccaaatttggtaagatgactcttgtttctatttggattccattcatggtgttgctacttgtatcggctgacacaattgataaaactttgttacatcttgtaatcaaaagaccacgaatgcgttccaaacacactatgccagcaaaatttgtcaatttttttatatcttgatggcaaactaattcaaatgcatcagtttttggtagtacctcaataattgccgagtcatccttctgtccaccattgcagtacctcaaataattagtaattttatactcaaaagattcaagtatttgaggtgccttgtgttttggcatcccacaaaaatctaaatgaatttagctgcttacaactccatgatttacttcttgaaagaaattctccaagaatgattgaggagggaaaacaacatatgagatgtgctacattttccagagaagccacatgttgtaaacaattcagcatcatgcaccattgttcataggatatgacttgaatggttaattcttccaacctatgcagctttgaaatcacatgaacattttgagcttcattatcttcacttgcaatgaatgggattcgcaggcatcttagattaatcaaacatccaatttgtagaggtatgaatgttactttagtatctcgtatgtcaaggacctctagaaattgaagtgatccaatttcagatgataatgattccaagagctcgcaattgttcaagaataaactccgcagacaagtcaattttgataaagacgatggcagttgtgtaatcatgctattatacaagtctaacagaagtagactgctcatgttctcaaaaaagttcgtggtattgtagttagttttggattttttctcagcaacaatgtcaaaatcatgctgcaatcttggcttgttggaaaatcaagcagttgtctcatagagacccacctagccttctgccaagctcttgaatttgagagattttcagattctccaccatcttggaggtaaaagctacattcaggatctttagaggatatgtgtaatgcaagttgtctcatacaatgattcatgttgacatatatcattgattcccctttctctagtaaagagacattagcaagatgttctaatatgtcaataccacaattgcgtgcactttgatatgaccttttgtcatttatatcaccgagtaaaccttgtgctgcccaacactccactaaataatcagtgtaaaccttgctatttgcaggatacagtgaagtgtataaaaaacatttctgctttttttatctttgagttcatcataacagaatttcaggcatgagtacaactcttctaaaccttgattttcaagttctggccaaggtttaagatcttcaagtcccaccgaccaacttgaagcagactctttcaatttaaaagaatttgctatattgtaaatgagaagtggaagacgagagcaccttttgcatacaagtttggcgataggttgaatgtcaagggaatcaatattaggataaaggcatgaacagtatctctgaacatcttccatgcttcctcaggagataactccatgactttgatgaccctctgcaccttattcaacttataaactcgagggagtcgagtggcaattaccaccttactgccattgttgacatcactaggaattcccaactgctccaaattgatggcatcctcaacctcatccaaaatcaataaatacttcttcttttctagctctttgtgtattcttcttgcaacatcatcgctatgctccttgtcggtttctatgtccagtatcaaccgatcaacaattttctcttgaagcttatgatcatcagctgtggctttcacaaaaatgacaatttcaaacagtttagcaacctcttcattgttgttgaggttctgcattattgttgttttccccaccccttttgttccacacactccaacgactttaatcttattattttttagcaaacccagcatgttttccaaggcaccttgaagggttggatatccacttatctgtgggacatttaactcctttaagacaggctctggtggtttatcaacaagaaaatctcttaaacattcatccttcttaagttcacgaacacagttgcactcttctccatctcttcactcagatgtgaacgtcgttgaatacgccaccagggtagcattttctcttcgtatttagctttcagcttctgcacttcttctgcagcatctgataccctgtttgtccacagtttgtaagcattagtggtatctttgtggttgtttctttgaacctccctctctttatccttctttattgcaagtagcatctccatctctttgagcagaatgttgtagttgtcatcaaggtttctggaagacgcaattttagatgcaattgtagtatgtaattctccaaccccatgcgctcctacctctccaacaagaggggcacaacctcaagcccagacattatgaaacttcaaagcctacaatacgttaacaaagaaaataaaataaaggttatattcatataatacaccaaatcaacgtatagaaattctagacatcagcggtatagaattttgaagcatacacaaacataggcgctttattcaatatgatatgtatgtaacacccaaagccaaaacttcagtatgtaaaaactaatgattcaacctttagtaacacacttgatcattatttatcttttctgtttgacagtaaaaacattttaaatatagacaattacaataaatcttaaattctaaagcaatcattaagaaacacaaaaaaaaaaaaattatatatatatttatatagtatatataaaccttgagactagaagtagcaccatttaaaagtagtaacttattgaaactcggacggatccaggaatgcatagggacggggggggggggggggacgatttttttttcttacacaattatttaattatttaattctaataaataatatgtaataaataaaaaagtttcacaaatatttattattaattttatgcgtaaaaagaataaatatacttctagaaaataaacaaacattaactcaatactcgatttttttattcattttttattaaaatattttctttttcttgtttctcaatccgtccctattgaaactgatatacaaaatgattggaatgtatgtgagggggaatcaggagcaagagttaagtaagaaagattcatgtgtacctctgctgctaactgttaagaattgagatccatctcaagggtgagtgaggaatcagaagaacagctaagaaagattcatgcatatctacctctgccagcagctcttgtgcacagatttgcaaaatgatgggtaagtcaacgcatgagcagctccaaattgagtctctggtgtccttgttcaatactagtggaggacaggcaccaaccaaataaatactactgattaagatacatttgattattctaggtctgtttaatctataacatctacatttttaaaaaatatacttttgactacaaaattaaaaagaatatttataaatatattcttcatatcattttacatttattattagttaattcaataaatacttttatctaacgtttctaattaaatgatctactttaacaactttgatttcaaataatttgtcatctttaagccatttttttttaccaaatataatatatctgtttgataagtcatttcaaataattaagaacttatttaatttataagtttgttctaccttaatgactttcaagttttagtttaaaaaatcacttttaagcattgcgttaacttagaatttttttgtcagatatagtttcaaagctattgaatatgaaatatttagtaaaattatctaataaactaattattccatatatatgttatcagcgtgtgtataattaaaatgtaatagatttagatagatatggattatttagtattattaggtataccatattttataaaaaaattaaaagagaaaaaattaaatatacaaatataatttgttgaaaatacgagttttattaattaggaaggagtaaaataaaatcatttttggaaattagcagacaaaataaaaagacaacaatcataaaacttttgtgttataagttatatatttggaaattattgtattttagagaaagatgaaaacaaaaatagaagacaataaattaattattccttaattagttgaaagtgatatacagaatcaaactacttaagacttaagaggttagaattgagatccattcaaggtgagtgaggaatcaaaacaatagttaagaaagatttatgatatgactgtgtacctctgcgagtgcgagcagccgtagccgacagatttcttcacccattttgcaaaatgatcgatcaagtgtttgattatcgcttgctctgttttttcacaatggattcaagtcaacgcgtttatcacttggtgtgtggtgtcggctcgataccatccttataatactaatataggaaaaaaagtaaagataaatgctattgcctattgatgattttttaaaggcaaatagtattgattatattaaattaaaaatatgtatacaattacttttacattttaattcaatataatttttatcatattattatacaaatatctattaattttttataactaatcttcataaaaaaaaatctatctaatcacatctttacaagattcaaaatgaatattttgtttactagtcaaactaaagagacttatcaaatacatttgattatatacgtgaaatatatgattaaaataaatatatttaaaaaagatgaatttattttattatttaatgtgttaaataaaattgatctttttttatactgtgtttaaatataattttatttttcaataaattgatctgtataaaaatacatctttttatattttaatttatcatcagttaataacgaattttaccaagggtctattgccattatcaactgaaaaagtaacttttttttttttttaatgaaaggggctaaaaccccaaggaaaaaacactaaagccactaggaaagatcatggaaatagcatatgctaaaatataacatgtgaccctccgtagtattgacataatttcattaatttgctagcaaatccacaacttgattggcctcgtgtaaggtatgagaaccggaccaactgaaaagctaacaataaatgaaaattaagcagagttgaatatagtgtttgacaagtaattacaagtaactagttatattcctcatgaaaattcctttcatctaaaacatagagtaacagaatcacagagagtcagagacagtattgattcttacgatattcttttagtaatttttttttataaaaaaagaccaagacacgtaatgatattgcaaaacgattattatctaaagaatatttgtttctattttgctaaatcaaacattaagtgaaaacgaagatgtttacagccaaggctaaggcatataaataactctgtttaacaattagcaatagcatgtactcgaatataaacataatccaaaagaaatttactactaagattgtaatatatgaaccagaaagttgtaattgcatccttcctttcctaacccatgcgatatttaattaattctgatctaatattgttaacatcctctgcctcatggagtagggcttcaagctctgcgacctttcttttattttttgatgaggtctctgcttcggttttctattgataagacagcagtcatgccattttttgaaacaagacacgacagaaaaattttaagatggaacattcacatgaaatatgaaaaacaaaacaaaataaacgcacacaaagtgaagcataatttaatatgtatgcatctaactagcaagtaaataacttattctgttagaactgggagaaagtgacaagattcaagaaagaaatcaagaacagaaatatctaattagtaatatcctcaccggaaacataacacaaatactagaagagacgagtacgtttagtgataatggaatggcatgtacgttcctattaccttgtgtcgcaaatttatatctatgttgtttcttttttctttttatgccttatctgatttgatttgtttcgcatgcatgtgttatatactttgattatttagttatatttatattgaattgaatcgaattgtatttttattttatatttgtttcaaataattttttatctaaaaattgaatcaaacttcactgcaaacactcctatccggctctttgcatgatgcagaccccaacgacaacattgcttatagagttatagtttcgttactaacttggtatatcctttggtaactagtttttttatctttgcatcaacggagcttttaatgttgagtgaggattataaaagttattatatttaatttatatcttttgaaaatgattttttataaatgaatatattcgatagagttttaacaaaaatctttagaattattcatatttctataaacatttaactatttaattcactgtctttaatagagcaaattttgtttcttttttttagttaaaaattataatttcttaattaaattatttttatcacatataaaaatatgacttttgttatcttttagcacaataagacaatacaattttaactaattatataaaaaatattattttatatcatataagaaataatagtattagttttttttaaatcatgttttacaatttattttaagtaatctgtattttacaacaaaatttagtctaaaaataaattcaaatttgctaggcccggtccgattttgaaaaagaaaaaaaaggaatgacaaataaaacaaatgtaaaataaaggaataagaaaatgggattaaaaaatccaaacccatgcaacgtgaaagaaaaaagaaaaaagtgtctttacctttcaacatacaattttaaccctagtaaacttgactatttttatggaccgtttgcaaggagagaaattttttaatttttcaaaaaccataggataagaaacttgattttccatatttgatatacattttagaaaaataacctcgaaaaatgatatttcttgaaaatgttttttaatcaattttttatgaaattttttaatgatagagctgaaaatcttacttttttcaagtttaatttttgtctgttataaaaaaataccatattattttttattaaattataatgtaataataattaaaattattaataaaaatatgtataactttttaatttctaaaaatcttatataaaaattattaatgttgaatcaaataaattttatttattaccaaacagattcctaagaatcataatatccggaacctcaaataaccccgtaactaagaatgatgaatgtttcatcattccaactccagcatttcatttcatccacgttttgtttacggaacagcttgtgaatatcttcattttcattgatgtccatctcttgtcggacacctcctaaaccaactatttttctcctccatcgtagcacaatcttgtccaagattcgaactgccagtgcccatatagattgtaatggcccctcacatgagcctgcccaaataaattagaaataactaaggttgaatatcaaagcatgcaggtgcatgcgtagtgttctgatgtttgtgaatagctagaaaagatgctggtaatttaagttggatcaagctctttcttaaggtatttatatagaagaaatatcttcagaagtcgatcattatgtacaaagtgatatttaatcagtgaggtgaagtgtgtgaacagtgtcaataaaataaaagagaacgagaatatgtatattttttcctctgcaagtatcccttgtttataatgtacttaattcatggttagttgtggatttcacttaaggtcaacagtccactattcttcattgtaccttatcactaaacacttttaaaattcgtaacagataacttgtctataatcaactgtttttttgtttataaaaaaatcaaatctctctatatattcactttcagggtatctttaagtgctagctatatataaattaagaataatatctttttttttatcagccaaaatgataatatattaagaataatatccatgtagcagtagctcttggaatttattttgttctagtcaaactatgaagttaacatctgttacctgttccttggctactttttgattttggcgcaatgcaaagaaatctttgcgacctccatatatcttccgaatcaataaagcgactggcacgaggctagtgtcttgcgcgacgaatagcggataactattactcgtatttgcccgctctgttatcattgcaaatttacataattgggtaattttttaaaaatagatagtttttgaaaatattgtataatattaataattcgtgtttaaaataaaattttctaaaaattgtattttaatacacaactttaaaattataatttatttaaaaaatactaatgtcatgattcaaatacgacttcaatattttatatttttctaaaaaaaaatagtaaaattgtattttaaattactacttttaatattttattttttaaaaatattaaaatgatatctaaaataaaactttagtatttttttaaaaaattataccgttctaaaatatgttttaaaatatgactttttttataggaaattgtgttttaaaatagacttatcatatgtataatattttcaaaatctattaattttgtaatttttttaaaattaccccatgtaaatttgttgctatcatccctactcattaattagacttcgtatcaaatggaaataaacttttccaatctcctaatttgaaaataaataatgggcaaatatgaaatatgagtttcccaaaaataaaatatatgcaatataattatcttgttacctcctaacaaatgtggcgatattttttgcaaactcatattcccataaataaataaattgtgaaataagtattccctaatttgataatcttataagtttttattccttgtactttttgagacttgatttggttttttaaattttattttgtttatgattttaattatttttatttattttagatattaagtgatgatatgatatttattttattattattttaatttatattaaatatatttttatatttgaattttttttagtcctacaaattatatttgttttgttttttttatctttgaaattttagataatatttttatggttcaaaatattatttaaaatactttaaaaactaaaaataaaacaaacataaatgattaaaaaaacaattgtacaagaataaaaagataaaaaaggataaattataagtaaaagaatggattcaaatttttagttattacgttttctgacggccaaaaacgaacagaaattgaacgaccgaaaattttaaattatttcttttttccactttggccagagtcattttctctgctcctatcccctccgacagcggcctcttcacgcacaccgagttgagttaatgaagagaaagcggaagcggtggggatggctttgaagagagatgttcaatgccagggtcatcctcttcggtgacgtcgacgtcggcgaccaaacctccagatctggtttcactacattcaattccctaatcacgtcattgtcctctgcggtggcaactgaaagtccccaaaaactgatcgagatgctgggaaaaacgaggaaagtttcggtgcgtggcaaatctgtgacagctaactacgcctttgcttcttacacgcatcaccaccaccaggggctaccctcccttgaacaagtttcagaagaagttcaccgagctcctgaggtgaacaaggaagacaacttttttttttgtgacgaaaaaaaaaaagttacagctgtcaagttttctggaacaagcaaatttcacataggtttggattgcaggccaaaaagtcacaatataaatttacgaggacgaataacagataaaattttataaagattaaaaatgaactttgagcattttgtatagacaaaaaacatattttaagtcaattaataatttctggtttttataattttatattaatttatcatgaatacttttgatccccccacccctctcttcaaacatccaaaaatcatttttttcactacattttgatggtaaaatcatttaacccaatttcccccacttttttgccttgtaatggaggtattttttgtcttgttatgtaggcaacctttgatgatgacgatgattcaacaagagattacatgcattgtaacaatctttaattaacattcattggatactagcttgatgttttgtatgttccaagtttagtggattaccagtaacattttttggatgaaatgtatttataacttgaagattgatcactagtctttttgttcaaacttgcctcatccccgctcttaatgatcaaattctgttctttggtgcatgtatgtcttccttggtacgttatctcaattattgctgggttttcgtctaacctttgaacttgtttttttgctaggcacccttgtacagatccatatgcgcatttgtaatatcctctgcaatgcaaacgactagttttgtcaatttttcggcaaaactagaaaataacttctttttatgttcttaatataaagattaggctggcaacttagtatggtacgaacatcaaataaaaatattaatagaaacccctcttgttttaagccttgataaggaagttggagaagaaacctacattctctttttagttgctgtgaatgttatagtatagttatgtccaaaaaaaagaatgagatgttatctggagtttgtggttgttctcggttttaaattttcgtaaaggtagttgtcaaatgaacaagtttttgtcgagaatgtcaataacaagtttccaacagaaagcactaatttgggcccatttgaaaccagctgacatggtcctttagttaatttttcaaattgcaagtcattttgaaaacactgggggcatagaaccattaaaacaaggaaagagaactcattgtacatgcatattttattttccccattacgctcattagctaattggctactgattttccagttaccaggcctaaggcctctggtattaactaaacgagaggggtgaaacttgtacgtcaataacctagagggggtgaacctttctgtcacattctaatcaaatgcaattatataaacttatactacgaaaaaaattgctaattaaacttgtttaatttataacaataaaaagttaaatgagaatagaggttttaactaaccttgaaaacttagctccaagaatctcttttgcccatattttatccaattatatccatcatctaaacacccttcacattaacgcttaaaatatctttaatattagatcttggagatagattaagatctaacatttccaaattcagcaataaaaaactatcaaaaaatataaaatctcaaaatcgagaaatggagatcaagcttggagatagatcttaagctgaagatctaacatttcccaaattcagcaataaaaaactatcaaaaaaatataacatcttcaaaatcgagaacatggagatcttgatctccatgttgaaaatccagttcttcaggaaaaaatgtgtatatctgcacagattccaaataaaaaattattcatcaacaacattaacaataaaacgcagaggtaacagattcgttggaatgaagtaaaaacacaacaaatataaatgaagaagaagaaaaacaaacaacgcattggaaaaaaaaacatatcaggtgaagggggctcgcgtgtgtggaggaaaagggaggtgggggttgcgcacgcggaggagaaggagaaggtggagccgcaacaaagaaggaagaagaggaagaagaaaaagtggaataacagaggagagagggaggaggaaaaaagaagaaaagatagttttggaagttgaagaagtgaaaagaggagagagggaggagagaaaaaagtgaatagtgaaggaaaaaatggaaaaaaaaactaaaaatatatttaaatatttaaaagtgaaattcacgtgcaatccattagaagttatataagatttcaaaaaatatctcttaagatattttttaatatacaataaaagtagactaaggtattctgtagaacttgaaattcctattgaatattaaatgaaataatttctttgtgtaccgtgtttagcatctaaatgttttaagtttttaattaatgagtttttcagcacttattatatcttttcagcaaacacattcgacgtataatttacaggtttatcaaacatgctctaatgtaagtaaaactgtgatataagaaaacaaaagcaatcaatcacgaacgtgaaagcatctcaacctgtctattactttttgatgcatttgtaatatttttggctagtaacgactttcgctttggcttcatgtttcactgtttgaactactaccacagatgaactgggctaaaggtgacaacagtatttcaaagatgatcatgtgtagaacttgaaattccctgaaaggaaaacattcaagtaatacatacgaaaaatgaagctaagagggtatgatcatatagcaaaagcaattcatacagagatacaaaattatataattataacactagctcatatgacccatggttggagtttgatgagtagggagataaatatgaacagacttgtttatttaaatctccaaaattaagtatgatcataaagtgcaggaaaaaaaattgccacaatttttaaagcaccaagaagaattgttgtgaagttaattttgttttgacataaaaagatgtcattaagaaagagatatacaaaaataggaagatatcctacacatgaaaacttatcatagttattaatctcacatagaagtacatagctttaaacactatagcaggaagcacgatggtcattttttaaatattataatgcaagctaaatagtttatactacatatatattaaaaataagaaagaaaaaaatccaaaattaaagaaattcatgataaatattatttttttaaaataatataatatattttaaaataataatatataatgcaagcacgatggtcattttttttaaatattatattttgggtggttcggctctggattgggctccggattcgattcccggctagggttcaacatcaacaatatattttaaatattatttttattttagtaatgcaaatttgcaagacaagtttttttattcaaacttgcctcatcccaatctcaatgatcaaattctgttctttggtgcatgtatgtcttcctcggtaggttatctcaaatgttgttgggtcgtctaacctttgaacttgttttgttgctcggcaccttgtcattctatatgtgcatttgtaatattctctgcaatgcaaaccactagttgtcaatttttcggcaaaactagaaaacaacttttttatgttcttaatataaacattagactggcaaagttagtatggtacgaacatcaaataaaaatattaatagaaatccctcttgttttaagccttgataaggaagttggagaagaaacctacattctcttttagttgctgtgaatgttatactatagtctatgtccaaaaataaagaatgagatgttatctggagtttgtggttgttctcggttttaaattttgtaaaggtagttgtcaaatgaacaagtttttgtcgagaatgtcaataacaagtttccaacagaagcactaatttgggcccatttgaaaccagctgacatggtcctttagataatttttcaaattgcaggtcattttgaaaaactgggggcatagaaccattaaaacaaggaaagagaactcattatacatgcatattttattttccccattcattagctaattggttactgattttccagttaccaggcctaaggcctctggtattaactaaacgagaggggtgaaccttgtatgtcaataacctagaggggtgaacctttctgtcccattcaaatcaaatgccatttatatgaacttatactacgaaaaaatttgctaattaaacttgattaatttataacaagaaaaagttaaatgaaaaatagcttttaactaaccttggaaacttagctccaaggatatcttttgcccatattttctccagctacgtccatcatcaaaacaaccttccgcattgacacttatcttttctctccaaacttcagtttgaactgttcttagtttacgaacctgttaattgccatgccaaaatataaaaaccacaatagtcttttattcaacatgttaggttcgtgaaatttatttttgtttaactaaagactatagagacaccgcctacggacacatcttcacattggaactcagcaacagtatttgatctcgattcatgaataaaaccatcatcatcatttttcagttggggaagtagcttacattgtgttgaagctaaagatcgatttgcaatatagagaatatctaccttctgaatcttttgtggtataattgatgcatagtaaaattagagaacaaacaatttcaagttgcaggcgtataactccctacttatatgaccatgcatcatagcttcattggaatgagacatttccaaagtgatgttttccttttcttttctttttttcgtgacagcaatgaataacttaagttgctgataaagagtaagcaaattccactaaaaatggagagaatccgtctgttagcactttcagacccctctaagattcacttctaactagggctgtggcaaccaaaaggccatggccagttaagtagttacgtttagccttaaaaaatttatactttttgaaaaatatttattattaatttgaattattaggtgataaattttataatgacatatattactatttttattattaagactgtaattttaagattgtattaattgaacaattgaaaactttagatgaagatatggattgaaaatacttttaagttctactaagaattataatattgaaaatcttgatttatttattgcaacaaggatagacaaaaaaaattcatatttcactaaaaacattatttatttaaaaaattgtatttttctttcaaatacatgcattgtttctaatattattaataatacttgtaaatattattattattattaaaagtagttttttaaactaaaaatactcaaatcttttttaacatactaaaaatcttatttgatatactaaaatcttatttgatattgaaataatttgaatgattttgtcattttatatattgacaataaaatgctagaaatactttacactttctataaaactttgatcaataatttcgtaattgataaaaaaataaaataaagtatgacaaatattaaagaaaaatacagaagagtaagcaaattataatattgaaaatcttgatttatttttaaaataaagatattgcaagaagtatagaaaaagaaattcatatttcactaaaaatattgtatttttctttcaaatacatgcattatttctaatattattaataaactagtaattcttattattattgaaagtagtttttaaaactaaaattactcaaatctttttatgttacatactaaaatcttatttgatattaactatgttacgaaataatttgaatgactttgtcattttatatattgacaataaaatgctagaaatactttatacttacttataaaactttgatcaatgatttcgtaattgataaaaaataaataaaaatttgacaaatattaaattaaatgttaaagaaaattatagaagagagcacaaaacagagagatgaaggatctgtattagagagatgaacaatccaaggacagaacagtaaacagagcacggcagcaaaggtcgcggttggccagaaacagtgacaggttcgccagaaaatggccataaaggtcaggaatgaccggaaactatggagaatagaggctgcagaggttggggatggcaaaaaactcacagaaggcccgaaaatgcagggaaatgccaaaaatgttgccagaaaaggtgtgtattggtgggaaaaggataacaatgtcataacagtgtgtacaagtgattgagaaagcagagtttcagttgtgattcaaagaagggggcaaaatcattgcccactaaaacaccctaaatttaatggttaaattaaaataggtttttttgtgatccactccaataaagcctgctccaggagcaatttcagctattttgctagatatggcagctgtgatggtcgctacttcaaactgatacacttttcaattttcatagcatgctctagccgctctgcaatgcaattctgcgctagcaccactatttgttgctattggcaactagtcatatgaaaactgaaaataattctttacgtgaaatatgttgaatacattcagcacattgctgatactgaatgaataaagcagcaactacatcctatctgaataattaaatgacaataatttcctttggtgtcaccgtgtttagcatctaaatgttttaagttttcttaattaaatgagtttttcagcacttaaaattataatcttttcaagcaaaacacattcgacgtataattttacaggtttatcaaacatgcctctaatgtaagtaaaccaactcgtgcatataagaaaaccaaaagcaatcaatcacgaacggtgacaaggcatctcaaacctgctctattaccttttttgatgcatcttgtaatatttttggctcagtaacgactttccgcttttgggcttcactgtttgaactacccctacccacagatgaaactggggctaaaggtgacaaaacaggtatttccaaagatgactttgctatcgactgtgtagaacttgaaattccctgaaaggaaaacattcaagtaatacagtacgaaaaatgaagctaagagggtatgatcatattagcaaaagcaattcatatagagatacaaaattattataattataacactagctcagtatgacccatggttggagtttgatgagtagggagataaatatgaacagacttgtttatttaaatctccaaacataattaagtatgatcataaagtgcaggaaaaaagatttgtcacaatttttaaagcaccaagaagaattgttgtgaagttaattttgttttgacataaaaatatgttcattaagaaaaagatatacaaaaataggaagatatcctacacatgaaaactaatcatagttattaatctcacatagaagtacatagcttaaaacactatagcaggaagcaggatggtcattttttaaaatattataatgcaagctaaatagtttatactacatatatattaaaatcaagaaagaaaaaatccaaaattaaagaaattcatgataaatagtcacattttatgcacagagtcactatcaatctgagaacaaaaaaagcatagtaatagtaatgaagtaaaagaaatgaaggatgatagtaaaattaatagaaaaagaacataacgagttatatttttcaaaaatgcattaatgtattattttaggtatgttgctaacttttgttttttcctttccctatctatttatctttcaaaaacactgttcagattgaccttgcttttggggcctccaagatcaggaaaaactacactgctgcaagcacttgctgggaaactggacagggatttaagggttggccatcctcttgctccatttttaaggaacgatgcaatgatatcttcctacatatattttttcattaaatgataattttgcatgatttaggacttgcttttaactaaccaaaaaaaacccttcaatatttctccacatttggtgtgtcagtcagtgtcagtacgtataaaatagtgatacttcacgtgttaagtgaatttaaaaaacttatcatcatgtcagacagcatatatttccaatcatatctgtcatatgctaatgctttgaagtgctcactcgctgcttttgagttcaactcattccaatcatgatcatgttaggaatatggtgaattggagtgttcattcttctatctttttctcagttgcgcattatttctagtatggtgaatatgattcattttccattattgtgattatagattgtacttctcacctaaggatcatagacaaggaagttcagtaaaatgaacaacataaaactggtaattcttattattattgaaagtagtttttaaaactaaaattactcaaatcttttttatgttacatactaaaatcttatttgatattaactatgttacgaaataatttgaatgactttgtcattttatatattgacaataaaatgctagaaatactttatactttcttataaaactttgatcaatgatttcgtaattgataaaaataaaaataaaaatttgacaaatattaaattaaatgttaaagtaaattatagaagagagcacaaaacagagagatgaaggatctgtattagagagatgaacaatccaaggacagaacagtgaacagagcacggcagcaaaggtcgcggttggccagaaacagtgacaggttctccagaaaatggccataaaggtcaggaaagaccggaaactatggagaatagaggctgcagaggttggggatggcaaaaaactcacagaaggcccgaaaatgcagggaaatgccaaaaatgttgccagaaaagagtgtgtattggtgggaaaaggataacaatgtcatcacagtgtgtgcaagtgattgagaaagcagagtttcagttgtgattcaaagaagagggcaaaatcattgcccactaaaacaccctaaataaagttgtttaatggttaaattaaaataggtttttttgtgacccactccaataaagcctgctccaggagcaatttcagcaattttgctagatacggcagctgtgatggtcgctacttcaaactgatacacttttcaattttcatagcatgctctagccgctctgcaatgcaattctgcgctagcaccactatttgttgctattggcaactagtcatatgaaaactgaaaataattctttacgtgaaatatgttgaatacattcagcacattgctgatactgaatgaataaagcagcaactacatcctatctgaataattaaatgacaataatttcctttggtgtcaccgtgtttagcatctaaatgttttaagttttcttaattaaatgagtttttcagcaattaaaattataatcttttcaagcaaaacacattcgacgtataattttacaggtttatcaaacatgcctctaatgtaagtaaaccaactcgtgcatataagaaaaccaaaagcaatcaatcacgaaaggtgacaaggcatctcaaacctgctttattaccttttttgatgcatcttgtaatatttttggttcagtaacgactttccgcttttgggcttcactgtttgaactaaacctacccacagatgaaactggggctaaaggtgacaaaacaggtatttccaaagatgactttgctatcgaatgtgtagaacttgaaattccctgaaaggaaaacattcaagtaatacagtacgaaaaatgaagctaagagggtatgatcatattagcaaaagcaattcatacagagatacaaaattattataattataacactagctcagtatgacccatggttggagtttgatgagtagggagataaatatgaatagacttgtttatttaaatctccaaacataattaagtatgatcataaagtgcaggaaaaaaaatttgccacaatttttaaagcaccaagaagaattgttgtgaagttaattttgtttgacataaaaatatgttcattaagaaagagatatacaaaaataggaagatatcctacacatgaaaactaatcatagttattaatctcacatagaagtacatagcttaaaacactatagcaggaagcaggatgggcattttttaaaatattataatgcaagctaaatagtttatactacatatatattaaaatcaagaaagaaaaaaaatccaaaattaaagaaattcatgataaatagtcacattttatgctcagagtcactatcaatctgagaacaaaaaaagcatagtaatagtaatgaagtaaaagaaatgaaagatgatagtgaaattaatagaaaaagaacataacgagttatacaaaaattagcaaaaatttgaaaataccaacatgccaataacaccatgaaatttgaaaagaggataactaaaaattacctgatacgtcgtattgtgatattcatttagttgagtctcttgaagtgcagctagctggttcatcatgtcagcctcctcgttaattggtgaaaaaattcgctcaaaataattgggtcgaccagcatctccccactctgctacattccatttcaattcttcccaccagatgctttctcctttgatgatcttcaaagatttgcttgacaactctgatttggaaagactttggagttttgggcaataataaaatatcatttcttctataaaaggtccaacatgcatgccattaaaaatgttgaccaattcaggaagatagagaagcgatatcattctcaacttggggaggaaaaacactggatattgttctggtgtggcatgacttatcagggtggttacttttggacagtcttcaacaataatctcctccagaaaggaaaggtttttaacagaatctaaggtgaatatggtagttaacatggggcaagtgtgtaatgctatagactttaagcagagaaagaagggactactcccttcgcagacgcttcttaaattcttcatatagaatacactcaaaaacttcaacattagagaagctggcctatcaggtgaattgcttccactgacaattgtttccatttcattacactctgccaatatgcatacttccaactcccataaattcctcaaatcgaaatcagagagactcttgatggtcatatgtcggtctaggtacaaggctttggagcgcccaagatgcattttcactccatttggaacattcacaccattaacaaactttatgctatagtcacagtgtttaaattttgtctccagttcaggtggtacacgcgatatcaaacgtcgcatatgttgaccaacaaccaatctgaaactgagagatttttgggctggtatgactttcaagaagtcagcctctgggacatatatactcaacctctgcaaattacataatccataacaaatttccgccaagacactaataacattcacattccatcgctcatcttcagggtcaacgttgatgcttaaatacttcaattgagtaagatttgatatcaatcctggaggaataattgttgacttggaagttccatcaaagcagaggcttaagctttgaaggttgatcaattctcggatctctattggcagatgggtgatcaaagtcccatcaagatcaagctctttgagattctttagctgtccaatctgatgtggtagttccatgaagagatcacagcctctaagataaaatttctgaagttgtattaatttagagacagaagggggtaaatcccttatactagtgtaggataagtccaagtgttgaagtaggggcatgtggttgaaaaatgagtcagggatatccatcaaatcaacattgccctgcaacaacaacactttgagtttagggcaatctggtgattgtggtaattcacatattttattgtccatcaattctatctgaataagactatgccatcgtccaatgtagggtggctctgtcaatcctaatgcaccatgccttaggatggaaggctttgaggtgtgcaatgattgtattatatcataggtttctactggcaaatagacatctccactttcatatttcaacaagacaaaacggtcttgaagctcattgatgtaatgttgtaattgccttctgtattcaccaagttcttgtgtgtatcctaatattgtcttagcccaatcagacaccaagatatcatctctcacgccatttttaatgttgtgaacaggcaaactgagttcaaggcaaagcttttgtgcatcaccaatgtcttcccaaataatatttacgaatgcattgaccatgactctactaatgccaattcgatcactatcttgataatcataggaaggattcagactgcttaatttgtcaagtgcaagttcccactgtttaaaatcttgcacatacgtaagatactttgccacaaggacaatggcaagaagatgaccgtggcattccttaactatttccactgcaattttctgaatggccattgatgaacgtaccatgctactgctgatacaactgccacatagctgcagaagactttccaaggcaatagatgatcctgggtccaaatattcaaatccattgtgcatgcaattctaaagtcaacatccttctctgcttgtgttgacggctcagttgttatcaacaccacaattccagttggaaaacgcaacttttggaggtccagcttgttgttgctatctgcatccactacaattaccaactgcccattgcttcccatgtcatcaacttccatcatcatattgacatcgatttcttcctgaactcgaacctctgcatcagtctcatatgttgaggcattgatccatagggctctaagaaaatctttgtcaattccaaacatggtgtgcttatcttcaacggctgaagctattgtgtccactacagatcctttttcagccaagtttctggttaacagtctgatatagcgtgcacagtaatccccagaaaacaaagtttgaagtagttggttaactgcgagatcaacagattgttggagaatggcttctggtattgcatcaacatcattatggctgatgatggatctctcaccactttctactttacttattatttccattggcataaatcccttcatagatcccagtgccttctcagttagtacacaccatggtttgtccatcacagtatcatcaccagtggacaataactgagctttccattcaggaaatgcactaatccaagatcttaaaatatattcatcttctaatttcacgggataagtcaacacgaggctgataaaatctcttatcctcatcaaatctgacagctcatcattgtataaaacttcatctttatctgaagatgttccctctgcttcattttgaagagttgaaaatttaggacccaatagagttattatatattgaacaaattcttcaatctctgtatattgtggcctgaaattttaaagaaaatgaagaatgcgaaatcatcacccaagagaagcaaaacaggagaagataatagaagagtagttttcaacgtttaaataccatttgcatcaaacgtcaaacatttataataaatttggacccaatttgcaagttacatctttcatgagatgagagcgggttacttacttaattgggatataccaaccagagagattggccactcgagtcagagcttttctccatgtcagcatttcctcaatcctctctttatctaccaagaatctttcttcgtgtttcgaaaaggctttctcgtaccatccagtctgttttcgcacatctgatggatcaacatcataaaaaataggcagaagacgtcttggcgaagtttcaatgcaattgaagatgtgtgctagttcacgcaaacaccaagttgaggaagcatagttctttgaaaggaccacaatgaaaaggcgggagccttgaattgcatgtaacagctcgggttcacccttttcgagaagtgtatgacctttgaaggcgacgatgccttttcttctgagagcttgaaaaagaaaacctgtgaagttggtgtagttgttgcgtgtgtcatcaccgtggaagctgagaaacacgtcatacgcagaagagctgctctggacgctggagatagaagccattggaattgcgaaagtggaagtaaacttgtttgtgaaaaaggacaagtatttctcgattgctggagttggggagcgcacggaatgcggtagttgtaaaatgggatccaatggaagaaaagctgtggcctgtggcgggaattattttaatcaattactctcaatttgatttattttaaatttttaatcttatttttgaaattttaatttcgcttagttatataattcatcttttaattatagttaataattcaactgaatccattaattattaaaaaattcaatcaaataatttattaataagaaattattaatccgaatgataccgaaattaatttctttaaaaaagattatacataaaaaatattttacataattatattcatattcaatatatatattttttattttagtcgtaaaaataatatgattataacatttttattaattagataatttaatttaacttttaataataattaaatgatcaattatataacgaaagccttctaatttttacatatgatcaacatcatcaatatcaatacaactaaagaaagcaaatctctttctaacatacttatcattacttaagaaaagaattctggcacaatatttctttctttttcttttcttttgacttaccacagctcacccactcacccccaaaatatagatcttacaataatatattcccagtgtgaagcgtctgcatacaggctagcggaaaaatcatgctacagcatattacagcgcgttctagtagcttttattactctaacttcagtatgtaaaaacttatgattcaaccctttagtaacacacttgatcattatttatgcacctcggattagttctcttttctgtttgacaataaaaacaattcaaatatagacaattacaataaaatcttaaattctaaagcaatcattaagaaacacaaaaaaaaaaaaatatatatatatatatacacatatatatatagtatatataaaccttgagactagaagtagcaccatttaaaagtagtaacttattgaaactcggacggatccaggaatgcatagcgatttttttttttacacaattatttaattatttatttcaaataaataataatttaataaataaaaaagtttcacaaaaatatttattattaattttatgtgtaaaaagatcaaatctactactaaaattaaacaaacattaactcaatactctatttttttattcattttttattaacaatattttctttttcttgtttctgaatccgtccctattgaaactgatatacaaaatgattggaatgtatgtgagggggaatcaggagcaagagttaagtaagaaagattcatgtgtacctctgctgctaactgttaagaattgagatccatctcaagtggtgagtgaggaatcagaagcaacagctaagaaagatttatgataatgactttgtacctctgcgagtgcgagcagccgtagccgacagatcttcttcaccctgattttgcaaaatgatcgatcaagtgtttgattattgcttgctctgtttgtttcacaatggactcaagtcaacgcttttatcacttgaatgtgtggtttcgtctcgataccaatataggacaaaaggtaaatataatgctattgattatttttttaaggctaatagtattgattatgattaaattaaaaaatatatgtacaattacttttacttttcaatcaaatatgattttttatcatcttattaatataaaatatctattaattttgttgataactaatctatatatatcttatttataacttagatcaaggagacttaatcaaatatgtttcattatatatatgaaatatatgattaacataaatatatttaaaaatctgaatttattttattatttaatgtgtttaaataaaattgatcttttgtttataatgtgtttaaataaaagttataattttatttttcactaaattgatctgtatacaaatacatctttttatattttgatttatcagtcaattaataacgaatttcaccaaggatctattgtcattatcaattatcaactgaaaaggctaactttttttttatatgtgtttgcttaatattttaaaaaaatattaacaatttgcttaatatttatctcttaaaatttaataattgtttctttaagttcattttatttttttgtatttgactccttctatccttcaaaaaatttgtttttgtaatgagagaaagacagaagaaaagaaaacttaaaatttgaatatgaagaaaagtcaaaagaaatttgattttttgttgtttaaaaattaactccccccccccccacaccttctttctattttttctcgttaattatctatattttgctatcttttttttttcattcaaaccaaatattaatcttatacatcataggtattttcttttctttctatctcttcgttcttatttgatcacctccttataataataaatattatttgttttatgatcacattgattacaaacttgagtacatgagattatatattgtatgcattatactactataatttataggctttctacatcggttatacaacacattcaaagacggagtgtgagagagaagaggaagttatagggtctagcgaagcaggaaaaggggtgtacaatatacatatttttacgatttctttcaaacccttttcttttttctatttttctatttcggattcgaaccattttgttgtaaatgaaagaggtggatttttgtatatattgattgatatcgatatcgatatgcactttcgtgagatcgacacagattacgagtaatctatttgcattgacaaatcgattgaaaatggaatccatgaaaaaaaaatatttttttgtttatttaaatattttccctatattttctatttatagatcttgatatgatcgagcaggacgaatattgtggtttcaagggttaatgtgagagcgaagccacatccagcaatgtgagaaaaccctaatggaggaagaagagaagaagaagaaggacgtgagtggtgagaatatggaatcgcgcccgtggagttgggaataagaagagaatgttcaagaatcacgagaaggaggaacaactgattcaaagacgatttcgtaaaagcaactttgtattctcttaatctacattggtttttaaataaaccaatgtcgtaatgagttttcaaagacgatttttattgacctatctttaaaaatttgcaattacttacaaaaatgccaccacgtcttctacgacatcaggttttgtgaaaccgtcgtaaaactgatgtcgtagaagactgcttttgtagtagtgttattttgacaccttctttttggtatgatggccatagtggatttatccttatttagccttctttcctatcttcgattatccttctaaactcgttcacacctcatcatgctttctttcattaattctcaagcttgatctcactctcactctcatattacatgatttgatgagttagaaaacatgcacgcccgcatgcaaattgtttgacaagaagaagaggcaggacaaacattaaatcccaaatactcacactggtctcataattctctctcaagaaagaaagaaagaaaatggttgtaaaatcaagaaacaaagatggtacattttgagatttgagagataattgtgaacttaagtgagcctctgagaccaattgagataactgtttgggctgtttcttcttcttaccaaacaatttgaaatttgaagaatgaatatataagagaaagaaaaaagaaggccagggagaaatacaggaagggaagttttaatttgtcaatgttcaagatgatagaaggaaaaaggttagaaaatttcctccaaatttacacgtttatttcaataaattcttttatttcatagtttagaatagaagttaagagatctcttcttaagaggaaaacttttttaatttaattttgattttgaaggaaaatacgcacgagtttttcgtgcaataacgcatgaaccggtggtctttgtcaaaattcattcagagttatttggtatgagaaaatctttacaaaaatgagtacaaagcgatagaaattcataaccacacataatgggtccctataaaaattgattttaatgtatctgcaatttaacattttgagtcaatcatattgtttggttaaactttcatgaatttggattcgtacaatatagcatttttcattcatttatatgtgtttaatttttataaaaaataaaaaaacattggtccacatcattattcatgcgttttgtgtcttatgtctttcgtaatgaataatattactgaattttgatatacttattagcgtaattttttatactaccaattaacatattaaaatcagtttaaatattattattattataaaaagtactggtttttaattatatgaaaactcattattagatttacttttgaattatagctttctcaaccttcagtatacttttatatctttcacttttcttctctttcaaataacagaaattgattactattatatatttgctaaaatatgtttgatcttataaatatttgaattttatatttatattctaataaatttttctttgtattgaatttttaataaaataacaatttttttgttctgtcactactttttaatatttgataaattaataaattttatgttttttattttattttctatacattattaatgtataaatatattttttctacgttggagccaacgaattctgacataaaatgatgaaaaacatatcaccaacttccttatatctcattttttcttgtggatttcaaactcatctctttcaattcattcattcaccggtatttttattctcttctctttttctccgtaatctatctttacacgctcaattattagtttctctctattttgttcattttcttctccttccctcacgtgaaagaagattcgtttaatgcaaacattattctttgaaatttatttttttcctaacacccagattatccaacattttctggcagtttgacaagcattttcattatcctccaattcgttgtaaccgaaatatcttaaatttaaggttggttgctgagaaaatattgtggtttcaatactttttttataatgaacattttggggggtttcatcacttggaaaatgaaaatgggaggagggggttaccccatattcttattatttatttatttattatgaacgaataatgtacgtaaattcatgcatttatctaatgctagtgtaaaaaagttcaatatttaacacacgtacaacattgcaattttgatgtctgctgataataccaaaatttgaccttttttcttaatggaaactgggtcatattaatttattcaaaacaatgtcagcaatacatcaccgaactgatagagaccagctaaagaatttgcctcctagctaaactatgaccgacagaatttgtgtgtctcataacaaagcaaacgctgaaatttggttaactatgaagcaagttatgacattgatcaattattttttaactcttattttttatgcttgatctatctatctatcttccccttaaagattaatcagactaatctgcaacggagttattgttgatcatgttaattattcaaatatatttttgtttttttggggggttgggggagagattaaggaactaattaaggattattgtagcagaaaagttttgttattatagcatttcttgagggatttgttttgttagtctataagaggatatttctttctttccaggtagtttagtttggctgctattactgaagttgcagttttgaacgattgctggcttcaagggtgccaatgaataatcaaccgttggagtttgggaggcctgtctcaagtatgctatgattcttaatttcatactctcatgtatttaactgatttccccttattaaaatcaatcatttactttcttttctactaatttactccccctcttaaataaggataagaataaataatgattaagggtaagcctaaaaaatttataatcaatacttcattggttttccgtttgttaatgtcctaaagcacattcaacccaatccatcgatagtgtgattgaactgaacgtccgtttgaagcttcttaatgaaacatcaaacatacttttaatagataaaactcggaggatttgaatccatatttttttattgaagttggaatgattgatcctgatatggtacttgaatgactgttgggtcacgtgatggcttatgcatttatacagtttttctctggtgtatttagtagttattgactaacttcatgatccctgatgagtggtttttcaccctaccagagggaatacttaaagcaagaatatttttccatctttattaggttgcatatttgttgtcaatgttgttgcctagtatttttaatattgttttattattttggtgcacgtaaggtttctgggatttcaaataatgactggatggttgtgactggaaactgtctctataccaagctttattggaatatttggtcttcttgtcaattgtttggactcagagagcttgattttaagcatagcagcttaagattctttagaaattctattacagaaataaagggatgtttcaaattgtgctggaagtggtgaacagctcatcattatacttataagtttattaattttatcaatatattacaaaaacattttcaacatattgtatctcttgaaaaccaaggcttagacctgttggcttttgtaaaagctacaatgcaaagtaagccttttaggttaggccaagcagaaaacgaatagcctatttcttataatagactggactcatactttatgtttgaaaaacaggcttaatctgtttaaggtaaatctgatgttgcttatttccatgtccaattgtcaatgtaaagttattttcacttatttttcttgagaagttgaatgattggcaggtttcttacaggtaaaagaagagtgaaggatttattgcttcaaaaagataatcgcttttgtgctgattgcaatgctccagatcctaaatgggcgtaagtgtattcaccattgtacatttttttgccgtgtgtgtgtgtggtttatggtcatggtcaccgattataatactcaaaactggagtctgagtgttgaatattttctgggaagaatttataaagcatccttgtgattaaattgtagtaaactggctacatgaattttcctaaattgataatgtggaatgcatagtacctctaagttgtgaatccatttttctaactgcttctacaggtcagccaatattggagtttttgtatgcttaaaatgctgtggtgtgcacagaagtcttggctctcgatatcaaaggtaactattcctaatccacttaagagtttagaaagaagattttcactttactaataaggaatttaaactgagttccttcttcaattgtctacaacaaattgagaaactaatatacctatagatgtggctaatcattttttgaaatgggttcaacttgatttgatgagaaaagaatcaaccactcttatatgtctatactcatgaatagtccggtgaactttgctttgtcaggggtgcattattttgtttcagttttactgccttatgttgtgggggtttgcagggcagccttattcttagattccatcccacaacatgctgtgatatgatatcttgtgaaatttagacaaaagaaacactaaaattagtgatctgagactagaagtgaaaacttttcaaataaggtttcttttcaatgtactatttatttatcctgtaatatagctgtaatcactaatctttcaggaattttcattgttaaatgaataatactggtaggaaaggaaaataatatcttatagataattattacaaggtatctcttttcatgtctaattatgaaatgtgaactttcaatttagtgttgccctctgccactggatcgtgttatttgagtttctcttggtctttattgtcaaatatgcacatttttctttacgtggtttaaaataaaaattcagaatttgtcaacttttatattagatacagggtgctagtgattttttacatcaaagcagatagaaccaacagctagacacaggttctagctgtaataagtgagaagtgagaaaggaatctctgcaactcttagctacgaagtaaacttgttattttgattaccaaggtcattgcattggacttttattaaatctatgaagtatgatccacattttaagaaagttagtcatgtcaagtaaaacttagtttaaagcttatgtagcatgaaattaggccaaataaatattcagttcttcacagataactaaatgatagatagtgtgatcattctaccagtgcattaacggccctccaaatttatcactctgcctactagttacctgtgttaggatttcgtataatgaatgtactatagccaaggtgctgaaaggcgtacctaagccactgaggcatggtgcatgaagcttttttttatttttttttatcattttatgctgctctcttttcaacgagttgtgtctatcaagttaatagtgtgctgaacttatttatttatgcttggtcttgtgtgcattaaagccttgggacattattttcttactttcaggttttgtctgtgacattggatgaatggtcaagtgatgaaatagatgcaatgattgaagttggaggaaattattctgctaattcaatttatgaggcttattttccagaaggatatacaaaacctggaccagatgccagtcatgagcagcgtgcgaaattcatccggttagatatgttttcatctaactttacactgtacatctaccattcttagcatcattttgcttgttttataaatctattatatattatatttatggtcacacaaaatgggtaaaagctgtagtcaactttatatgatatagatactaacttctgtgccctcattgcaatttttttcttctcatgttttcttttttcttttttaccattttgctttgctgagtcatttattttcaagtttctgttttttttggtactctttttcattcagtccattgtcctggttgataatggactaaccggcatggcgttgggattgctcatggtagcatcatctatgatagcaatctgaccaatgctcaagttaagagtggcattttaattgtggcaatttttactgcaggttaaagtatgagcgtcaagaatttttgaaacctagtttgcgcattgtgtcaggaaaaagcaatcccccatcaagtatatccaaagggattatggatagttttcgaattactagtgattcacagcatatggtaattatattttatactttagttcctttgatggatatgtatttgtttgttggccacatgttgagttagcatatcaaaggtaactgagttaaattgatgttgtacccagatgaaagccttctaatcgagataattatatatatacagcacttgttgcatgcatccaactttactacttggtagtaaatgaaacgaaattattttcgtgagtggtttacttggatgtttgactgatatttatggttaaaacaggaaggaatggtagaatttattggaatgttaaaggtgaaagtgatcaaaggcacagatttagctgtcagagatatgatgacaagtgatccatatgttatcttgaaacttggccaacaggttggttgttctcagttctcattagcataaattatttcatgggaaactttcatttttaattgaagagtagtagatgctgataattttctttctgaattgacttcggtgctatatgccttcagactgttaagacaactgtaataaagagtaatttgaatccagtctggaatgaggaacttatgctgtctgttcctcagcaatttggaatattgaatttggtaaggttcaatttcatcttgtcttgttaggaaatggaaacaaattctgtgatgcttatttggtggttggacatttggatcttcatacgtgatacttctatttgtctctctgtgtgtttgatacagaagatacaaaactcattctggtgtaaaaacatggaactttatcctaatgatttggttacattgcattgcagaatgtatttgattatgacttgttttcggctgatgacataatgggggaagcagatattgatcttcagccgctgataacatccgcaatagcgtacggagatgcaagaatgtttgatgatatgcagataggaaaatggctgaaatcccatgacaatgtgcttatagatgatagcacagttaatattgttgatggtaagattaaacaagacatgtcaatcaagcttcagaacgttgaatctggagaattagacttagaactcgaatggatacctcttgattattagaattgaatgaagcattcttggattgaatggggaacagtaattccaaatcaataactgcacggcacgtcagaaaaaagaatgctagaattgctttcattagaatagttttcgtgtaaatgcggtgtgaattcctacctttctcataggtattggtttgaatttctcgacattatttctctcgcttggtggaaatattaatataaattctcctccaagaaatcctctagcactaggttctgaaatttaaactattaacataaactttgaagatttatattaatgatataatatgttatactaatatttgatgtattgataatatataacaatattttatattgtcaaaatttgttaatataatatataattttgttaacataaattcataatgtctctataacagtcttacactagtttaattttcagtagaaaaaggttacactaacataacttaattcagtactaacacatttttattgaataatttaaaagaataggtaaaaaaaattatatgaagatttataaattttctcaatgaagctgtttttttttacgaagctggtgttgaaagtggtcacaatttaagttttgtgcataattgacatcaaaatataaatgccacatatacattcattatttgaacattaaaatattaatgccacatataatcatttttaactcttgtatttttatttttcatagacccacgttttgaatgtatatcccaaaatcaaatatatttttttacagaaaaataaatagattatttaatgagaataattataatcatacatctacttttcttctacttcattttcgaccttttttttcttatttatggtaattatctacttaattatcaaaataaaatgtacgtgtattgtcaaaagtaccagcaacaagagaattagtgtaatcctagtacaaatgtagggcacgcttgtaattttgactcatattttttgttaccatctttttctcatactcgcattaaaattaaaacttagttattttgtcaaaatggctaaatgaaaaactaatttgagtaaaaaataataattgtggaatgaagggaaaaaccacaaaggacactaaaaatcgcaaggacaacagtacaacataaaaaatgcgcaaacgatcatcaatagagtgagcattatttgctaattaaggtgtctgtcacctgattaacttatcgcagcgtatgactccaagagaaatcaccatttaaggtttaaattccgttaatatgtattcctaaaaaaatacattaatatggagtatgacgcagaagaactaatgaaaaagattgtctctaaaaataaaaaaaattaaaactttgacttccaaattccaatgaatcttttttttagaggaattccaatgaatttattacgtgaactcttactatatatttttatccgaccatcacatgataccatattgttaacaaaagacctttttttttatggcaacaaaagcccgtaaacaatacaatgtggacacaggcaaattttttaaaataatataaattaaataaataattgggaaaagggggtagttggaacaaaatttagcaaaatggggtgatgaaacacgcccagctggggcgtgtttaaacacgcccagatgaggcgtgtttcaccagatggcgccacgtggcaggctgaaacagtgtcctagggttttcgcgatgttttcgtaaattacggaaggtcgtaacttttgactgggacgtccgattgacgcgaaaccggtggccacacgctcgaaattgagaggagaaggcttgggcaagtccccgaagggtttatgttttagggtttcagattttggattttgggtatcgaatttagggtttaggatctagggtttagggtttagggttttcagatttaggttgatggatttcagattaggttaggggtttacgttgtgattagggttttagattttggattttgggtatcgaatttagggtttaggatctagggtttagggtttcagatttaggttgatggatttcagttgaggttaggggtttacgttgtgattagggtttcagattttggattttgggtatcgaatttagggtttaggatctagggtttatggtttcagatttaggttgatggatttcagattaggttaggggtttacgttgtgattagggtttcagatatagtgttgacgatttagggtgtagggcttattctttagggtttagggtgtagggtgtagggtgtagggtgtagggtttaggatttagggtttatggtttagggtttaggggtataggggtttagggtttagggtttaggatttagggttttggggtttagggtttatggtttagggttttgggttttggggtttaggattttggggttagggtttagggttttgggggttggggttttagggtttagggttttagggtttagggtttagggtttatggtttagggtttagtgtttagggttttggggtgtagggtttagggtttagggtttagggtttaggatttaggatttagcaccattcattactcgtaatcatggaaatcagggcccttctctgtctcctttttttcttttcaaattgatctcttctcgaactcgacgtagagactagtaagccatggtggcacggtgggcacttagaggcgcagttggcaaagtaagggttccagttcgagggtttaggcgcgtgggcaagggagatttggaatgacagtaataagaccaatgcccttgctgatcacgattgtaacaagtgctttgctgcagtagtttcgctagttctagagagcagtttgcgggcattaaaggattgctccctaaaccctaactcctaaaccctaaaccctaaaccctaaaccctaaatcctaaaccctaaaccctacaccctacaccctaaatccctaaaccctaaaccctaaaccctaaacccctaaaccctaaacaccaaaatcctaaaccctacaccctacaccctacaccctaaaccctaaaccctaaacccctaaaccctaaacaccaaaatcctaaacccctaaaccctacaccctacaccctaaaccccaaaaccctaaacccctaaaccctaaaccctaaaccctaaatcctaaaccctacatcctacaccctaaaccctaaagaataagccctacaccctaaatcgtcaacactaaatttgataccctaaatcgtaatttctcgtagcaatgtccgatgaagacgtattctatgtcagaacgctcaaaattgagaggagtaattagataaacaaagaatagcttgcaattcactgattgagtacataaaatatcagaaaataaaaaaaaatttagggcttcaaaacttaaatcacagttttgagacacttagaggcctcgtttgggaaaaaattttgggcaagtcccttcggatcttgcccaagccttctcctcttaatttcgagcgcgtggccaccggtttcgcgtcaatcggacgtcccagtcaaaagttacgaccttccgtaatttacgaaaacatcgcgaaaatcctaggacactgtttcagcctgccacgtggcgccatctggtgaaacacgcctcatctgggcgtgtttaaacacgccctaactgggcgtgtttcatcaccccattttactaaattttgttccaactaccccttttcctaattattgatttaatttgtattattttaaaaaattagcctgtgaacacattaatcccacatttttcctaaaaaacgaatatggtttctaatttttcaatcaatgcgacaattcgtagtagatatacaacaatagtgcactttatacatgaagaaactcaaaattaaggctttgttttaaatttaagatttttcttaaatgaagttgatgttaaaataataattcatgtttaaacaccaccttttaaaagtaaaatgacaggtattaatttacgttttgttcgaatggtaaagtaaaataggttttatactataaacataattattttggtcgatcattccggtcatcaaaagaagcacaagatgaacagaaaaaagtaaaataattaaataaacaaataatatcataaatctagaaccgctaccctttacatgcaacgtggaatcatatatagaacactagctagctagtgggaaacaaggaaaaatcataatcaaaatcaaaatgaagcaagaacacacaacactcactcaagggttgcgtaccaccaattgcaacttgttgttgtcttcatcatttccaccttcattctcattctcaccgcaaaacgctgcgtttaacttctgctttctgtttctgtttctgtttcggttcttgaacaaatagatcaaacccgaagccactagcagaaccgcgccggccacgccgcacgccaagctcgccaccgtaagcgccttccccaggcctttgccggagtgtcctctgacaggttgccaccactccggcggcgaggcgtctccggagtccatagcccggggaagtgccacgtcggaggaggaggaggacatcgacggcgaggagtcggcgctgttgaagaaggatcgcatctccggcgaggaatgcggccccgccggcgagaatgtctggaaggtgaggccgtggtccgacggccggagctccctggcggaggaagctccggcgagaatgagtggcacgaagacagcgagggcgaaggtgactacttccatgaagagtgaatttggagtgacggttggaagaggaagcatatatagagagaaagatggaagtgtggtggagaatacggtgtcgttttgaaatgggcaatgatgagagtgggagaggcttaaacttaaagaaagagaagaagagtgggttttgttttgtctgagtgtggaaaactgtctgttttacattgtgtcggaggaaaagcttacttcctcttccaccctcgccgctctctcctttgtctttttactaactcactttttcttttctttaagcttggttaataatgggataagtattctcctcaagtttattaattacaaatttttatgtttttattttcttctcattttatgtatataaaaaaaacaataagatctgataattaaatggacacaaacatagataaaaggaagtatatagtatgaacacatgaccatcaactttgttaagttcgttaatttaatcataaaatggatacaaacattactacagtcagtacaatattagtgaaaattctatttgttaagccaacaatttcttatcataaagagaagattttgaacacgacaagtgcgagactgcaaagtcatgtgtattataaagagttgtagaaagtgacgcaagacaatcaatctaaggtcaactctcattaatgtacgtagatttaccaagaaatctggcgagtttgtcgttgaagaaattgtaatttattcccatttcccgtattagtaattgacatgcaatatagtttgcgttgttaaattagattagtggtgcgagtgcgactatatatggagaattttaagcattaagatgataacgtaatgggttttaattttatagggatgcgactaatatatgagttccgaacgtgtgtgtctcatggaagctgtttgcgtgttcaagtttaaggacctgagatgtgtaattcgaatctgaaaattttgtttagcatgagagagacggtttgaaaaagagaaaaccaatttttaacggttaccagttatcaaaaatcatttaatatatatatatatttcaaacgagttttctaaacatttttttaaaagtttttaaatgtcaaaaataaattccattaaataattttttaaaaaaatacacatagtaacgatcatgtcatcatttaacaacaaaatctaacagttgcaaccaaacataatggaatgaaagttctagaactaaaaatttaattaactattttctttatcctaatcattaagtgagttcttaaagtttgtcgtgaaataaagtcaactttgacgcaaaaaaaagtgtgctgtgttaggattaaatccttaatttttaaattttgaaatcaattatacatattttttttattttaaatatttttatgttgactcattaccaatttttaaatatgttagtaagtcgtttcccttgtgaatgaagttttcaatactgaatcaaatatttaatttacatagaaataatttatgaattaattggaatgtacatcaatataaaagttttttaaactaatattcaactataaattgttgtgtatgatatataattacttaaatagttatataaaatagtttctaatagttgatacttttcatccacaatgcatccaaactaaactcatacttttcttggtgtagctttttcttttttatatatcgatcgaggttcttcttgttcagctgatttgtttttctatactcttgtatatgggttcttggtacccctcgtacctagcaatcaatatatttttattttctgatataaaaatatcagctttaaatatattgttttgggtaacgggtacaatttcaatactaattatacgtgcatggaaaatgttagcaaggaataatttccgccataaccagaatgtaactatgtaagtaggaaccaaccgagaagaggaaaaactaaaaaaagtaaagcaggagtgtgacaagaaattccaaggaaaattccgaagatgctgccgggtttcactcctgttatagaattgcttttgtgaagaaaagtcgtagaaggaaggaatagtataaaagataaaagaacaaacaaataaaaaagaaaaagtaacagggcaaagacatattcgaatgtgaattaaaaagatacaatccatgtatgtactgggggaaaaagagaaagaaaaaaaaaaaaaaagataaactccaagttcaacaacgcttgttttagtgtaattacaagtattttttgcagattatatgcttcatctgtaaaagatgtctagggctctattccacatggcccttgacctacgctttcattattcatcatggatgatcggtgttcatgtactccaaaaagaagtaccgaataaagaattgatccatgatgtgtctctctccattccacataagacttcctttgatgaaaagggaaagaaatacatctaatatatacacacgtacatagaaatacatctaatatacagagaaagggataagatgagtgaattttaaccatataattcatatagatagttaagatgaaaatgattaaaacaactttgatcgcgctcatgtataattatgtgttccaaagtcatcatgtattttttttaaaagaatggttatataactttaatcttaaatattcagtatagtttatacaaatagatttacttcttaacttttatatagaaataatttttctactaactatatctcatatagagatcgagatggagagaatccttttaatcaaagtatctagtataaaattcgtatgaaagatataaacattcgatataaattacaaattattaaagaatttgattatcattaccattattttagagatttaacctttttaaataagtgtcaagaaatcattaaataataatcttttttgtttctcataactattctcacttaaagacaatttattcaagacaattttatcacctcttctaaacctagttcttcatgaaattaattccttcactaaatccaacctccattgatcattaaacaataatcataaaaactatacaaacaagacatcaaaataaaaattaattaattttgtattagattagagttctttttaatcattttattagtgcaaaatatccattaacttgataacgattgttctatgcaaagaaaccttataggcttatattatcatctattttagtcaataagtatctttgaaaatttcacgattttcttgtaacgtgacattattatttttaacagacaaataagatattcaacaaaattcaccaattttttttattaatctaaacatcatagttatatgtttgatcaaaattagtagtgcatataatacttcgctgtacgtttattatattcaataatgacattgattcaaaatttatttcccctacttcgtcttctttttttgtttcttttttctcttgaaaacgtgtcaagaagaaacttgaaatttacagcacaaaaataaagcaagaacagacataagactcaaatatgcaataattattgttggttgggaaacgatcattcaacatatggagcattgcttaattggttttgttatgatgccgaagtatatacattttctcatacaagcctcgtgctgctgattatataacacatggaagggcataactaaagcttccatgcattttcgcgccaagatgatgtttccttgtttctatgcgcatggaggtatacttggggtgctgaatcaacctcttctaaagtggtagatatatgttgttgatatgagagaacacaaccccatgcagagggaatgttggtggtgtctagatattgatgttgttgcttttccatttgcagttttgcattgcacctactagtactttgaaactaacgtattctcacattcctttcgttgaaagattgttagggttgaaaggtagttgggccagaaaattttggttgttcgggatgtgtacaaaagataaattatatgtagctcaattttgaacatttatttatataaataagagcgagataaagaaaaaaaaaaaagaaaagagatagctgatagatgagtgatgtaatgagaaaaaataaagtgaaaattgaactatgagaatgttgtaagaataatatattttttgtacaatggtcacttttttgtacctatatattttgtcggcacaaccaccggggtgggttcatgggagatggattgtattccacttttgcatcattctgttcttctagtacatcagcagaacagagaacaaagtgggccctatatgttaaggccagcccaacgggaagcccacaatgtacattctttagtctttcaaaaaataatgttacttattaatttactatgttttaaagaaacaattaattgataaattatttataaaaaaaaaacacaaaacagcttaacattgtattgataaaaaattcaagggtcttgacagaaaccaggaaaactgttataagagagtattctctgtgaacaaattaattatgctattaaacactgatttcgaacaaagtttaccattaaagacaaaataaatagtcttggtaagcttcctggcgtaactctgatttctcagaaacttgggatccattctttggttgtggtggtaattctgggtttcttgatgccattttgtgggctttggtacgacaggtcgtaggcagttgcttcctgcaccctcagaggacactaatacccttcttgtaacccagcaccccattgagcggccacaattcacccagttactttatttgtggcattggagcctaacgatgtaatttgctctcttggtttaaatacttttttccgaaatttaacgttttttttataattttcgcccttttaatttttgtgttataatcttgataaaatgtatttattttatttttatttttacactattctgaacagtaaaaaaattaaacagtaaaacaaaattatctaaaagacttccaaatttaaagataaaaaaataaacacgtcttgccataactaaaacgataaaaaaaattacaaaacattaaattaccgataaaaaaagtatttaagcccttccattggtagtataaaatttgactcaattccaaattgaagatcggatgaaggggtattactaattattacacgtaggtggaatcataaaaaataatgatttttaacaatactagtagagaatattggttggcgaatatcgaaccataagagaaagagagaaaaggaaaaggaaaggaaggatctgttggaaattgggagcaaaaggaaagaaagatgcaggatctgatgtgcggataggagggtccaggtagtactacacaacacattctgctaacataacacaacataacaccgacttttctctcaaacgaacgacataattcaactgctgcactgcaaaggttcatttccaatctctaaccctaattttcctccctccaattcacctcgaggaaccacgaaacaaattcactttttctattttcgattggtttaatggaattcccttgtttaagatgctattcaaatgttccgttatctctttctctgcttgtattgaaattgggtttaactatgccctgatttttcttaatcagattgaaacttattttgaagaatgaacgtgggttttggttttgtgcttgggatgtgaattttttactctgttttatctgtatagaatgcacccgaaatacttctaaattcagttaacaatctctgttctggttccaggtttggacaatgttacgtgcttcacgaaacatgacctctgcgcaggacattactggtattttacatgaacaatatccttgatccattttattgttttactgtaacttttccatttataattagtggcttacccgcatgttttaattttagttaacaaaaaacaacacatggagcaatatcattggtgtttttgtgtctaatggaattgttacaacaacaatagccttgtccagtctaatggaattgttaatggagaaacttctattcaacacaaattagtaaagttgaagatggaaaagatgaataactactgttgtgagtgcagtaaaatcttcttttatcttgtattttgtgtgctggaattattccttagtgaaaatcataagaaatggtaaaaaaacacctttcttaaaggaaaaaaatgtttgcataaaaactcatgtttcttactgtctagtaacttttaatgtttggctacaattcataggcaactacactggatgttccttttctgtattggttgccttgtgaaaattattattttgtcataaaattattttcaccactcagtgtcatagatctatagctccctgtcttttgggtttgcctatgtatcttttaatcatttaagtcattgaacccatactcttgctcagaagctgcataaatgatttatgccttatcttcatcctcttcttttgcaattacgttgtgtgtaaaccccttcgcagtccaccctccagcaaggcagaaagaggaaaaacatgaaatagacatttaggcttcacttttaatcacgtgtttgctggttttctgagaagcatcttatttgtatgtcttgcctagggactgcaatcaatatatcctagctattttatttttcgttattacgcacagcttcaccttacactatctttaaacttaaagtatcttattttagcttcaaatttgaacttcaaaacttatttcaactttaataagtcctgtactcctctaatcctgtaactatttttgtttttaactaactcctgcactggccacccgtctgacctacaaaatatgtcaatatattgttattgctttgctgttcattagagtagaacctatccctcagcaactctagtgtactctagattctaaccttcactgtgaaaatggtgaactgtaataactaataactatgaatgtgttcatatattatattggaaaaaattcaagtcccacattggctagagatagtgtcaagacagagtatatcagtgggaggcaaccttcaccccatgagttagcttttgggattgagttaggccaaaccacattttaagatggtatcagagtctatcctagattcatcaaaaaaggtcacctaccatattatccacgcaccaaactaaaaagtgttgggcgtgaggggatgtattggaaaaaactcaagtttcacatcggctagagatagtgtcaagacagagtatataagtgggaggcaacccacatcccatgagttagcttttgaagttgaattagactcaaactcacattctaagtattatatgctatagccatactacgatactaatacctgcacaagtgaagccaaaatgtctatttcatgtttttcctctttctgcctcgctggagggtggactgcgaagggtttagactttagatagtattagtctttaggtattattcatattcatctacttattgtgattactcgcctttcttatttctgctttatctatatcagttcccccttaaagttgtctctttgaacataagactcctttgcattctgacttggtaagaaatgaagagtcttttgtatctattgcttgagaatatttatgttgctttccctctcctttgtatttctttttccacctttgtttatgattctctgtttcttgactgatctattgaattagcctcatccaggctaattttttaaaaattcataaagggattagttttagaatgcaggagtttgaagtaatatcttgttatgtagctgaggaaattattttctagcaaaaaaagtgtgcattaagttgaagataggtaaatttaagatgaaaggaatgaaattatagggctcacatgtttggtagttgagagatttgggcagaaaaattcacttcaaactaatgttttttgacaatcactgtttcttctgtatttacaaactcaacataaatctggagtttgtgttcctattgtgatatatgcttctacgttctgattgctgctcatgcattataaaacactaggttcgtttttaagatattgtgttaattttttattgagcttctttgctattatcctatgaagcatttcacttgttccttcactccatcccaagcacaaatttactgtctaaacctatgtagcaaaatgtctatccagataatgaagatgatggacagcggcagtcagaatcaccaatgcagtccccatctgcaaatggatattgatccaggtattagtacccagaatgtcaatgtacagtatgcagcacctggccagcttggaactgggcatgcaatggtatgaacttcaagctcctttgggtttcttctgattttgtcttggaagaacaaaatatgtttcttcaatgatttgacatcatcagtccaatttgaatcagctcctaatatttaattaattccagaaatactaaggaatattttgttttgcaaaggccatagccattgtatatcatccaatgtgtcttgcctgttgtaggtataagatagacacacattgccgttgttttgtcattgaagcaaattgactctgaatattagcaaatcatgatgaaaattttccccaggtttattcttcctctaattcatgaataaattggctttttttacattttcccgtgaaggtggcattcctattttgacacagcaagctaatttgaaagtagccattaaatttcttgatcttgtaatagttaaaactgaatttcttaatcagtacctactttgcatgcgaaaacttaaggcttctggtctggcaaataatgatgcaatctgaagtttttcttataaaatgttctttagaggttgtgttttggtgaattaaggttgatttttaagaaaccagagttttttgtcatggatattgaaggcaaatgataattgcccgagtgagtactggtgtcagttgttatttagatgtgatattaaagtttgttcagaatcactgtttgcactagaattgttcttggtatttgattttaaaatgtaaatttcttacgcattgtactaatttatgttactttcttatctaattgaaggcaccacctgtgtatccagatcctgaccttactatagaagcatctttgctccctatgatacacaaccttatcccccacaagcctatagtgggcagccaatggtttgctctaattctttaatgttgattctattaatattatagtggcttcttgtgtctttttccgatcctccaattattaaactttatgtccatcttcagttaatgggaattcagcaagctggtgttcctctgccaactgatgcagttgaggagcctgtgtttgtcaatgcaaaacaatatcacggtatattaagacgtagacaatcccgtgcgaaagctgaatcagaaaataaagttataaggaataggaaggtatatcattctctgcatctttatagttctttctatgaaccaaaagtagtgttgttattgttgtaagctgcttgcttctcttctctggaagtacttacttgttcttataataaatcttgcagccatacttgcatgaatctcgacacaagcatgcactgacaagaccaagaggatgtggtggtcggtttctgaattcaaagaaagacgagaatcagcatggtgatgtggcatcagctgacaaatcacaatccaatatcaatctcaattttaataaaaacgatcaaacttcatcagatagggcatcctaaactacagaaatgatgataccttagacagtggggatctattttatgtcacaagatcaataatacctgctttggatatcccacttttgcttcattctggctttgtacaacactgtagtggtgtggtaggtagcgttaggatgtcgcacgatgcaggtaaaattaaattggttattttatcaaatattgtcctttggtaggggagatttttatggtgatcattcctttgtatttggttctgtagagaggttagagattggtgttttgtttggttgaatcgtatttatttaccttgctagtgacagttgaagaagtttcaaccatgattggtgatggatattgatagttgtttttgttcagtgattaatagatagataaataaggttcacatgacttgctgatattgaatgaatcccgtctttggttagaatttgtcctaccacccttggcttgaaaaaataaatgttacatatattttatatgattcttttatatctatatatatctttttaaaaagttataactaaaaaagcattttaattttttacctgcattaacacgttaaactcaattatatcactattttataaccatattgtttatgaaaagaaaactaaatttactaatgataaatactcaattatatattttataaaaaaaacattcaaataagttaatttaatattattatataataaaaataatttatatatttattattacataaaattagacatgataatattataattctaaagacagtcaaataatgtaatgacaaaatccggaatatttctttaaaactttcataattataaaaactttaacataataagataaataaaataaagaattagtatttgttatcaataactattattttgtataaaaaataataactattattttgtataaaaaatattaataacttatttaattcattaaataattataaaattatattccaaattattatcctctaggtattaaaatactttataatcatatacgggacattttcttacttttattgctatctatatctatattattttttttttttttttttttatctatatctatatagtaatcttattttctattttaaaaaaataacaccgtaaaaagtaggagattaaattgagtaactcatttaatgttggttttaatctttatcatttatttttatgaaatttaatagttaataataattatttattataatattagatttaagaaaataaattataagataaaagagtaatatttatttatatattatatgtaaaggaagttgaacttttgtgaatagtcagatcgaaattttaatttgtcaacaatcattaattgatttgatatataaaaaaagttaaaaatttatctatcgttggatcaaattttaaattttaatggttgatttcattccaataaatatatatcatacttaatatttgtgagttattagatcaagatttgagttcacaacagtcattaatttgactacactttccttccactcaccctcccctccttaagaattacataatcttttctttcatctctccattcaatttcatcatttttgcatcctctttgtgaattctctttgcatcttatttatcttgttaaaacaattattttgttacttttgcatcttttcttgatgaattttctttatgtgaatttatatcttatttatcttacatatctttattttgtgtgcatgtacatatttttgaattagaaaaatgttctttagtttgtgaataaatttgaggaatcatccttatctttgaaattgagcaaccatgttatctctaaaattgagttataatctttatagtatattttttcttcttcaggtgttatgaaatacttgatctgaaacatagaaaaaagtaaagcaatgagcaattaattgatagttttggagattcagaaaataaaaataagcatagagaaataatttactttgatcggaagagggaaaacaaataagcactgagacacgcgaagagaaaaacttttgcattttatagacttttttattgtgttttctttttacgccttcgttcttttattaaaacttttgttatgtatttcatctcttctccttttttataacgtgtttattctttttgtgtgttattatatgtggtatcatttatgtcatgagtatgttttatttcaatgcttgtatgagtttattaggttcatttttaattgtggaagttcataattgtgatttctcattatccgtgtcttttaatcctttccatcttttgtttgtttacatttttctttttatatatatactgcatataaatattttaaaaaatatgatttaatcaaagggtttaaactctagtttttatgataagaaccttatttttttttgtacatattttgaaatattttttcatatttattttttcatctttgttattcctattttaatgttgaaattcttaggaaaaaaattgctcattcaagagagaatactgaaaaaaaaaaaaacaagttatcaaataaaatataacaaatcatcaatcctttctttatatctaatttatatattttttgacgtgatatctaattcataatatatttttcaatgattttcatgtgtttaattaaatagatttcatatagaatagatcataaattcactcctatgtctaattacgttcactaatcaattgatcatactagtagaatcggattttgtaatttaatcaaacttattttgtttttgaattggatatgcaattaatttaatcaaatttgatcgattcttaattggatcagtctgatttaattaatttttaaaaagaagttgaaaaaaattatgaaatttatatataatattaattatatatttatatagaatacatacataatttaaatttttaatataaataaattaaactagatcaattactataagacattgcttaaaccactaatccactaatccatttagttgatcacgtgaatgaccgaacccagaaagcatgattccacttctaataccaaatacatttgtgagactggacacccgaaagaaacaaagcgttttgaagagtattgttccgctctcatagggttctattctaacaaagatggcagcgatactcggtgaggacctgatagtggaaattctcacatgggttccagtgaaatctctgatgcgtttcaggtgcgtttccaaatcttggaattccctcatcttccatcccaccttcgtgaaattgcaccttcaaaatcaaagggcttccaaaacacccacctcctattaaggtgccgccgagatagcatgtttaatctctctgacgaattcatcggaccctgttctgttcgcattttacttgagaacccatcatccactgttgatgatgcttgccgccaattatagccgggtactttttcataggttcctgcaatggcttggtttccttgctttatcattctcgttctcttgttatacatggatccattgaataccgggtccggttttggaacccggccactaggatcatgtccctaaatttgtctcacttaactttccattcatcccaggatcatgatattggctttgggtttggttacgattatttgagtgacacttacaaggtggtgtttctcctttaggacattaaatcaaacaattgggaggtgagagttcactgcttgggtgacactgatacttgttggaggagaaatacgtaactgtaacttgccctgatttcccactttggggaggacgcgatggtaagcttgtgagtggcacttttaactggttagcagttcgctggcaaaccgatactgtcaatcagttggtaattttttcgtatgatctaaacaaggagacatataagtatttgttgttgcctggtggtctttctgaacatgctgataaccctagtcttggggttttgaagggttgcctgtgtctttaccatggtcaggagcaagtaagaacccgttttgttgtttggcttatgagggaatttggagttgaaaactcttggactccgtggctgaatatgagttttgagcttgttcaactcttggactccgtggctgaatatgagttttgagttgttcaactcttttcaccttggcaattattggcagcgcctttgtgtatgtttgaaaatgatgatgtcatgttgctggcaaactatccgcttcccaatacattttctataatcggagagataatagaatagtccgtactaagatttcaatgacaaagtgccgctgttctcccatgatgattatgttcaaagcttggttctaccatattaagctaccctatatttgcttgcatgaatttatgttaaattgtgtaagtgatttcagaacctcgccatttcatgtatcgacatgacagagagtgaataattttggtggttccttagtttaattactttgttggatgattctatttctattggcaattgctaattgtgtgtgtctgctttggttttgccttaatttccttttcctgattgataccttgttctcatctccagtgaggcaagggaagtatttggggttccacttgaagtgcgtttagagagtagagatactcattgacataaatccactgaaaaggccaatgtcactgacagtaacactgtattgtataactgtataagttatacatgtcatgtggctaatttgtactcaattatgattgttgcccttttgagttttgacaacaatgaaacaatgtattttcttattatggtgcaaagtactttctttgttttacaaagttaaactgcggtgcatttcattactgaaacatatttcttataatggatatccaatacaaatgtgtacatttcattacttaaactttacttttttgtttacatgggcatctatagttataggaagattaccaacccactctgatgcaaaatagcctttactgcaggtaccactgttagcacagttataacttggtctgtaaatgctatacaattcacatttcaatcataagatgttaaggtgtacatttaccaactcttgacactaaaataaatcatgtgctgtaaatttacaatttcaagccttccaccttggtctaaaattgctgtaacttacccagttacagtggagatatctgggcttggcagtaggaatagtttgtaatatgagtcattaggctaggtaagtttcaggcacattgcaagcgataataaggtttgtataaacagctgatcacatttttaagacttagtcttacatgccttacttgtagcagataagaaaaatggccaaattgtagctcatcacagcatactcaaattgatgtatttaataaatgcaacaggtgataatggaattattggtgagcagggtaaaataagagacagtattcttaatttttttaaaaaaaaattggattcaaagtacaattgtggccatgtttactccactatttttattattttttataatatttaaggggattgtagtaacttgaataattcattgacttcatatagtgagtaaacttaaagaagaaatattttagttttgttgaacagtgaaaaggcaatagtatagagtatattaaccttgagcgatattatattttattttttatgggcactgttttgatcaattgaccttgagtaatgcattacgagttaaaatactccttacctacatctttgtattttttttctctcactctccctttaccctctcaagtgttcaaccttgtagccaccgccaaagatggaagatgttgtcgaggacttgctaggtgtccatgtgtgattttagtttcgggtttctaatcttccatcatcttgtttttttacttcgcattttgtttttaatttgataccaatttctagggatccaaaaaatatcttttattgttaaacaatgtatattagacaactataatttattttaaaaaaaatgaatattcagttgaggaaataagtatccaattttgacctttcaattaagatgagaaataagaggaaggaaggagaaacacgtaccaagcagaaaacaacaacacgagcatatatacgaacaaaattcctttcataagaaaacccatccattacgttatcctttctacactacactgccaaacacaacataactacttccggtcaagggacaaatccaaggaaacactaatctagaaaaggcaataattttagcttattcacgcgtgttatattgatatttttatttgataacttttttttatatttttataaacataataattatttcggaaatggttcttggtacgaaagataatacgtattaaaagtatgaatggcatgacacacgattccctttcatattgactttctttcagcaatgagccaaatatttcttattaaaatttcaatcgaagttcaagtcttccaggccttctcttcctcccttatggtagtgataacaaataaataatgtaaagcccacttataattgcaagttttttttttcttgtatttgaaaggcatcatttttttgcttattttatatagtgtccttcttatcaatgatttagggaccttctaaaaacttcataatcgaaatgtataatctattttagaatatataccaaacataaaggacccttttgtgtcatagcacttgtgagagagcatacatgattagtgggaatctcggctagaatcagaaaaaaaaaaattaatattttatttttctaataatattttaaattattatttttaaaataattgcgttgcacatcagaaattgaaatgaacacacggctacacatcagctatttcttgcgttttggtctagtacattgctgttttttatatcataatttatgcatcaacccaatgatagaaaatgctttttcaccttagtttttgcttttcacgccccaaactttgtttgttatttctcattttttatacacctctgatggaaatgcaattttggtgtataatatacacaatgaaaatatgttttcactaaattaaggggtgcattctccatataaaatgaaaatgcattttagttatacacaatacacggcaaaaacacatttatgttgtataattaattttagatataaaataattctttttaaaaaataccttttccagttcaacagggacaaataagagaaattacattaaaataaaagcggagttgacactccactaagataagctaggagcaacaaactcaacatagaaggaagttttgattcatacttttttttattcatagacaaaaggaagttgctacatcataaaatcatcctgagcatcacatgccaagtttgccaacgcataccttttagtagtaatacaaaatctaattaattatgacataactttctccttttaatagtaatcgaatatgttacaaataattttttttcattgaaattaaattaggtatgatagaagttaacatttataataaataattgaattaactatcatacaattactttttttaatagtaaccatcgattgattaaaaatgataatttgtgtcatcattgattcaaaagtattttatatcataattatttatattactattaataacttttctgatcaattatcgttaagataatttgtatcataaagttcaccattgatgaaaagagagtattcaaacaaaattgaatgtgagggagtagagagagtgaaggcatgaaaatatatatatatatatatatgtggtgttgtggataataaacaaatatcataaaaggcacaaactctatatatttttgtttggagaagaccgcaaaatattttaatatgagtgactatattttggtttaaaatgaaattatcaaaagaaattgtattattttctattacagaggtaggacaacggataatacatctgtcatatcgtatcggcgaaaaaaaaaaaaaaaaacttataacaattgtaaaataactatcatatcttttcgtatattagccaccaaaaaaactctaaactctctttggaactcatctttatattcttgattttttttaaaaaaaagtgaacatatgattctttttaagaggaacacgaattatgtattcaggtttcttagggaaaaaaatatttatgtgattgatgagataattaagccaacagttcatatagaaataaataaatagaaataagactcgggtggtgtataaatgtactagtattttttttaatcattcggttcattcaataaattatgactaatttagagtttagttaaaaaataaataaagactaattatttttatcaatatttgaattcgagtaatatctatacattcaacattaactatttaccacttatgttgaatcacttagcataagtgtattagtgtagatacaagatgataccacaaaaataaaaaaaataaataatcaaatttgtctttgaaagtgtaatatggtacaaataaattcttgaaagatgaaaatataaatttagtctttcaatgtgtaaaaaataccataaattagtctgtagttaaatttgtgagactaatttgtcattaaattgtaatgttcaataatcagtttaataataaattgtatttatggaggaccaatttatattaagttacaaagtttaagatcaatttgtcattaaattgtgtgcatgattaatttattgtactttttacctattcaagtattaaatttaatttttcatgggaccaatttgattatttacccaaaataaaaagaaagcttaataaatttttaatacttggaaaatagatcttttcatattactatctaatatattttttccaaataagtaccttaaaaaaattatgtttcaacgcattatctgtcgttagtcccctttcattaagtgatgacgtgacagacaaaatgttaagtcattaaaccttatcactaaacacatagcagatacaaccatgtattatttattaatttattaaaaaaaaatcatccactgctgcctacccttctcattgctacttttgtcattatcgccgccattgcatctacaccaaagccgtcaacgacaggaaacctccaccatttcaagtatcctttattttcattacccttccacctccaaagaacaatcaatttagatcaaattaaacctccattctcaattggatctcgattgtgatacaccttataaacgaaagttttagatttttaaaaaaattctaaaattagaatgcaaatttgttttaaatgaagtgttcatatttagatcctagcaccaaacaacaccatgaaccaaccctgaaccgtgtgaaccaccacgaaactcatcaccaaaaatcattgcaaacccgccccaaagcacaacaaaaagactacaagccactacaaatccaccgcaaacccaccacggtggcaacaacaatgaattttcctctctttcttagatctagaaaccagagtttttcctttctcaaattaaaaacacacacagacaatctcttttatcaaatcacataagaagaaaaaagaataaaaaaacaaagtgattctgtcgtcaaactggatcccataacgggttaggttgagtttgagtcagggtctaggaggaataataaagatggcaacaccacaagtttggtggaattggtaaaagggggagaaagtgaaaaagaaacaaaaaaaataataaataatgacatggtcatttttgttatatttagtgataaaagtttcatctgttatatcatcgtttaattgaagggaactaactatatatattgcgttgaaatataattttttttccaggtatttagttaaaaaaataatgttaagtaatattgaaaatgatctgttttcaaataagaaaaacttaattaagcctaaaagaagaaaaaaataaaacaaaataaaaatgggcttgggcgaaaagcgttgctgtatggtagtagtagcggtcatcctcattgggcgatggatggatagatagatataaaagactgcctcagtccgtagcataagagagagcttaaaaccctttcgctgcgcctcacccaatcctaaaaccttatctcttcttcatcttcatcttctctcaaaattcattccaatggattcttcttcttccgacccttctcttccccaaacctctcttctcgtctctgaccaatcaccctctctccctcccggttccgactctgagaacgacgatggcttcgtaagcggtgaagagggcgatttggaggccgaacccaccaagcccgttctcgtcaagtcttctgagcccgtcgtcgattctcctcccgacgagtcccacaggcccattgcgaaggtgtccggggacgatgatgacgacggttccgttgttgaggatgcgaacgacgtcgttttggaggaaggcggcgagaaaaggaacgggggaggcagtgaaggagggggattttagcgatagtaacgaggtctttgtggaggcctctggcggtgatgatgatattaaagagattcagagtggtggtgttgctgtggagaatggagtcgaactgagtggtactgataaagggtttgaggctgctgctgctgttgaattgaatgaggaagatgcgaaagagaaggaggtggaggagaaagttaatgacggtgtgaccgataattcggattctgtggtggatgaaaaagtgagggtgttgatgttgaaaaggacgaggtggtggtgtggatgctgttgttgatagcgtcgaggttaatgtgttggggtctggggttgctgctgttggggatgaggtgggggttgatgagtctgagattaaagggctagacgagccggagagtcgtggggtgagtctggataatggttttgagcccattgagaagggtgaggaggaggttgttgataagcttgttgatgggggtgatgagtctgctgttgaccttgtacttgatgatcaatcgggtgctgaaggtgttgttgttggtggggatgatgtgtctgttgagaatggagttggtggagatgggttgacgagtgacattgttgttcctcccgaggaaggtggtggaggttcggagtttgttgagaaagatgaggtaaagatggagggtggtgttgttgacggagaaaatgggagccgtgtggaggagggtgataaggaggaggaggttggtcatcatggtgacagggagattgatgattcggcattggatgggaaaattgggagccatgtggaggaggttgaggagattggtgccaatggtgacagggagattaatggttcggtgtcggatgagaagggcgatggagtggtgtttggaagcaccgaggctgccaataagttcctggagaatttggaattacagcaatcacgtgccagcgggagttcccgggatgatgagaggattgatggccagattgttactgattcggacgaagaagaggagactgatgatgaaggagatggcaaagagctgtttgatactgctacattggcggctcttttgaaagcggcgtctggtgcggaccaggatggtggcagtatcacaataacctctcaagatgggtccaggcttttctctgttgagcgccctgctggtttgggatcatcgctctcgtcaggtaaacctgccatgaggcaaactcgtccgagtctttttactccttccattagtagagctagtgccatttctgataccaatttgagcgaagaggagaaaaagaaactggagaagttgcatgaaattagggtgaaatacttgagactgcttcataggctgggttttactacagaagagtcaatagcagctcaggtactgtaccggatgacacatgttgcagggaggcaaagtggtcaaatgtttagcgtagagtccgcaaaggagatgctttccagcttgaagctgaggcaagagataattttgatttttctgtaaatattctggttcttgggaaagcaggtgtgggcaagagtgctacgatcaattcaatttttggtgagacgaagaccagcattaatgcttgtggtcctgctactactgctgtgaccgaaattgttggggtggttgatggagtgaagataaggatttttgacacaccaggcctcaagtcctctgcatttgaacaaaatttcaatacaaaagtctgtccgcggtgaagaaattgactaaaaaatctccccctgatattgtgctctatgtggatcgcctggacctgcaaactagagatatgaatgatctgccaatgttaagacaattaccagtgcctgggttcatcaatatggcgaaatgtcatagtcactctgtcccatgctgcctctgctcctccagacgggccatctggtgccccattgagttatgatgtatttgttgctcaaagatctcatatagttcaacaaaccattggacaagctgttggggacctacgacttatgaatccgagcttaatgaatccagtttctcttgttgaaaaccatccttcttgtcggaaaaatagagatggccagaaggtgcttcctaatggtcaaacttggaggcctctcttgttgctcttatgctactcaatgaagattctttctgaagccagtaacgtttcaaaaactcaagaatcaccatttgaccagcgcaggctgtttggttttcgtcctcgctccccaccacttccatacttgttgtcttggttactgcagacacgtacctacccaaaactccctgctgatcaaggtggggctgacaatggtgattctgatattgaaatggctgatttatctgattctgatctagatgaagatgaggatgagtatgaccagctcccaccatttaagcctatgaagaaatctcaggttgctaagcttactaaagagcagcagaaagcatattttgaggagtacgattatcgggtgaaacttctacagaaaaacaatggagagaggagttgagaaggatgagagagatgaagaaaaaaggtaacactaaagaaaatgactatggttacatggaagaagatgatcaagataatggaagtccagcagcagtgccagtaccattgcctgatatggccctgccaccatcctttgacagtgacaatccagcttatagataccgtttcttagagccaacttctcagctcctcacaaggccagtcttagacaaccatgggtgggatcatgattgtggttatgatggtgtaaacattgaacagagtctagccatcatcaataaattcccagcagctgttactgttcaggtaacaaaggataagaaagacttcagcatccacttggattcctcagttgctgcaaaacttggagagaatggatctgccatggcaggctttgacattcaaaacattggaaagcagctagcttacattgttagaggagagaccaaattaaaaaatttcaaaagaaataaaacttctgctggtgtgtctgtgacatttttgggtgaaaatgtgtctactgggctgaaagttgaggatcagattgctgtggggaaacgcttggtattagtaggtagcacaggggttgtgaagtctcaaactgattctgcttatggtgccaatgttgaagtgcggcttagagaggcagattttccaattggccaggaccagtcttcactgagcctttctcttgtgaagtggagaggagacctggctttgggggctaatcttcagtcccaattttctgttggacgaggttataaggtggctgttcgggctggattgaacaacaagctcagtggacagatcactgtgagaacaagtagctcagaccagcttcagattgcccttattgctattcttccgattgccaaggctatctacaaaaacttctggcctggggctagtgagaattattctatctactagattgtgtcttttgtttgcgttgctagcaaggaaagtagactacgagtttatcatatcatgttgcttcttttcgtgactgtcttaaataatgagttttttttttttttttttttttttttttttagtttcgtctagactattgaatctcctgctatatagtgcttttatgtgcctgaaaattgtactgcaattgagatggaacctaaaaggaattgattcataaattttgttagcatctatttgaataatgttgatgtcagattatgctgttattctgatttctttgctctataacttctgtttgttggttatacattgaaacctgattgctgagcaattcctgaatatgataatgtgcctagtttgattggcccagaagtggtttgcaactcgtggtatctttatatatactattggctaaaggctttcttttttctcccattttatttctttcttttcctttgttttttttcctaatctccagcatgttgtgcattcttagagaaataattaacaatgcttgtctattgacatttattgagcatgatttagcttttcaagttctgcaaatggactgaaatgcaatgtgaggtttttgatgtcctttacggaagataattttattcgagttaaggtaagatcattaatggatgacaaagcctaacgtattacattatggagaatatgatcgaatcacataatgtcagaattattaattaataccatttttcccattaagatgaacattacgaacttgacatcatagaataagactcaaatcgataggaaggtttgggcctgcccatgtcatttatgctgagctaaatctagttcgtcgaggaaacgaggttgtaatgcttctttttattaactttctctttttatttgtgtacctagttgtgtttttggtgaaataaatttaaaaaatatcttatttcctaagattaaggtctggagtttattttggtacgagtaaatgttccaacagaaaccactctagatataattttatgtttaattgagttattgataggtaatttgttgaatgagaggttttagtcctatgatttcatttgttcaaatcaaatctccatacctttataattaattaaatctaatttaatatttaatttataatcaatttttaatgacgtgctaaagattatgtgagttgacatagtgatgtgacatttaaaaatgggatttgaaatatgcaaaaattgttttatccttgtttggttagaaaaaagaggtttttttttccaaaaattaatgagtttaacatcttcatttctttattttaatttaaatatttttctttctttattttcttttacacgatcaaactcacccttaaggttagatttgaactcactatcctttaacccacacatgagaagtattaaagacgaagaaatggataaacaaattattctttgctgtcattactaaccatattcgtcaattatttgctaaccatgagggacctcaaagttcaaaagggaactgctggcatctttttgttgcaagtatctgattgtcttactgttacaaaaaactgcgtggtttttgttttcttatttaccagaagttgttggatcaaagaaaacttcttagtcatccttgttatttgcccttgtccacctatgaatatgattctattcttatcattaataatgctgctaaaaggttacatgacatattcaacatatatatatatatatattatatatatatatatatatattctttcatcatttaattacacggaaaaacagtcaaatcattatagacttacactaagcactctaatcatagcccataacattcactacctttcagaaaataaagaagcccatagcatttaggatttaagtagagctcctttaaattgtggtataatataatataatgtaacaaaagaggcacatcatatatgaattataactaattaatcaataaagcatttccctatcatggaaatcagcacttctacaatcagcctacttgtgtttttcttttatcactcttctaaacaaaagatatagtataacaaaatttggaaattgacggagtcaaattttgtaacaattaccaaaagtgagtaccgataaatcatgtttgggaatcttattcagaaatacaatagtaatgcttttgacttcaacaacttcttaattattgcgacccagaatttgaattaccaagaacatgaaaagtttagattcataaccttttgttcacatatgaattgatactgatcgtggaatgaaccttacttacgttacctgctcaccattcttcaaatagcatcaatttattctgatgattcactattataagcgcattccaaattctgaagattatgaataattgtcttggcggcttgacttgattccagcaataattgagtagtataattatatataaaaaatacatttcagtccagaggacttgcatgatttcaatcctaagttttttttgtagacattctagttaaattatggatgatattatcaagctagtgtgtttaatattcattattcttaatcccaaacattaaatccacaaatttgaagtaaatgaatttcttattgagtatagaaatgtgtcaagtcaaattctatacccatatctatctccatgaggccttaatttcagggagttttcaacatagtcaacacccagagtaaaactattccaaacaaacatcgaactttaggcgctctgtgttgcactaccaacatcactataagacatacacatttaatatgtctagtcagaaatatggccaccaaattaatcaattttaagatacaagtctaagatcaagttgaatgaaaatagagggattctaaaacacattttacctaaaaatacaattaaatacaataaaattatctgaagaccacttttttatgtgaaaatcaattggctaagttaattttattataattattaaaaatgtaagtagttattataacagttaaattatttaattataatattaatacaattaacttggccaattggatttccaaaaaaaatatggttagttaagtagagaaatttattatttattattaaattttgggtgatatgtatttttagtcaattttatctagtatcttaaaattaatgaatttaattctcacatttttaaataactttttgatgtaacatgatagctatattatcgtaacaatcattgataacatttattgtagccacgccaataaataaatttaatgacattataagtgaaagttaattccacaagtttttagaaatgcaaggatcacttttattaattttgaaatacaaagagtatgatcaaatctgattaaaaataaaggacttaaatatatttattttttaataataaatgactaaattaaccaactattggaatgaatttgtccatctcaacataatattttttattttcatttttcctcgctaaagctcctcacatgagcttcccttcttccttctcctctctctctcctctctctctctcttatattcacgtgagcttcctttatgacccacccttggaaaatatataaataaatataggcaaatattaaagagttcttgcgatattgattaaaaatttaaaaaaatatttttattaaaatatgtaaaattatattatttatgatttcttttacactttcttacaatttctacaataaatgttttttattttattttttaattaatatcctaaaaatactgattagtaatacccataaatataaaagaatgaatcaatttatgcatgttgaattgatgatacaagacagccaagttgggaatttaattattaatcgatattatgtagggtaaataaacacatcggagtatacttgccatttaaattcacagtattttgttaaataccacaactaaccatgacaataataaatgatatcttgttacaattaattgcagaacattacataaacaacctatatataatcgatttttcagactcaaaactgtcgacatgccctttcacacttctttccatctttatatttccttccaattaagtatctcatcataggctttccaatccaagcttctaatataggtgcaatgtcacacaaaaagagagtaaaaaactctatccaatttctatgtatatcaacctagcttacatatttcttgtcgtgcatggatccctttgcgacacctcaagaacaagagtaagattcaggaaaggtgtaaaatgaaagtaaagacattctagagtgagaaagttggtgggaggggtcttgtaaagaaaatagaccatcactcatcacccaaaagtctaggacactcttttggtgcatgtcaagaaatagatcatcacccatcgtccaccaaggaacaaaaaagccttaggtccccccttgggacttgaaggggatctctaccttaatttatatttgtttttctattaagaaattaatgtattatatatcaaaaggagatttcagtggacccaacacaacccattggcctaaaactcctcctcttcaagaagttatggcacaaattgatttatccagaaggatgcaatcatgcaaagctatgcgtctatttaattacagattattacataagataattttattgatttttatataataattattcttaaaattatatttattactataatttttatttacagtgtactttttttttatcttgtcctattattctcttttgatatgaaacatgtaaacttttattgtggtccaaagtcagcaaatgagaaataaagttgagggaggagatcttccaacccatacaatgcttacatttcattcaggccaggcatccctcactcaattacgtacgtaacgtgggagtatatttcgtacgaattttcaaacaaagatgttgctagtatttcgtacgaatttgttaataccaaaatgtcacaaccaatcatgatgtgtataaatcacacgtatagatgagttaaaatgaaaaagaaattacctgtcaaattgtatgaatttaatttgtactcttttgtctagtttgttttcgtattctttatcattttccaatttcaaatcctcgtaatgccgtaatgggccaagtaaaaaggtattcattgcaatttgccttattatggatttgttttctagagaaagtaccaaaagtaaattgcattacgtgcatcgcccatttttttttttaaattatgattggatttgattgtttaaagaaaggaagacttctagttttctgctcaatgttttaattataaatcgttttaaatgttaaataaataattttaaacgttaaataaataagtagtataataattacaaggctaaattactaatttaatctctctatttatttaattactttaacttgggctatctattattaaaattgtaatttgttccttaaatttcaaaattgatgcaatgttctccattctgcaatattttttttaaagattgttatttttatgcatcagaaaattgtaacttatgtttttttatcaacttttttctttttaacttcataatagtattttttatgtaaaagttaaaaaaattattgcataaaaacaaaattaattatcttaaaatcacttttaagcaaatttatgcaaacaaaagttggtgtaattataatcgattatttaaataatctaaatttttataattattcgagacgtacccctttctcaattataccattaatcaaggaaataattttattaaaacgcgttcttttatattttttaaagacattatcatatgatttttaataaaatctttcctcttttaattatttaaccaaatatccttagaatacttgttagcaagactctaaatgaaaaatggtaaaaaaaaaaaaacttaataactaatattttatataaaaacaaaaaagattacatttgttgatttcataaaaaaaacctttaaatgacatttgtaaaagaacaaagatagtaaaaaatagagtaactaatttaacatttatatatcattaacggatactataaaagtggttgtaggattagaattcaagaccatcaagttagaattactgtgtgtttggataccaagcataaacaatctcaactccaaaaaccatagtgaaaacttgaacagttaaaagtaacaaaaaagagttgttttgttgtgattgtaaaaaataattgaggtgcgataaacacaccgtatactcaaacacgcattcaattgattcacatactcaagtgattaaaaggaagactaaaagcaaaatgtaaattcttaaacttagtcctactaatcaatatggttttgacattacaaaaaaactgtactagtatttatttgaatacatttgttgtggcagatgtacgtgcaattaggttattcccttaaccgcgagatgctgtttttaggtcaaagttagcaacctgcaacctttacaccctacaccacactctgcaacaaccagcacaccaaacgcttgtccatatcttcctgtctgctatctcccttcaagcctaacgtaccatgtctacatccccatctctctctcatctatggacatgcatcacatgccccccactcatgcatgcatcacaacccatcaacatttaatttcaaaccatttctcatgaaatgaaatggttttatcccacggattaaccctatacccaaattgttaccaccacctttttttttttttttctttttcttttaaattcacatgttgaattaactactttgcacctaacgttttgaaataacgaattagctaatttgtaccaagcgttgctttaattgatccacagacaaaatgtacttcaccaatatctttgtcttgctcaaagaggagatagattattaattaagcatttttttaagccaaaaggcttcctcattaaatagatgcgtcatatactattttttcctctctaattctgttttaattttattacaaaagtaatacagaataaatagtaataaataatcatcaagagggaggaaaacccctatcatctttaaatataatttggaaatcataatttaacttaataaaattgatttctttataaagaatctaactcagttaactaaatataaaattagtatttttattcttacaaataaaaaatatttataatttatcagaaattattagtatctcaatatcttgttattactttttacaagagcatctgagtaaatttttggctattatttttacaagactccttctatatttctattactttaattgttttatttcaaggtcaggttttacttttggtagtagttcttgatatattctaggaaaggttttaggattctggaagttttctataaatattttagaaaaagaaaataaaagaagaaaaataaaatgatttttttataagttaaaatgagtttttattactactttgtaaatgtatccatcttttgaaaagctatattggtaaacttttaaaaattagctaataaaaattatttttacttatgaaaagttcatctcatttttttttcatattttcttttttaaaatgttttaagaagtttatccaaacatatccccctatttcttttcactttatgtgttaatttggttgctttacttaatttataatgatcaaatataaggattggaatattctttgtataacaatggaattgattaagtggaagtagttattatatcacaatttagtgaaccgatgtttaaattctcaattgaggagtatttatgtttgtattccattatgtcttgaatatgattacattcaaaggaggaaatttggaaaaagaaaacattctttgtagtttcaatgtagtagtatttgctaaaaaaaacttaaagtaaattacacatgctcctttgagatttaaggattatgcatgtctttattttctttaaaaatatacgtgtcttatgagatttaaaaaaattatatatgtcctcgagatttaaggaacttacatgttttaaaaacctatacgaagtcatgtgcgttgacaatttgattaaaagaaggttaaaatatgtttttattttcataaatatgaaaatttcagaatttgtagttgcaaattttttgtctattttcgtccttgcaaaaatttagatatgatattctttttccaaagctaattcagatacattgacctatgtatatgttgttatagaaagtgtcatgttttaacttttctacatcgattatatgatctgaagctatatctgaacctacatataagttatagaaagtatcaattttttaactttttacaataatatacatataagtgacataaaaaagttgaaaatctatagtttctccgataacatatgtgtagctttgaatgtatttaattaattcatgtcaaaaagtaataaatttaaattttgtgagaacgaaaaatagataattttttataacaattttaaatatttttatattatagaacgaaaaaatattttaatctttttaataaaaattgtaacacatatgattttactatttagacgatatttaaagatttgtagtttaaaaagaataaaaatatgtaatttttaaataagatgatttagtaatttttaaaaaagaataaaaactttagtttaaaagctcgaaactgataaaatgcaaaggagaacaatcgtgtactgtttttcaaaagaaatttcgataagtaaaaaagacaaatgatgatattaaaaaaagactgataattttttatttatcaaaataaatgaaaccaaaccatataaaaatttcaccgatgtaaattaccaaattacaattaaaacgtgtaatcattagttaaaaaaacgtatatttttggttctgctgtgcttttgttggcagcgcctaaaagtaagctccatgtcctttcatttgatattctctctctttgataagaaaaaagataaataattatttttattaataaatgtataaaatattgataaattcatttcaaaaaaattaaatttaattttaatcatcaaaatgaaaaatacaacaaattcatttattagttaattttatctttatcattaataaaatagtctatgtgatataaagagatgaaaatatcataaaaatgattgtcaacctgattgtgattaaatcaaaaattggtaaacttttattaaattattctgtcatattcaaaatttgtaaaatataatttaatctcattttttatcattataagtataatattataataaatacttaaaaaaataaaaaaaatataagttataataaatataatattaattaatatacactaataattttggtaaacttataaaaaatgagaaattaagttaattgttataaaaaatgagacccaccttacatttattaattaatattatatttattattattttttctattttttaaatatttatgataatgttatatttataatgataaaaaaaaaaaataaagattaaattatattttattcttaatgaaacgaaatttaaaatctgatcaattagtctaatgaaaatttaatgacatttttagtctaatatattcaacacccaaattataattatttttatgatatttttttggtgttatataattctttcattaatattaataatcaaacttaatgaatgaataaattatcatatttttttattttcaaaattaaatttttattttttggaaatgaatctgtgaattctctcatatattttggcatcacacaatatcatataaagagatcgagacaagggttttgcaaaaaaaaaaatccaagtaaatttaaggagccaccactgttccaaccagccctttcattttacagtgcctgtttgttttttcgtgtttgcattcactgttctacagaagcaaaaaagagtgctttgttccatctctttctgtgggtgtgtctcgagattggtgtgtatgctcaagataaagctcactcactcagtcacagcagcaacaaccctttttccttaactcttgaaactgtgttcaaagtttggattttgagagagcatgatctgatgaaggaatgtggaggctctcttgggggagagggcaaggaagaagaggactactgaaaacaagtgttgcctttttgaaccccaaaaaatacgtttttttttttggttttgttgttatggcactttgtatgcagagtcagcagagagattcagcatcaaacaagcagctcatggattgtggcaagtatgtgaggtacacacctgaacaggtggaggctttggagagggtgtatgttgaatgtccaaagcctagttcttccagaaggcaacaaatcattagggagtgtccactacttgctaacattgaaacaaagcagatcaaagtgtggttccagaatcgcaggtagggaagaagagaaccaaaacatgcatatcattgtttggtttcaaccttgccacatcataaaaaaaactatttttgtcatgttttgtgttgtgtgtgtgtcctatggttgaggatgctcaagggtgtttctgagcttctttctctttgtaaagttgagttttttggtttagtatatttgttattcagtgtttttttttttgcctttttttccttttcaaaaatggaatgtcataaagtgatgtttcattatttgcattttttttaaatgtgttatttgggttcaattttagagaaaaagagtaagtcatccctcttgaaaggaagatctactgggaaagttacttaatttttgtcattttccttgtggttatccaactagttaagatcgatcgtttttatttatttatttccctcgaaaaggagtttcttttctggagttgattaaatgggagataatgacagctgactgttcatttttgttgatgagttttttactgctttcttctgaccttcatcatttttgttttagaccattttctgatgtttctgtgtaagatgctttaacagaaatgttcatatgatcatttggcttttgttttgggttggtcatagataagaggaaggataataacagctgattttaacgacttctcccactagattaatcagttttcaactttagcttctttttttctttcatttttcctctttaaagattttttttttcaggtctctaatattttctctttttgaattacggaagagaggagattatgttttgttctacactctaaacttttctcgaactaatttttcaccttgtccctgcattagtatttttttattaaatcaacatgcatatatcatgtttccaaccttttatctgcaattctgcattgactgattaaaacaagttttagtcttggtccgatagtaggtatctgaatttagtatgtaattcttgttaaggatattcacatgtataatattcttggtctgatagtgtaagggacttgtccaatagtaaagtgggaaacttcaaagagtgaaatgaataatgaatgattatcatacaatgttatggtaaattgtatgggaaagatgacctactctacctgccttacactctgccaattttcttctgtagatgtcgtgaaaagcagcggaaggaagcctctcgtctgcagacagtgaatagaaagctgtctgcaatgaacaagttgttaatggaagagaatgaccgactgcagaagcaggtctcacagttggtttatgataatggattcatgaaacaacaaatacatactgtgagtaactttatctttgagtgattgctcttctcaattatcattctgaatgttcattggtgtaccattctatctatatacaagtatatgtgtagtgtactattttattgttattgaagaatctcatttactggtttcttaacaggcatctgctactactactactactgagaatagctgtgagtctgtggtagtgagtggtcaacaccaacagcaaaaccccaaaactcagcatccccagtgggatgccaacaacccagctgggtaagtaacttcataatgcaaacaaatttgtttaattaatatatactccttcaccatcgtcacgagtctccaattctttattctgccagtcttcttgcaattgctcaggagaccctggcggagttcctttccaaagctactggaactgctgtcaactgggtccagatgattgggatgaaggtatgacttattcaaaaactcttcttcatggtcattgctgcataaatgtattggtataattatattttgcctcattttttctgtcttaatgtagcctggtccggattctattggaattgttgctgtttcccgcaactgtagtggggtagcggcaagagcctgtggccttgtgagcctagagcccacaaaggtattatgctgtaatgaagcttattcattgcagaattattttctttgctgaacaatgaaaccttgttttattgaactaattgctttccacatcatctcaggttgccgagattctcaaagatcgtccatcatggtatcgtgactgtcgatgcctcaatgtattgagtgtagtccccacagggaatgggggcacaatagagcttatgtacatgcaggtctactgattattttatgcaaaaaaagaagttgaactgttgtttaaattacttttaaattattcctctgttgtttttcttgatatttaaatttgatttttttccagacatatgcaccaacaacattggcagctgcaagagacttctggactctcagatacactactagtttggaagatggggtcttgtggtactgagtggaatcttgattgttgtgtttttcttgatttactgtggcttctttcctaggaagagtttgtctcaaagaatgactattatttttttggccttgcagatttgtgagaggtccttgacttcttcaactggtggccccacagggccagctgtttcaaacttcatacgagctgaaatgcttcccagtggctatctaattagatcctgtgagggtggtggatctattattcacattgttgatcatgttgatttagatgtaaggaagattatgctattcaaatcattttttaaatttccatatatttgaacttcttcttcctacttatataactttgtttttgatgtaggttttgagtgttcctgaagtactgagacccctctacgaatcaccaaaattcttggctcagaaattgactactgctgtgagatttcttctaacactgcattatatgtttcacatgacaaaagctgttgatttaaatttcaaatattattgtgcaggccttgcgacatgcaagacaaattgcacaggaatcaagtggagaagttcaatatggtgggggtcgtcagcctgctgtcttgaggacatttagtcaaaggctttgcaagtaaggcccttccatatttggtggttgcatagttgggcatttgattaatcactttgtcttcatcaatccttactgaccaataattttttaaaatttgatttagagggttcaatgatgctgtcaacgggtttgtggatgatggttggtcactgatgggtaatgatggggtggaagatgtgaccatagccataaactcatctccaaacaagtttttcggttcccattacaatacatcaatgcttccagcatttggaggtggggtactgtgtgccaaggcatcgatgctgctacaggtacttctcagaccaatctatgaggaaattatcattgttctctaaattaactctagtatagtagcagcaatcaattccaagaactcttgctccttgttcccccatgtcccaacctgctagaatcttctggatttttgtagtgtttatcttcattatactcaattataaaacggtgttctgcagaatgttcctcctgctttgcttgttcgttttctgagggagcatcgttcagagtgggctaattatggggttgatgcatactcttctgcatgtctcaaagctagtccttatgcagttccttgtgcaagacctagtggtttcccaagcagccacgtcattataccacttgctcatactattgagcatgaggaggtattaatcattttcagggaatgattgatgaacttcattttataattttatttatttatatggtcattttccacccactacaatgatgcagttcttggaggtagttcgtattgagggtaatgcatttccccctgatgatgtagctttggcatgtgatatgtatctaatgcaggtaaatcatttttgtgtttgggttgtttgtctgcttatcttatttaagcaggaacttgatgttactgtgaatgatttttatgtaccttattatgcaatttgatgtggcagctgtgcagtggaatcgatgaaaatgcaattggagcgtgtgcacagcttgtgtttgcacctatcgatgaatcatttgcagatgatgctctcttactgccttctggtttccgcataataccattggatcctaaaacagttagtgacatttctcagtagcttgatagttttaagggaattggtcatgaagttattttgttaggttttttaatgtttaattgccatttcactacttcattttatctttagtttgagggtctaaaattagcatgaaccatcaggtgaattcataattgtcatatcttggtgcttcttttatacaatttatatctagactgtgattggccgactaaatttatctatcttgaagtcttagttcacatttgtttcaatgaagtaatttgggcttttagcaaaaccaagcctttcttacagatgctatgctactacatttgagcatgcattgactaacaagatttcttttttctgtatgttttgctttcaggatggtctggcttcaactaagacattggacttagcgtcaacactggaaacaggatctggtaatgcccgctcagctggtgaaagtgattgaataactacaaccttaggtcggtcctcacaattgcatttcaatttacctttgagaaccatttgctggacaatgtggctgttatggctcgccagtatgtgcgtaatgttgtgcgatctgttcagagggttgccatggcaattgctccctcaaggctcagtacacagttggggccaaagtcacttcctggtccaccagaggctcttaccttagcaagatggatctgcagaagctacaggtttacaatcttccattaatcttgtctgtaagtctatttttgtaatgattaatgtattttcctaaattatttgatatccttgtcttgagttgtcttcaaggttagttaaagtacctatagaaacttaccttgtatttgttaacttggttattcaccttgtatttgtaatttttagctgtgtcctgtaattgtctgaaaaaggctcagtttcagatacaaattgcacaaatttcaccatcttatttcttgtgtctggtatgatatagtaaagattgttttttcaggctccacacctgcacagagcttttcagcattgagtccacatctggtgatgcaatcttgaaaaaactttggcaccatccagatgcaatattgtgctgttctgtaaaaacaaatgtaaatcattgctgcatctatataatcctaatctgcctcaatttttatttttttccagaagtttcttgtttttagtccaataaactcagcaagtaagacatttgagtgccaaaattatgcaggcatctccagtgttcacctttgcaaaccaagctggacttgacatgcttgaaacactcttgttgctcttcaagacataatgctggataaagttcttgatgaagctggcaggaaggttctctgcattgagttctccaagataatgctacaggtgattcacttgtaaactaacaatgtctagtctttttagggtgtactttttttttattggcaaatgttagttgtagaatgttagttttgttagctgagggggatcaagttttgacattttctccattcccttctcccttaaccaattcaccttatatcccttttagtgtgtacttgtaagaattgtttacatctttttcaagtcttgactataattagtgctcttatcttatttgtcctttttcatatcagggatttgcatatctgccagcaggaatatgtgtatcaagtatgaatcgaccagtgtcttttgagcaggccattgcatggaaagttctggatgatgatgattccaatcactgccttgccttcgtgttcatgaactggtcttttgtctgatggggggaaccatcatttagatactttattatatctattaatttatattgagtactttactaagatattgtcacatcaacatcgaatgtaactaatgtctggatttcgtgaactcatggttgtgtgtgccattagattagctttgctctatgcttttaccaaggatgtacctttcttactatataaactccttgttgaagtatagcctacttattcgcaaaaattatcctttagtggcagtttagtttttatatttatttatgtgaactcagtcttttaatttataaatctcacatatatctttttggttttaattgaactctgcggcattgtgatttatgtagaccttcctagaataaggttttttattgtcttgatatctttgtagatattagagtgagatgcaaaagtaggattcttttcgttttaaaataagtcagatttagattgtgttacttatattaaaaaaaaagttaataaataaataaaagtgataattttacaaaattagttttagtattaatattacattgaaagactatagggatatttattgggaatattagtaaaaaaagtaattaatatcatgttaaaaagttaaatatgaatttactttggataatttttttctcaatgtgatgcttaatttggtaaattcatgaattaaatgcgaatgtcggacttgaatttgtcaaaatactgcctaaaatatgaaattacagaaggtatatcatggattgatgcttaacaagcttgatttgtaggtgtaatgtgttgaattagggtttttctttgcaccttattttagaggcgttttgattttgacaacagatccagcaggattgcattgttattgttcccggaacatgtcatgattgtgttttacttgtttgttgaaggaagcgtgtcttgatttcgacagaatcaatataatgagtgagatcttagaaggaatgttttatgaccaaatttctacctatttatcgtttgtatttctatttatggtcgaggaaattcaactttctgtctgtcacaattctttcttttcaaacaagtaatgtgaaattctgaactcctcgcagtgggttttgatgttaaacttaagattcaagtagtgcctcttccttctagagaatttaaaactaagatatatttttcttatttaaaatattacattttttaaagagactattttatatgattgagtgtgttaacaacagtgaattatgattgaatcaatataaataccacttaccagtaaccaaatagatttatttatttatacttgaccagaaaaaactatgacacaaaaattagcagtttattgatcactaatttgattaaaaatgtttgtgatgtgaagcagatttacaagtgacaatatgaatttcctagaaaagtagaaaaataagaattgtatccgaatctagccatgtaacaggtatttgtattgtacctgtgctataatatgcatctggagcagcttgaaattttgtctcagttacatatttgccataatggattctctttgagagagcctgcagtcacaagaaaacaaaagttttcatcaatgtaacagccaaaatttatgattacaatctctacttactaagagaaatttctgaagttttcaaaataaagcaagctaaatgttgactaaggaaactcgcaagttacaataatctctctatggaaaccaagcactttcatgcagaactttgcacgaggcctgatcctgttttgggagtcaccacatagtacagagtttaccttcttaggaaaaaatttccactaatatgatcctgttataataagatcactttttttgttctggcgtgaaaatgattgtttcaaaaatatcaaaccaattggtcttgacattgcacatgtaaaaagttaagttaaataccaaaatagaaataaaaaaggatatgaaatgatggtatagaatatagatagatacgtatataattgataataatactatgctttttaatatgaagtaaattaaataattcaaaaaaaaaaaaaaaaaaaaaaaaaaaaaaaaaaaaaaaaaaaataaataaattaaataattaaaacacaaggtggtacaacccctggacatcatttcaatatagaaatgaatttaactaaaaggcaactaatgtgtaccagcaagcatattaagtttacaacaaaacaacatggaatcagagttaacatcatctcccttctggctattagtcggataggaactctgaggtgaaacctccatactttatcattatattaattgaatcagcaatagggtgcaacacctattcatacacgacaaagaaattcagtatagatgcaattagcacataaaagatgaaccaacaaattcattaaatatgtagcacacacagacatttgctagatttttagcaacaatagtaaataattatttcatgtcacctgactaaatagatagcaatgaaacaaacacatgctgaactctgaatcaaaccatgcctaagctggaagatgacaattaacatgaacaacattaatattgtaaaccaataattcacacaataaaattacccatgataaagcaaagtcgaatgaaaaattgttaggccagccaattgatctcctaatattatcaagggattttatgcttatctgtttttgttattaattagacttgtctgattgttattaatttgaatttatttgctttgaattgatgataacatatcaagttgttatatacacctccaaagcaatagaaaggctgagtcattatcattcaattatgagtaatgatagacgcacaacaatttcttcaataaattgtacaacgaatgtcatgtcagccaaaaaaatcaaattttaattttaattaatgaaaaaaaaaaccatcggagaaattatatgggaccaccaaggcaactatggttctattaagtaattttgtgatacatggacaaataagatacaacaaacagaaaggtaacagtgttatcttttaacagaataatatcaaatttaaatcttccttaattaaattaacccaaatcttttacaaatcacatttatgattgatatcaaattcaaaactttcaaaagtaatactactctatcatcaagtatgtctatcttctcccacgttttgaaaatcataaagttctgtcattgttataccgtgaaacaaccacgaaagctctgccatggtttatgcatggttgcttcccagaacaacaatgatagaggtggagataagagagaccataaaacatgaaaatctgattatttgtttttggtataaaaaatgtaattagtattgaacagtgatttttttttgttaatggaaacttaattatcttttttgtttgttattaaaattaaaatttgatttttttggctgatgtaacatttgttttacaatctgttgtaaaaaaaattttcgtctatcatttctcttcaattatctactacaaaaatgtttaattaatttaaatggactaaaaaacagtacaaagggacattgataataaattattatttgcgtacacatccttactcttattatatagtcaagactgtcaagttctgaccatatccattgtactccgatgcctccaaatttcatcattttaccttattttaataattacacagagcattggtcataccgattttgtactaaagtttacacacgactagaatagagacagttaggtaatgccaatgtcacactcatcactcatgctttgtctgtttaggaactttttttttatttagatggtgaaaattggtttattttttttaatcattaaatgtgtgtttggattatcgttgatagaattgatgttagatcaacttggttttaaattaacatgattttatataattaattttgaagtaacttaattttgtttggataacatatattaaaaaattgatttttcaaaaaattaatgtttgaatagtttgagtcataattgattttaagtgtcaaattattaaaatagactttaatgtctttgaatatttatttgttattataatttgctgtttatatatatatatatatataaacaaattaaaattaaatagatatataactgacctttgagctactactcttaccattttttaagaaaatgatttttttatatttttttatatatattattaactgacctttgagttaagagagtccagtatagtatctgtaacacagcacaagattccagcacaatgttcgtactatcgttcaatgcagatcctatgaactatgaagtgaagatggtaataatctttctttaattgagagaacaagtaaatataataataaattttcaactaccaaaataaatgaaggtccaaggaaatataataaatgcaaataaaaaataaagaatgtacttgttcaattattaagtatagcatttgcaaaaagtataaaaagtacaaggattttattgtggggaatatatacataatgatattttatattttcttgaatcaaaatcactgtaatttattgtggttacatccccaaaccaaacatgctctaaatgattgctaaaacccaaccttcctcatgttcttagatggcatgtctcaattttttttttaccttaatgactcttttcttctgaataatatcaaaaataaataaaatagcagcatgtgaaaaacattttgtcatgttttaaacatttaaaaaattatatgtaaataaaaaaaatatttcatgtattaataaatcacgtgtattatattaaaatttatttatttattaaaatataatttataaaatatttcaatgtaattttttttcaaaattcataagatattctagaaaattattaatattgttttttccattttggtaacatttatgaaataataatacgtattttagacattaaatacaaattatcaatatatggctaacataactttagaaaaataaattagtattaataatataaaatattttttatattattaattaatcataaattatcatataaaatatatattattataataaatatcttaaaaattatactatcattaattttaattgattaagtaaaattattttaattattgatggatgtgattaaattctaatttttaataggataactctactgtcattgtagtaaaactttttttatttgttttcttactaataacattctaaaaacttagacccgttagtttattcagtgaatggacaaatgttttcaaacaatataaaaggtcttatttatttttatgttccacaaagcccattttcaccctatggccataaacactttctcacaccacaatgcagcacttgcgttaactgccagaaatagttaattaaatttttaatacaggaagatcttgcactggaagtgggccccactggatcttcagcgcatttaaagctagtataacattagcatccatcccatgtatgtatacgtatgaatgtttatgtatatgtcctaaacatatcatgcatcattcgatattatcatgcatgatgaattgatcacatgtcactacttttttgtgtctgtgttttcttttatttttccgaaatttggattgtccccggttaagtaaaaggacccttaattttttttttataagataacaatgatacatgaatttaaatcattttaattacaaatacaaattacaaacaattacatttaaattatttttatttgaaatattgttttcactttgttattttttattaatgctaaggctaaagttaaggaacaaatttatcaccgcattaatttcaaaacaggtaaataaatagactaacttttcaactttacaaaatcaaatattaagtatatgaatcaactcatataatattattttaatttaattaaaagttcgaattcaaattttaatacgcaacacttaagaagaattttattatacataataattttatctaattcgataaaaaaataaaaaaaaaaactccacaactcggtctccattccattttaacaagttggatccctttatttttcctctctcttatggtgcctctttatgatcgtcccaaaagtaaacacgtagatcttattagcatcaatgtgtggggaaaaagagagattcaaaataagcacaattttgcatgcagtgtttaatatggcttctgagcatgtaaaagttggaaagatatactgtagctctcaaaatccaaggaaagtgcgtatctaaattcctagctcttgtaatgtcacgttagggagtgagattccagatgcaaaaaagaaacacacatcgttgtcttgcagccttgcaggtttaaaagactaatcaaaacaacaaattaaagcactggagaagaagaaatcaaatactagtggggtaggaggatatttgtgttctgttctgtcatcatctgtgaacttttcactgttttaaacatttccttgaactcaactgggtattaatttctacctcttttgcttcaaatatgtaatatggtacataataatcttttggttctcttaattatgtaacaaccggctcgttcggtgtgtgtgtgtgtctgaataggactttttggattgttttgtttgtttcggttctagagttaataattattgttgttttattgtttttgggattttgtgttgggtcacggctactcaccctgtgaactttgggttaataacttttcttttgtcataacgacaatgaccttaagatttaagaatgctataaaacataacttattacagtagatcattttgcaattagggtttctttggtttaatttgtgatttaaccactctttgaagatcttttaactgaaaatcaaacatacacttaatctcttaaagtaggattattaattttattatgtactacctctagacttaaaatccatgtatacatatatatatatatatataatatatatatatatatatatatatatatatatatatatataaaagacaaaactaaagaacagaaggcagcccataaatttctggactagtcatgataagtgagaaaacttatagtatatatagtagataaataggtcagaaagggtggctcatgcggaatgaccgaatgatgttaatattaagcactttcatattgtccatatttagataaactccttgctaaacatttataagtaaagaaaaaaaaacttaaaggaaattgctaacatactttcacttttttcaattggaataggttaacaataccaaaagttttggacaaaaaattagttttttgttttaataaatttctttaggaatattaaagtcatttagtatttattttatttataaaaaaaaaaactctttctctctctcatctgtcatatctctcatcgatctgttaccttacctctttgcatttcaccaaaaaatttcagacttcaacatttcgttaactctcaagagtttggttctaaaggtgacaggaacaccatcatcgactttgggggcacctttccgttcattcaatccgttaagtatttggttgcccaagaatttgagaacctgttggccaattacaatagaaccaaaaaaaaaaaaatagaatgaatgttaaatgactttaatatcccttaagtaatttattaaaacaaaaaaaatactttttttttccaaattttttggtgtagataacctactccaactgaaaaagtgtgagtattagtaattctcaaatttaaaatgtccatatacttattcaaaagcaaatttagaaacagtttttaagcattttcaatagactcttgttatttacaccctcatactccctttctacctcttaactattcatcatattatttttcttaaagaattacacattttttatttttggaaatgtatttctaaaattacatataccattttgaaaatgtatcttcggaattataattcataatatcaagatatactttgaaatatgtatatatttttaataaatatcacttaagaattaagatgattgatgagaaataaaaaaaatgattaatatttatcttatatccatatttgttagttttattttcattctatcattagttatctttaaatcttatctaaaatcttatttttcatcttatctttattatcctttaaattctaattttaaattatcttcactatatattcattatataataatgcgttttcatcattactatacaatattttgtatttttcttcatgtaaaaagcatttcaaggaaagttcatcactaacttcatgtgggactgaatcattgatatagacttgaattaaatgaatgcacttaaaggaaataaactattgtcaaaagctttgctttgtaattaaggtgtataaaatataaagttaatgatgattgtaccttgaaacatagtgccacatgaagaaaaatacaaaatattgtataatgatgatgaaaacccagtattatataataaatatatggtcaagatagtttagaattagggtttcaagaataataaagataagatgaaaataagattttagataggatttgaagagtactgatgataggatgaaaataatactaacaaatatggatataagataaatatttatcatttttttatttatcatcaatcatcttaattcttaagtgatattttattaaaaatatatacatattttagagtatatttctagaactatgaattatagttctcaaatacattttcaaaatatgtatatatacttctagaaatacatttccagaaaacaaaaagggtgtatttctttaagaaaagggtataatgaataattgggaggtagaaagggagcatggggtgtacttagaaatatgaagtgtaaataataagagcctttaatattagaattttatttcatgaatcttgttaacttttaacgtgatccagatccagaagcataacaaattggacccataggctcggttggtgctaatcaaacgatgcgttttgcggtgttaacgaaagagaaagacaatgaaggaggtagagcaagtgcagttttgttttattggttgagaagagaaaagaagagaataatgtcgtcagagaaggaaacagagagtcggaagttgggttcggaagaaatttcgcgcgagttcaaaaccctagtcagctccaatgatctccactcccttaaccacatgcaacacaccatgtgcgtgtcacaatctccaattcaatttgtttgtaactttgtgtgttcgttaattgattgattgaaatgtgtttcagattgggaaggttgcaggacagcaatgcggtcttgtcgcatttcaatgacttctctcagcactgcttcgctgagatttccggcgacatcgctagaaacacgcgtgttttgaagtctgtcaagtctgaccttgattacatctttcagaaactcaggtattctttttcttttcatagccttggttactctccatgttagtaggtttgtgaaatatgggttccaacttttctatcattcttgtaaggctataaatatatatatgaccatattagttcatcaatataggccaagtttttactctttactattttgagtaactagcaagtgatattagagccccaatcaaaatggcctgattctttatagagacttggagagaatatggcaacaatagtggatttttgccaccagttattccaaagtttggtggactgattacttgagtatgctcatggagaattttctgcaatctaattgaggaaggagttcaacatagtgaagcacaaaagaaagccattgagggtgcaagagtgaaagatatgaaggcaaaaaattatctcttccgaagcaacggatcaatgctagagaccatttttgaacaatatatatctaaaagcatctaggacgcctggaagaaaaagaatcaagggacagtgcaagtatagtgttgggaatgtcaattgcaaatttccaaactttaattcaggtgagtggttttgagatataataaattgatgaggaaaaagtggtgactattttgtgtgtgtgatgataatttctaagggggttgagtattggaattgtaagaaatacttaatcggtgtttatccaaaaactcttcaaaagtcatttgccgccattataagagaaatccctgtgaagagaagagacaccaccttaagttgaagggggttcatatgaaggaccgaaaatcttaaatagaagagatgtgaagcaaagatgtgagaagatctcttgtgagtgagagtgttatcatcccttgtaactcttgagtgggagactcgcgtttgtagggtgataaactatttggggagggtattttcaaatttgccagaaaacttgtaatcttatttgagatggtgcatatttgttgagatgtttttgtggatgtaggcaggtggtgtcaaactattaaaattatgtgtctttcactatttctatcagtagtgtgttttttgtgtgtgatcctatagtcaatctttcttgctgcagtttcttgcacctgtcaaatcatttacataaggagaattttgaataattttaatcctgatcaaagtgatggcacaacaattttctatgacagttattcagcaattgagctttcaaaaagtctgtttttcatggccatagctagcacatagatgtcagatttcactttcttcgtgatctcacggggtggagttgtaaagttagtccactgtcatactcaagaacaatttgcgaatatagtgaccaagccattaaagcttgatttgcatgtaaagctttgaggtctttgaggagtatgtgttggtccaaatgtaaactgaatgatttgatattcagtttaagggaggatgttgaattgttaacatttgcattagtttgactttgaactagtctttagatattttagtgatttccttcttttagaaattagatattgacttccattttaatctcccattagtaggttttactgggctgcaactttatgttattcttgtacatctatatatatggttatattatttttatcaacatagctcaaatttatctctctcatattttgagcacctacatgtaaaaatgtcctaatttgaagatgatagttgagaagggagtaagaagcaagtggatgattttgttttatattttgaagaacttattcttatatgctatgttcaaagggtgttattgtgaagctaggttatcgatagcggccgtcgcgatcgcggatgacgtggccgcgatttggtttgtagacctaggtcgaaaatacgctcagtatttaaagggctgggttacgttcttgtgcgacttgccttgactacttttgtgcgaccttcgttcactcgacgtacctgctcggccagcagctcttccttctccggcggcactttgttctccttctccgtcgaggttttgttttcttactttctttctctccttctcatcggtgtctcacactctcaccgtctctttccttttgggttacctctgtttcttcttctttcttcttctttgtcttccttcccttgtcgttttcatgcctctgcctccgccatgctcaatcgagaaagagagaaatcgagaataagtcacgaggtctcacgggttgggagagaaagagtttttttataaataacattagtgtttttttttattgggcccccagattgcttcttgcactccctttattgcttactttactcttggttcatttttttttaattaaaaactggacttgtttttaatgccaactagggataatctattatttgttttatgattttccttttattatattttattaatatgaaatacactctatatataaaaacattagaatagcggtcatccgctatccgctatcccagtttgagggtggctgctccgctccgctatcgggattgataactatgttatgaaggagcatgtcagatataaaatcatttatgttgtgctccacctaacaacttaagcctttggttttcttgtgtttgaaaattaatagacagatattcatgtaactccttcattggtcatgctcctagggaattagcagtcattcttcttatcaacatatcacaggatgttttaatggagatgggcctgctgttccctctgtctaacagaagaagaaactggcttttcaagtcataatcaattctgcatatatttatttatttatttatcttcagttgtctgaaatgaactgtcactgtacacctatgttgattcctgctatttcctgaggttgatctacaggaaaccacgaatttctcctctaattggttctatctccatactccctgtatgggctttctctccggtctcaagcaaatcaagtttatcatatatatttgtctcacaaaaaagattagtttcttaaatttcaatgatgtcccaaataaatacattacaataatacataatttagttgaattgttatacttagtgttggaggctttggttgtgatcgcataggcataaagttttccacacttgttattgtctcctcatgtttttgttcatatggtgaatgcatttttgggtttcgacacttccatgtctctgtatctggttccacatttcgttttggacctggtctggcttgacaatagctagctgatgtattggtctaagatcaatcagcagctaggattttagacaaaaatgggtaaggctacttagtgtagagggaaatactttagtgtagtatgtacaggtgcaaagtgcaatgtgtctgcaactatgctttttatagatatctatcctgtcttcaagttcaataattaattaaatgcctgaaatataaaggttataattttaatagttctataaaatgaaaattcctaatattagtatacatatgccttattgacattatatgtacataaagactagatgattttcttttatgttttctcgctataatgcttcctataataagtgttttctctagtattgtgcacaaaaagcaatttctttttttttttctgtagtcaagccagaaacctttgagttgagcacctcgtgtctacagttggaacactttctgttctgcaggctatttagtcattattgatttgtgctcgtcttcagtaataaatagtaataaaaaaaatatcaaatgtaaaaatatagtttgggcctttggcacagtgctggggtttgtaaacaatctaaattgaagaagaggtaaaaattggaggaaaacctaggttggttattaaccatatgttgaagtattgatggcattggtaacaacaggaaatatggtgaaagagaagcaagtaaacagtaggagcgaagccaaaaaggcccaaagctcaattgtggcttcctaacaaatgaagagatggaaatgatgataactatggaattgggtcttgtgttatttgcttagatgcaccatttctctgtatgttacagcttataagtatcgagtatcctagctagattgctagtgtctacattttgacgttacaaattactaagttttaggtcttcacccgaaaaaaaaattacgaaattgaagattgccacatgtgataaacatgatagatgataaagtgaggcaacagtaaaagaaggattgaaagagcataaggtaactgtatataatgtaattaaacaaccacctatctgtgcatgctaccccccaaaccacacacacatttctattttttgtgggttcttattttcttattttatttactttacgaagtcttgcattaaaagcttggttaaccctctcttgcagaagtatgaaatcaaaaattatggcaacttatcccgacgcttttcctgaagactcaacgagcgaagtgattgataggagaccggatcttgaaatgcccaagtaactaatgttattagaacacagattagaaagagttatatgagagtttgtttttggtttttcttctactcttgtgataaacttgtcctatttgtcttaaacgttttaccagagcttcttgcccttaattaaattctctaaacttttgtctatacacttttatactgacagtaaatgcattacgcacaaatgataaaatattttcagatagaactttggttttgttatgggtgactatggaaatacgggtggcggtggtgcaactcgtgcggttcactaaaaaagatgagcaaaacgactgaaaaaagaacgagaaaccctcggtcaacattatcatttttaatctctgaaattataaaagaatctaaattttggaaattattaaattatctaaatcgcgactgtcttatggattaatatgatcaacaaattttaatttcattagttctgtatttccgagatgagaaatactagtgacagtctaacattctttcaaatactcttttataattagttaaaatttattgaaaatttaatgattatttctcctaatttatattaaataaaaaatgaaacttaccaaaattgataacttttaataaattttaaccaatcatcgagagagtcttcaaggaaaagtgtcactagcattcatcttgttgagattactattatctttgattctatatataaaaaacatcaaacaaatcattaagatcaagaaaagtaaggtcccatttaatgtcatcataaatttaaattatattacaaaaatacccttaaatttaaatgtgatattcacatttaatgccaatactcataatccaatgaataagtaactaaaaaattttaaaactaatcattatttcttataactagtaacaaaagaaaaacacaattcgtttcctaaaaagtagttatatattcacaattcagatactaaaatagtaattagtttgtgggggtcaagtgaggtggtttgataatacgtttgagtggagaattggggagggtagaaatttaagattttggaaggacacgtggtgtgagggtgggtgtctaaaaaacttgtttcctagaatctttgttaattccgaacaaggagaagctaccataaaaaaatatgaggaggttggagtatggtaggtgagggtggatcttatttggcggagggagtggtttgagtggagaaggccttggtggaagaaatgtatagattggtggatggtgtcaccatttcgggacatggagatgatgcttgaatttgggtggaagattagttcaaattcattcactgtgagatccacctatgagctttacatagattaagagattaaggttttgttggagttaggagaggaaggaaagaaagagatttaagggaagggagggaaggaaaatgagggaagttctttcctccttgtttgagagttaaaaatatattaagagagggaaatggagagttgataagatagatacttttacaattttgtccatacttcaaaaattaatacactctatatttacaaataaaacttaattttaaatttgtagctggataggatagtaatttattgcttttccttctaaaaccccaaattggggaacaacaattttaatgatttggaggattcagaggagttttaaaatcctcaaatcttttcctcaaaaattaaaactctcaaacaaggagatgtcaccacctaaacctttcccttccctccttccctctaaatctctctccaaacaacctaagagttggagccaagagaaggacatctttatgagcctatgtaagatcaaagtgccaccatagttatccttttttatttggtgggtcttcctaaataggcttccttctaaggatatctcattaagagaagcattgatcttgaggatgataatggttcctgccccctctgtcacgaattggtcaagaacatttaaatcttttattctcttgtcctgttgcatacaatatcggtacaatgtgctaggggcactctcaccaaaacagccttgatttgattggtaacaaggctagtagtgggcaacaggttggagtgtcatcgtttggaacttatggcaacaaggttatgttatgttgtttgaaggaaaaccttttgataaggagcaactatggcacaaaatcatgttttctatgtggacttggttgaagtcataccacagagattttggtgcttcattccagcagtgacagtgcaatccctcggcgtgcttgttatgaggagtgatggactttctgtatgatgtgtggctgattgatacctaaggctcgtatcttcccgtatgcaggttctgtgtaaactaagattcgacctcttttggttagataggcggcagacatcttctggtttctttacagctattgtttcataggcctcaatttttgaggatcccgatgtgtaatctttgcacactttcttgtgcagttaatgatgtcatttgcttaaaaaaaatattaaaatagtaatttactcatttaataaattaaatatattaaatacaccgagactaacgagaagtcatcaagacaagaatgaaaatgtctttatagggtagcttcctacgtctgatacaactagtcaactgttactttacagttttaccgcatgtattctagctatgcaacatttttttcgacaatggtggaaacaagccatgaatgaatttaacgcttcaggatgccacaattaatcaaaaagcttgctagattaaaaaaaaaaaaaagacggacatgtagtgtagtaacataataaggccaatcagtaacaaatgtgattgatttaattgaactgtggtgttaataaaactaaagaactaaatctgagatactagctaaaattgacggtgaaaaaaatcttaaaagagcaggaaggactactagaacaaaaacaatattgtgacctacttcatagccagaaaacaccctattacataacagattgtccacaaatataaatctttttccagtatgcccaagtcaatcatcggatagaaaataaacagagactaaattaaaacgaaaactcaaaaacttaaaagccaactatatttcagtatttcccaccttgcttctacccctgttgaaagtaacaaagtaagctgctctgcaacaaagtagatctaaatgtacaagacaggaaacgaccaaccaagtaaataaaaagaaagaaaaaaggcaaagtgaaggataaacccgaacaaaaaccaaaagatataagcatcttaggcagaaaaccctaaaaaacccaaaaaccctaggagtaaaccctgttaggagctaaccactgtaaacaaaacccaatgagaagggattggtgctagcattctatgaactaactccgcccagccaatctcaatatacagatctttatcttcactaggcaaccaatcacactatcttcagactgcaagagaaggcaagacaaatcaaatcaggcggtaccaaattgctgataaatatacttctaagaaccaatatatgccactgaagtgggttggaccgcctccttcgaacacattagagcttagacaccattagaaacaaccccattggctacaatcttactctcgggaacaactggtttagcaccctttggggcatctccagtttttgtagcagatccattctcgggaactttgtggtcatcactatccttctcagcaagggtagactccttgagcaattccgagctaacttcagatttttgagtattaacttccccatttatctcaattttctcatcagcaggtttcccttcccatacctgcatcagtagagtaaggtaacaaaaatacatcatcagcacacacaatcaattatttcacttaattagaataattgaaatgtgacttgcctgctttgggaattgttgctttgctttcttctccaaaatagttttctgacgggcctcatagaagccaaaatcatccagaatgcatgtcttgctggtatattccttgaaaattttaattaatttcagcccaggctccaacattacctgcaaacataaacttggttgatcagattaaaaacaaaactacattacaaagaactgacaactacaagtgcagaaccaaattacctcttgtgtatccctactgttagtgacaggtttgttctcattgttgtccaaggtaatgtgcctcaacaaattgttaggaacatccttaacaatgtgccacttaagaggaaagcaaccattccacttgtcttgctgccaatactcaacactcttgttaaaatcaacaggaccaaccatctcagcaagccccacaaattgcccactggtattaacctgcataggcacataacacattagctatatataaccaaaactgcaaataagagtaatgacttccatcattcacagagatacttactgagaaaaagagaaaaacaggggcgccaccaggtttctgctgtgcctcctgatatgcagcatcaagcttcttgttgccattttgtgtactagcccacacattatacttaatactcttatggatatcatcctcgctgtaagacttgatgacaaaaaatttggcatcagtatattcttctggaaaatcagctttgttatattgatcaaattccagaatggtatagtcttgtctttctcttcatctgtgcctaaacttgcaggcaaattctgcctttgactgccaaaatagttggtgcaaaacctttttggttttgccacccttggccctaggccctctgttcagttcgttcaaaccatctacgttctcattgccatagccaaagtagccaccacttcttcccctagttttgtatttactgtcaacagctaaccaagcccgtccattagtgcgagaatcatacccatgtgtaccataacccattccagatctgacgtgttcccatattgaccatatagtttgtttgggtaatcctatttatgaagctatgggtggctcccatggcaggcattggtcttgggtggtgcaacccctgacaccaaaaaaacaaattgtgaataaataatcataacagcagtctagatagaaacatgacagtatggcacactaagctctattagaacagcacagatggaccaagcaaccaattattaggactttacggccatcaaatttaacaaatagaacaaagtaaaaccagacacttcaaaataggatacataccataaactgagaattagggcggaaagtctggttccttgaggcagcgttgttgccacctgatattgaagaagtgatggttgtgctacttacaggccttggctgcccatctgaaaataatggggcatctagccaggggataggtgagcgtactccatcaaaaccaaatcttggatcctgataacctgaagttggccacgacctggcatagcaaccctttcatttgatatttggaactaaaagatgaattctgattgacctgtttaatagaagcagcagcattattacctttcgcgttgccaccatttgcaacaccattagaatttccattggctgcatcaacagggagaggcttttgatcagcagctacagaggtggaaacctcaccctgaggtaggacagcaggagtaggtgtgaatggcgcactggttggtgttaacggttggaaatatggagggtactgatagtgctgaggcccatacaactgaccatcattccccatggttggaactggagaccctgctggcgaataggggccatagggcgcatatccatatccatggtgataaagtagagacccattatccccataaactccctgcaaatgttaaaatatattaatgtaaataaaacatttgcagcagaatgaaaaagcctgcacaataattttggaaaatgagaaggaaaaaaatacttaccgaagtcatctcaactccttccgaattcacatatctagaataatcatcccactcgttaccagttccatcatatcctataataaacaaaaccatgtcagcttgaataagatttacgtgtttcgttttcagaatttttcaaaaggtatttcatgtcgtttttcagaagcacttatccataaacttaccaccgtaataataggcagtagatgggtaaccatttgggaggtaacacatagtaggatcaataaaatcctgcaacacgggggttacagaccggtcatacgactggatctggccattcgcagcatttcctgaatcaactgatccatactgattcccagtggcctgcacaattgaacaaatccactcaataccacacaattcactaaaagaacacaaaaccaggtacaaatacatctcgctgaacattccaaatttataccactaacacaacagagtgaaatcgtgaattttcaatagcagccataaaaaatacaagcttttaccttcttggtaggctctggaatctccaagggcttgggctgtgtttctaacgatagcttctgtagcaaatcagttgcttctgtgcaaacagcagtaaaggaacacaaaacatctcgaaaaattgaacttttcaacaaccagaaaacctaaaacccgcaacacacaaataaaaattcaaaaaacctaaaaaaaaccaacaccccgcaatcccaaacgagtgaatcagccataaagtcaacaccgtcaaaaactcaagcagattaacaagaacacgagaacagaaaaaacccaacacccgaacatcataaatcagcaagctacccaactaacactaaaagatcaccctaccccgaacccaaaaatcaagtttcagaaacgaaaatccaccggatccaataaacgattcaatacagcagaccaataaaagacaaacacgagagaaactgcacagcagagaaggatacgatccgcgggattagcaacggtggccatgacgaaccaaccacgagatctggtttttctttggaggaggaatagagaaacggaagccctaaatccgaatctgaatcggagagggtttaagcctcaaatcgaaaagttgagaaaaccctaaaaggagcgaagaagagagggaaagagaaaaaaaaagaaaagagagagaagagagaacacaacgggtctcgcagccgccaagggtttgggtttttggggagagagggttttgttcctccaaaagcagtgattcaaatagcaccaccacctctctttaggcactctcgctctctcactcgcgggtcactctgtgatctcattcgccttctcccattggtggatccagccacgtggcgcctctccaccggactttttctttgtaaattatttctacggttggtctgtcgtgcttgtttctttaaggtggtgggtgatgttagtgagaccccttgtgaatcttgtagatgcggggtttgggcaaaagatggaaaccctaattagaaaatgacacggatgtcctcgtccagctggacttgttgtaacccttcttcgatttttttctttgggcaccttctgtcatgtgctccaccacacacacatatcgtgttcaaattcatttccagtttatcagaagaaaaaataaacaaataataattaattatatatttaaattttatacgttattatgcgtttcaattaatatttttaataatagaattcaattattataaagataatttggattttagctttaagaatgttggcaaattttatctacgttagattaatcgttttaaatttgaaataatatataaaatgtttattattattaaataagtaccttcgatattaagatacgacattttcaaactatttgttggtcaagatggggaagataaagataggaccaccgcttacattgttttgattaaatatatctattgtttgataaatcaataagataaaaaatatttttctttgccgtaaaaaacacaaatttattttattttatttattagatcaaatgtttaaatttattgaataaaaagtttgtcttatcttaaaaatagaatagaaaaaagtttgaattacaatttcagtccctattttcacaaattggcattttgattctcttgatttttatttagacatttaatccctctaatttcataaattcacgattttgattcttctatcaattgacaccattacatgctcaccattaatccttatgttgacacgcttactctgaaacacgtttgaagtgcaagcattttctttcccatacatgtatcgatcattgcttcaatttcacttaaacataacaaacaaacttgtatgtgcgagtactcttctgattttgatagagaatctttagttttaacgaacatggtataggtataagtaacatccaatttttttaaataggattgggcatgggtatgtacctacctgtccctacccatacccatatccgacaatataattactaaattacccttaatgtagtattgtgtataatacacaattaattttattaaacttttatacttactaatcattgtctatttttttaagactaaaactaaaactcttaagcaaatataagtcataagggattacaatctctctcaagtaggcatggcatcttgacccgcatccgtggcatccatccgaatccgcctcgatgtcaacggggaaaactgagttgaccgatttcgggttcgaattcgggttcgggttcgatttttcctcacctgttgaattcggggcggggaggtttggtaatgttgataaccaccccccccgccccgccatgctatatttaattatttacaaaatacctttatatatgtggaacaccttggaataaaggcttaattttattcaagaattaggagtataactaattttattttccagcaataaacatctaatgttgaaatttattgtaattacatacaattgggacttagcgcgatcaaatttttgctatggttgttgtttaaattaattttttaatagcaatttttaagtgttcggggtggggcggggcgggggaattttttagcccatcggttttcggaggcggggcgggggtggttttgagggcggggcggggtggtataagtaaaaaccgccccgactcgctccgttgccatgcctactctcaagtctcatgtttcaagacaattttaggtgatgatgactaccaagacatgattgtttggattagatcgttttcggattgcaaacttcaagactccatggattgttgtttgaaacttaaacagaaaaatggaaaagatgaagaaatgatggtgaatgccgtcacgatccgtaacgaagcgataagtcggaggaggattgtcacaaaggaaagcttccttgataagaatcaatttggtttcattcaagaatcaacaggagactaagctctcaatgcaagcaaaatgcttaatttcattaatcaaagttgtccaaaaatagcatagtctgagtagttatatagctaagcctttaatgatcgcctaaaaacgtaagttaggcctattttggtaatattaaacccattacaaaaataaataaaattacgaaagtcctcgcagaggtggcgcgctgagcgagacaagtggcgcactaagcgagcagaggtgtgctaagcctaaaagctctcgatcaggaattgggctgagcgagccaaaggcgcgttgagcgagcagaggtggcttgctgagtgagcaaaggtggcgcgttgagcgagtagaggcgcgctaagcctaaaagctctcgatcaggaattaggtgagcgagccagtggcgcgctgagcgagcagaggtggcgtgctaagcaagaagaggcgcgctaagagagctcacccataatcttcaaggtgcttcaattcagctctttgtgtcttccttcattcttgcccttgttaactagtccagctatgattctcttggtcatcttttcttgaagaagcttggctttgaccttgtcattggacccttcaattcatggagtgcttctagaacttcataatcttggatagtcctctattaggtgataagaatatgattttcatggattttttttattgtgataggattttatattgggtgatggcaagttgattgtctaagcttgactccttgaataataatatatttagttttgtttaaaaaattaaaattatttttatgattttttgtatttttttaaattattaggtagggacggtattgggcgggtatacccaatccccaatgaagactgtgataaggaaaaaattcatacccatcgaagagggaaaggaatcacatattcatccttccccgtctcgttgccatgctaatctcaccactcaacaccaacaaaaatattaaccaaacttacccttctctttgtaacaatatcaaattctcactatatactcccattgattttctaccactttttctcctttgttaaaaaataaaacagtgtgttcccattccctaatccctacatcgtgcccatgtcccttaccataaaacataaaagaagagagcaaaatataaaaaaaaaatcattagtagatctaaaaaaaaaaaaagccatatcatatctaaaataaacaaataaaatagaaagataaattggagagagagaaaacaagaataaggtgatgcatggtcaaaatagtgtttcctatatctgtttttgtgtttcatgtatttggggagaatggggcttagaagaaaatcaagtggttgttgggatattcgcaatgagagtgaggttgaagagtgtgatgatgtgtgaggacgagttcaaaaatgttatgaggttcatcttcgcaaagtgtgcgctgacaataacgacggggagggtgaggatggttcaaaagcaaaagtaacaacaaagggtatggtgggaacattgattaagattgtggtttggttgtggtgttttgttttgtttgaattttgttgtttatgcccattcaaaaataggatttgttttgcatttctctaactcaggattgaatttggtgttgtgttcattaattcatcagtgtttttttatttgttttctgtctattgaagattgggatctaattttgtctcctgttaaaatgtaagattaggagcaaggtgaaaagaggaacacctgacattggggataggaatggttatggtaagagggatgatgttactcaacgttaaagtatagcggtcaatgactaattgacggaaaaaactaaaaaaatcatttttaaacattaagaggaccagtatataaaaatcaggaataaaattgtgaatttgggatattaagaggaccaaaattgcaatttagcttagataaaacatactttggtttggtgaccttataatacttatggttgatttgaaatttttgggtattgattacaataattatggaaaataaaagactaaattacacaaaactattatgaggtttgtaaaaaatatataacctctcttttattgttgagacattacttgtacccttttcattttaacattgtttaacctcatttacttattttctatatattcattgtgtccctttgaatcagtctatcactcttatttgtttccaagaacctcacaaactacaactattggacaacttatttagggttctaaagaaagggaaaattcatgcatttgttagtcgttgacaaaccaaatagcatggtgaacgggtgtaatgagctcgtgcacgatttgaaacaacgatgttaggttcgttcttgattttaaacaatggtgacgatatttgatcatgatttgaatcaggggtggtaaggttcgtgcataatttgaaaacaacaatggtggggttcatgcacaatttgaataatgatggtgaaaggggttgttgcggcaaagtctaagctttcaaacaacaaaaaaggtgaaaataaaacaaaaaagagtgtaaagcaaaacataaaagattagaggttgcataccgaagcaccaaaaccatgaatgttaacaaattattggttggaacgggttaaccaattatttcaacaagttcctatagtcttcatatgcagaagagtcactatcttatattgtttttttcttttttacattaagatattataggttgaagaaaagggtatttgggagatgttatttcaattaaggtcatgtgacaacaccattttctcatttactaacaacttaaatggagatagtggcttagggatcataatatacactcttaaaataactttcacatggtgcataaggaatttaacttacacatcgtagcctccatccataaaacatatttatacatgatttattggttatcatatgacacaattcaagagtgtaaattatgattgatcattcaatacattaaaagtaaatgcaagggaaaacagcggagcaaagttttggtaaaataaaataaaagtatattttcatattcaagatggttatgcttggagttttataatatcttttaagagagaactatttctcagtttttttttttcaaaaaactatttctagcatcctcttcaaaagatatgagcagaaaaaatatatatatatatcaaaaagggaaacttaattgaattgaaaatgtttttgaaaaaatataaaagggaggtatatatatcattgcatgtatagcgcaaaaatgctcaagttcaatttgggttgttaaacaagctcaaacttataaaagtacaattgttgagcttttaacgacttttgtggcttggcttgtattaagatgtgattgtctaggaataaaaggttagtgttttatttatttataagctagaaattttgggtcaaaccttagcttttcatccaccatgttcggaccgacttaattgatctaacccattccccccttttaaatatgagtatttatgaaccaacccaattcaataagaatcaagaaaattgattcaaaaaattgaaaataaaataaataaataaaacaaacgaatcaaaaaatcaaaaaatcaaaattttattggattggataaaattttagatttaatttcaaaagtcattcaattcaaaccaaatggaacttgttgtacccatatatatttattcataattgataatatcactcatgtttatattttatttttattatttgtaaaattattacataacttatacatatttataaaaaaatatttaattgaagatcactttttactaattttttgaattaagatgcttaaatatagttatataatgacatataaataaaataattaaattagaagaagccatagacgatatcaaaggaggtggggacagtgaagttgttgtggttggcgaaggtgacaaagttgatgagggaggtgaggagtgagttgacggtgtcttcgtaggcaaaatccaacgtgagctttggcggggagcagacttgggcaagagtgataggcacagttaataaatgatgattatttaggggagataaaagaaatataattttaggagggtgcaagtgtaataaacgttaaatttagggcatgagtataatttgctctttaaattaatattttctcaaaaaaataaaagtatgactaaaattgaaaatctatctgatcactccaactgtttaaattgaattggattaaagttttgaacaaaataattggataataaattaaacaaattcaaagtgactgaattgaatgatattttcgttcaaaatcatacaatccataaatagtcatacttctaaataaaaatgtggattttaatttacgaatccaattatactactcaattaatattagacagccttaacttaacagggacagttttcttaaattcactaaatcattagaagttccgatcgaacatctaattcttattgcaaataataatataacatatacacatacaaaatctcaaactttagtttcaccaaggtgaaggtgaaaaggaggagggggaggttacaaacactccaaacctgttgatcagtccgataaatttgggtttgttcctccacagtaacacttggatcctccattaaaccgtaatttgtcatggcaccatggcaatctttaccaacatcgcgcacaaggttgcggcaacaattttgctcttttccggtgttagagaatatcttctggagcatttggtcgccacagtttgaacgtaacttgtgcgtgcaattgatcatatgatccgcataaggttggagacttggagtattggaaatcctccttcatgtccagcgcagatgtctttcaagatatctggctaataaagtggcaattaccgcaaacagaaccattattaggcaaaacttgttaagggtccacgccgtgaccactgtttatttagatgaaatctgattattgtggggtgtgatgaaaagctttgttggtataggagctgaatatgtagtaagacctatttacagttacaaaaaatgaagtttaatttcaagattcgtattaatggatttttgctcaagtctaatgaaacaaacaaaataatttgatcattaattactgttatagttaagttaataaatggaaacctttgctttagcattcattacgtgctttttattcccccagtaacgaaggacttgtttagagtggcagttaagtttatttttttttaaaacaaaacattttggttgagtcgaaaaaattgagacatcaaagttatatataatttaaatcactagtaacttaagtccttagtttttaaataactttattttatttttataatttgattataatagaaatatagtcaatataaaagtttagattgaattaaaaacggtcttaattaaaataaattatttctgtaaattgcaggcacatttattataattcaatagttatacatagttaagttatgcatgattattcctcaacaaacagtcccacctcaagatcttgaatttgctcaatacgtgggtcctcaaacttaaaccttcgaaccaccattctctctcgatcttcctgcttgcaagaaaatccagatgacagtccaaccacatatttataagattttaaacaacgtttggtatactccagttcagccaacaataccttatttgaatccttgatatttaacaaggcttgagactggagattcagacttggcaccctctgttgccacaactctcttttgagatgatgaaacaaatagttagaaatcaaaacaaatgtaaaagaacttaaccaaagaaaaatcaacatgcagaagatacagctctatttccatgttttgaaacaccattggcagttgatttcccagccttagctttcgatgttgcaccctttgaaactgctctaccataaattcctcaagtggtcacttcatccatagaaaaagacattgaactcttgcaatttatacaccaatgcaaaaacactacccaattcaacaaaataacacagatgtacttttttttttaacaagtttcgttttcaaagatatatatcactaggcacaagtatttttcaagcacattggaaaccagaaagatggagttctacagtgtatggcattactagaatcttataaccagtagctagtgtatttaatgcagctttcctagtttcaccatccagttctgcagtcaaatttgcaacaatttgcaatgactttagctgccactaatctgtccacataatgcaaggagtaactattcaaggaaaatactgaataggaaaaagaaatcattaaaaagcattagtaacattacctctgcaccatgatgatcaataataaatccaacaagatcggcacattcaattcgagttcggttattctttgagcgcaaaccctgtaatatataagggaaacatttagacgcagaatatatggcaacaaattgttttgtcagctccagcattttttctcgtacttctcaatgttatgccctaactgcaacattaaaataagaaatgaattgtgacttactcatctgtaacaccctaggaagtacactagtcaaacctagtatctatgtaaaccaaaaatttgctgaaatcaactataccatcagaaagattcactggaataacaacatcctcaggtgtcacaaatactaaagttgctaatataaaccttctctactaagcacggaagaaacactaccccttcagaatcggtcaaagagtacccctcgtccttcaaagtgtcaagcagttcaggaagaaattccagcacctaagcaattaagaaaagataagactctatcgagtaagtatactcctataaattaaattgaataaagttaagactaacagccgacatctccatgacaaggaaggaaaggaaaagaagaaaactgaaatcacaacaaaaccaaaaataaattgaaccttcaatagacatgttgtgtttgatttgcagaactgcaacacaaagcacctcagaagaatgtccaatacttctacaacttccttagcaatggatggaagtgcctgaaatgtgcaatagcagtttgtataagttctagtgcactcaacacttcaaaagaatgtaattcacaaggttaaaagaacaccttcaaaagttctagccgatgtagacagcgtactgatgatttgaaggttaaatcctccaccagcctacctatcacctcatttacctacatgctcccccccaaatgtaaattaaaaaagtcacaacagacagaagactaccaaccttctagacgctccttccacacagcactttttaagagtgatagtatccgactgtataagagaacctattcggctttcaatctctttaagactcatctcagtaggctgcataatgttagataaacaaaaattgtatgataagttattacagaaactgtgtcggaagattcagatcagggagaagacaaacagatatcaatttaactcaacatccttaggtggttcaactgattttgaagccttcacttgtggaactccacctgttttttttgtttgtccctgactttacaatccccccttttcttagcaacaggcttgaatgtgcaaattattgagcatatctactcgcatgcatataaaataataccatgttaattttacaagcaagaagatgcaatcttacaactgactgaacaggtctctttccactatgcatgcctgctgctgaccttttgacaagtacactttcagaggtctgtatgcaaatcaagttaaaagtaaatgccagtctccaatatatgctttcaactttaaaattaaaacattcataaattttattatatccatctttaacatggttctcaaattcctgtctaaaatccattagcaatttagcattcatattcccatttgatattaaagcaaagcttgggctcacattttcttttcataccaagagttctgtctctattgctcacaatcctgtgttccatagctgcaccaagcatatggaaataaatgttctttgttcgggagaaaattctggccaagcagctatccattgtgcatattcctgccctggatcaatggactgatgttctcaccaaacctctctctactaccagatttaactttctcaaaagcaaactcaatgtaaaaagtttttcttctgaaaacttttccccttgagtttgaggggggatattagaatatgtaagcgctgttagcagatagtattttgctaactgtacctctctttgtataagtgttagtttctgttattgacagttagtttttattctgtcagtatcagatcaagaggttataaataactcagttttactaagcttcaattaacttttcataataagagaacaatattcagagttactttctgttttctcttttctcttcttttcattctgttcaacaggaaaggaagaccaaagaaagaaaggaaaacttgggagagaacttccaaactacatatagtccaacaaaaataaccagtcaactctaggtgcaacacataaagaaatgaaactgaagattagtcaaactaaactaaagaaaagaaaattaaacccacctctgcagaagatgcacttacacgtgtattttacacagaagctggaacatcattatcaagtgtcagcataaaagaatcaaatttacacatttaaaattaataaaatcactatatagagagccaatcaaactaggaattttgaaacataagcaagatttgggaaatttcaaacagtgtaactgaccatttgagtgttgcccagcatatttatagaaatttaatgtctggttgaggcataactcgaaaagcaattatcagcatggcagtaggaatttattatgtgattatcatggtcacttttaatgggtcatatccaaatcaatggaattcttttaccaataattattataatcaatggtcaatctgatccaattttaaataggttggtgccaaaatagagaaacagcatatgttcaaagacattggcacatacactagtaaacccaactttgaaaagcatataaggttgttaacatttaagaaggcaggtgaagttcaacccaactgcaaaagtcaaccccctaatttgagaaaggaatcagccacgtgcatcacagattgaaatagttaaagatgttcaaagacatgggcacatacactagtaaccctaaatttgaaaagcatatacggttgtaaaaggtttcagaattgaaaaagagaaaaaatcttcaacttcagaaatgaaatatttttgtattaactatcccaactgaaaagtagttacacctgtagtatttatactagagctacgtgtgctgtttacaactgtcataactgacagagcagctgtcaactaacctaaggttgttttttttatcagcaaaaataattatattaataaaaatatagtagcatcagtacaagtagtactactaagattacattttcagaatgcaaacctgcagaagaagcaccaggcacagcatcttcagatcctgaaatcatttccgaaagctcatttcttctaacatcatcaagtttctccaactacctctccagaggtctcatgccaactgactataacagagtgaacaatatgatgctcaaaatctcaaacagcaaaagcacattcacaagcacgcaaacagatgtagttgtaacaagttttaccttagctattcctgccaatactgaaaaggcagcatccctgacttcaggaataccgtcatttaggcactgcaatatccaaattttagcattttaaaaaggtgaataaataagtacaaatcaaacatcgacagtgtactttaaaaaaaaacaattgaaataaattgaatcctataataaactacagctcagaacttgaagactatacatgaaacaaataaacacgactgtaaccgaacagtttattacatcaagttcagagtagtcctactcctacaccaaggatagaagggggtcaaactgatatttaaataaaaagagctaaagctgctgaaccaaataaaagccagagattctaaatcacttttaaattccagcaggaaaataagagcattttactaaacaaattaaacggcaagaacaaactgacctacatacagattggcacatattccttgtgcaccttcgtaataaaacccttgttacttgtttgaatacaaaaagtcacccaggtcaaggttaacgatcgcacaagatggactttgtttttggtggctgtcttaacatctgcaacagattaaatgtaatacactcaacaagaagcaaacataaaaaactattgagaaagaatgataccttaaatagtgaggttaaaagaacaacaccttctgcagcatttcaagtccatcaacttgcttcttaaaatctgcacttaagagtcgcctatgtaaatcctctctgaaatacttcatcctatcattctgcaaattgcaggcacatttattataattcattagttatacatagttcaagttatgcatgattattcctcaacaaacagtcccacctcaagatcttgaatttgctcaatgcgtgggtcctcaaacttaaaccttcaaaccaccattctctctcgaccttcctgcttgttagaaaatccaaatgacagtccaaccacatatttataagattttaaacaatgcttggtataattgcgaggacgataactggacagcaactaatcctccaatgctctgcaacgacaattctgtagtttgaaagcgataatagctctcgattgattattatacatattctcatctaaacccacctgtatcgaaaattatatgaccgccacgtgctgtatgccacggcatcatgggaataatgtcttcaaaatctgactttatcaaggaattttttctctttacctttacagaggttcaagagacccacttttcaatctttccatccacgtttgaagcccggacaatgttttctcatccataggaagtacctcaccgtgcattgtattctcagtaccaacatgctctgatgcatgaggaatctgactaggaggaggaagtccctgattgaagttgtcatttgcacttgttaagtgcctgccaccagatactgtactaccagcagcagctgctaattgcatgcctcttcatcctctctctgtttgcatccaatgttccactggtagttcatatgcaacttctccaagtcaacattctttcttttaaaattaaaaatagattcaaaacaaatagaattatgttaccgtacctcctgtcataaatctatcatttctttggtcacctattgtgtagtcagaatttaatgctctagaagtaatgacaatcacagccctattctcctcattgtatgaggatgggggttaaaatttgttggctcaggtttgacatttaatttagcatcaccgaatggatttgcgtttacaggtgagaggtgaaaaatcaggggaagatatatttaaagatgctggtggaggggttggcatcggtaaactcaaaggggttcttccagctgcagcattcttctccatctgccaaaatgttaatatcaattgccaattgtcaaatactcaattctactactctaaatcgctggtacaaatacaaaatgcaaattcaattaagaacatgtggtaatacaagtaaattaactaaacctgatctctaatgtaggtgcgaaatgcctcactagcattttgaagctgagcaaatatgtcaacctgagataaagcaccagaaccttaatcaattgagcaaaaatgatataggcttaaggttttattaaaatcataacattacatcttatccaaatattaacatgaaacttgaaataggtgtgtttgtgtttggtacggtggaactcaaggaaggagagaaaattttgaaaataaaattttgatttctgtttctagtagtcaaattttctctcccttttcctttcactttcttaccaacgaaacaagaaaatgcatagcaatgtgtttcctttcttctttattttcttttcccccaatcgaatataccattaatacttatctttgggtacaattgggtaatctgatatagttcatatagatcaattgtgcaagtttgcttctcccgaatcttcttaaatatagcagccagctctggctgcaatttaattttaaggataggaacagagtcaagggtaaatagcctttgaatttgcagtaaaataggatattagggaagaataacacaaataaaaacataatataaattagaaatattgacatatatatcaattgttattaggatcgcaaatcaaatcgtaggatcgtaagatcctaagtttagccacttctgcgctgactgctcatgggatcattggtgagtgagattagcgtatagttaatgggatcatctgcaacccaaagttcagtctagtgatgccaactgcaaccaacccacctccagcctgcgccccaccaactgcgtctcttctttggctcaacgaagtgcaaactgcaaacaactggctctacttatgtttttttgaaaatgttatgaacttaagttgagtagtgtgttttcgaaatactgtatttggatcttatgacttattgtgatttgatttttcaataagtttgtttaacgttgtgaattagaggttattttctttcttgtgttgtttttttatgcatgtgtgtatataattttgaattttaggtagtaggatcttacgatctaagtcatgaccctttgtagaaacttgagtttaacaacaattgatatatctttagtgcccaccaaaatactgagaaatagagcataatgattgagcatcagccgaaagggtgccccaggctgaattattggttgctgaatctccccattggttttgtctcccaggtccagatgcagtcaacattcttgcagcagccaaagtctaaaatacaaaagtgagaataaatacagtataaataagtctactcctacctcaaaataagttaatttgtttgaatttatacctcaagattaagttcaatgtaggcaaggatgatgggttgaggtttagcatcgataggaaccattgaaagatgaccctttattgctgcaccacaaagcttgacaagttcatgcagaacagtttttaccattcgtaaaggtttgtcatcagcaccagccctatacaacattagaaaataaaaagtggttctggctttattttataaggaaaaaaaagaagaagaaaaaagtagtaactctacccaacaaagttatataccttctcctaatttcctccattcccaagtcttgcaggtacaaatggatgctttgaagcatgcgatcaaggtcaacatcatagatagtactctaaagaacctgcagcacaaacaaatacatgttaataagattacaatgaataaaaggtatcaagacagaatttggcaattttaactctgcttcttcaccatgaaaaatagatcataatggatttgtatcttgaatatctaatagatatcagttatacattctggcccattatataatcatccactaaccaaaaataatataattcatcaaatccattaaatatttcagcaattgtgcaaacggtgagcaaatatgaaaaagtgtgcaagccatgaacagtggccttgaatttgagaatggaattcaatcaaaaagggagaggggagtgggatgagtaataagagagcagtttgttgcattgattgtgaactgaacaatcatccattcaataagcataaatcatacaaaaaatgaccaaaaggccacccatacctaaacacaattagatacataaattttagagtccagcacaaataatcaattagccctgtgatccagcaactattggtttatgggctatattacatccagaccgataatatttataaaaaaataatagttaagtttatctttatctcatatccctctagattttactgatgactgcacaagttacctttgtaagcgtgataaggcatttcacaactagatcggagaacttctgatttcttgaagcaagatttatgggctatattacgtccagtccaataatatttaaaaattaataaaatagttaattttatctttatcttatatctttcaagattttactgatggctgcacgagttacctttgtagcaatttcacaactagatcagagaacttctgatttctggaagcaagtgactcatttgatgctggtgaaggccacctggataaatctagtggccgcaaaagattgatcaagacaacaaaggatgaattcctatctgcattatcctgaattgacaaacactagttactaaaataggcccaaaattaatgaatttcacaataaaactttaaccatacctcaatattggaccagcaagagatctagtcatttctccactttgttttgtgacatcatacctgataatggaagcaataacataataacatattcactgttatctatattaaactttttatatttgataatctacacaaaaaacaaactcttcacctaagcaaaaagattttggaaaaaactattgtacaattcataagggaataatgcacaataaagattggtattataggttggcactaatgacaaatgtgtaactccaattttgattagtgaatagtactaaaacacctaaagaaatgcaccatagtattatgtatggattttggaggttcaacctccaggcttaatgacatcccataatatggccatcaaaacaagagaaattatagaggggaagaaagagaaggaaccaaaaaattattttcaacttatctgcaacaagtcactcaagtgacagattcgtcaagggattattaattaagaattgtaaaccacaaattgaacaatttattatatgcgtttaattctccaaattcgcacatccagacatctactaactggctcagcctttttttcaaaaattactttctttaactctattttcattacccctaaaaaattccatactataattcttaaatctcgacaatcacagcatagcttcccacaaaaccattcatgctcccatcatacttatttaaaaggcaaaattagcaaatatgctcacagtaaacaaatgcctaaaaaagggactcccgtcttgtttgttttcattttatagatgatgatcaggatcaaaagatcagagcacaaattagaaggaaatttttaaggcattaactgaaaagcataaaatacagaacaaattggaaagaaaagacacacccattttccctgaccgagcgccttaaaatgcccttgcttcaccaggctttccttgcttcttcttttccatctcccggacctagtaaattacacaaccaacatctcaagaattcagtatagcaaaaggagaaataaacaagtaaagtatgtactgaccttccacttgaatctatcatctaacatgctcttttaagcatcagttagcttcccaacatatttccatatgtcctcacctgcatagcaagtttatagaaggaaaataactatgccaggccaagaggtatgaagaaaagtaaccataatttagcacataaactcctcaagtggtcacttcatccatagaaaaggacattgaactcttgcaatttacacaccaatgcaaaaacactacccaattcaacaaaataacacagatgtacttttttttaaacaagtttccttttcaaagatatatatatatatatatatatatatatatatatcactaggcacaagtattttttcaagcacattgggtgtagtgtgtgtttttggggggtggaaaaaataattgtcttgagtgggaattactgtaggagacagtggtctcttgggaattaggaattcatctctcctaattctttctactgaattgtaaaagctattcttggaaggaataaagattcagcgtattattcagaactttctgtgtttgtttgaagattcaagaacttctatttcttggttcataccaaaccacatattcataagattttaaacaacttttggtatactccagttcagccaaccataccttatttgaatccttgatatttaacaaggcttgagactgatcttgaaaatatattgattcagacttggcaccctctgttgccacaactctcttttgagatgatgaaacaaatagttagaaatcaaaacaaatttaaatgtacttaaaagtacttaatcaaagaaacatcaacatacagcagatatagctctatttccatggtttaaaacaccattggcagttgatttaccagcctttgcttttgatgttgcacccactgaaactgctctacctgactcaaatgactctaaagaccgaaaaaaggaggagtaagggaagatatataagcaccaattcaccaacattcgcaaagaagaatgaaccaaagaacgtgccttgaaaagctccgtatgggtttaacttctcaacaattagtgtcggtgctggtccatgaatgtctttaatcatctttttaatctaaaaataagtaaacaatgaagatgcttgatattacaagaatattaaggaaacaagggaagaaagcagcattcttcttatacacataccatttcatgtctactagctctcagtatctcattaatacaagctctgatgccttgcgaacatcggaatatttatcctaagaagaactcatcatacattttgttccaagaatatggaacattagaactaattcgataaatggtataaaaaatgaaaaagcagaatgcagagtaaccagatcatactgtcattgcagaagaggaaggcttcagcagttgtgcagcttcagcaaaactacttaacccagaaagttgcctcgataaccaataaaaatttttttacgtccttctgcaccaagtttagagtccatcaaagcaattgcaatatatggaacctacaggaaaaccatgcaaaggacacagataccaagacaaaagaatgaaagaacacaggaccagcacagaacacagaccatttcaaccagatggacagcagccagccaagcgtctaatgtattcagcacacgttctctcatgtgcttcttgttgtcaccaagacatttcaatatatcaaacagaataccctgcaacaaaccatttccagaaatgttcaaacagaaaacaacaccaaatggggggggggggaatacgaaaacagaacagaatccacttaccttgcttgccttctctacagcttgacccattgctgatgcaacattgccaattgctgtcaaggaagccatgacaatgtttttgttgctattaacaagtcgtcccctaagaccctaaacaacttacctggtaataaaacagttaggaaaaattaacaaaataatcagctagaaatctagaataattaccaaaagataccaagcaacttatccatttggggaggaagttgatgaaagaggagagtaaagagaaagagagagagcataaggttaaaaaaattataaaaaaaatgctaatggagtgccatttccagttgcttgaatgcgcttattagcctcttccaatattttgtttacagcatcaacagactccatacgaacctataataagtaatgcacggcaacattagaagcaatagcacaataatacacttcttcaaatactgaaagctaaaagcaaccttaaaatacaaaattaaaagcaaattgctcgctcttatcaaccaaaccttccaatcagggccatgaaactagcctatctgcatctttcacaagttcattcatagcacttccttcaggatcactagtggcctgagctaactcatgacaaacaactttcattccatcaacagactgcacccaacaaaataaattttgaaattcagagttcaacctccatttttgaaaaccaaaaagagaatagggggaatatctcaaacataatatttaaaaccctgcatagaactaccctcatcaaacataatatacctaaaatggattcttctcatactctgtatccggggcactgagcagtgcaggctttaccatcagtaagaagaaaccctttaatgtctgcaaggagaaaaaccttagagccttgaaaacaaaattgagagaaatcaaaatttgaaagttaacgcaaagtgaccttgaccaacaaatctatgtagaacacccaagaacttaattgatgcatttctagtagcagcattacttgactgcagcccaatttctttaagaaaattaattaaatcctgaaataggatttacaataaaccatacaaacttccaacaaaaaacaaaatatccaaaaaaattgtaaattcagataatgcaccttcagctttatatgtgagacaccaaaatcttcaacagcagaaaccatccacaaaattccctcactaagaaccttggggttcttatgctccttcatgatcttgtaaagctacagtaaaattcacagtttttcaaacattatttgataatacttagataaacataaataatgtgatatacggccaaaagttacaacctgcattttatatgaattcccacatatatcttagattcttaaaatgtgagtttaagccttactcataaggtgagggttgtcccccacttatattctctatcttggtactatctttagccgatgtgagatttgggttttctccaataaactttttgtcaagtttcataaaaagaatttttttcccttactaaaatttggtaagaaattatgagactacaatgaaatatacaattttacctgattatctaaatagtcaaaaacttattaaagaaaaatgtatatgctacaatatgtttctcatcaaagccgcacagatttgaggtatgttcccacctcataatcttcagataataagcaatggataatcaaaaacagtgcaaaacaatggcattaaactgcagaaaggcaattcaattatttaaaacagtgacaacaaaaaatgagtagctaaataatcataattttaccaaatgactcttccaacaaaaataaaatatcaagcatgtccttcccagggcatagatttttacgattcacaacacaagctaggatgcactgaggtggttatcccttataattagacaatatgattataaagcgcaaccatgcttactctttcaaaatgaatcctggacaaactgcttcagacaaggtactcagacatttcatagcatgtgcacgtgtcttaatatctgctacacgttcacttagtactaccaatgaaaaacaagatacaaatcagaatagtcattcacaaagtaaacatatcactgatacaagattgcattttacaatagtgcgtattattaccaatagctaaattacccacctgaaaggcaaagtactacgtagtactttggaaatttagttgcagttgaacctatatgagtgataacttcaataacctgctgctgaacctgcacaaggaaattacaagcattaggtcccatttataatatcattcctacatttgactacaaatcattaaaataaataattttaaaatacaaaagaaaatatttttgaacctgaacatttttctcgccccatccaggtaaactgcagactaaacgaatcaaaatttctactgattggtcaaggtcctgtaagccctctacttgctgtttcagtgaagaaatggctgcaaaagtctaacttcagcaaccttacttgtcaagcatgtccaaagacaccacaggaaaatcagaaattaaacagactacatcaagtcatccgtgaatatggcaggaccaatttgaatttactgacccaaaaatgcaacaactataatttacaccaaaatatgaaaattcaatttacaatacaaggaaaaataagagcattttactaaacaaattaaacggcaagaacaaactgacctccatatagattggcacatattccttgtgcaccttcgtaataaaacccttgttacttgtttcagtacaaaaagtcacccaggtcaaggttaacgatcgcacaagatgggactttgtttttggcggctgtcttaacatctgcaacagatccaatgtaatacactcaacaagaagcaaacataaaaaaactaatgagaaacagtgataccttaagtagtgaggttaaaagaacaacaccttcagtagcatttcaagtccatcaacttgcttcttaacatctgtacttaagagtctcccatgtaaatcctctctcaaatacttcatcctatcattctgcaaattgcaggcacatttattataattcaatagttatacatagttcaagttatgcatgattattcctcaacaaacagtcccacctcaagaacttgaattttctcaatgcgtgggtcctcaaacttaaaccttcaaaccaccattctctctcgatcttcatgcttgcaagaaaatccatgacagtccaaccacatatttataagattttaaacaacgtttggtatactccagttcagccaacaataagttttttgaatccttgatatttaacaaggcttgagactggagcgctatatcttgaaaatatattgattcagacttggcaccctctgttgccacaactctcttttgagataatgaaacaaatagttagaaatcaaaacaaatcgaaagtacttaaccaaataaaagtcaacatacagaagatatagctcaatttccatggtttaaaacaccattggcagttgatttaccagcctttgcttttgatgttgcacccactgaaactgctctaccataagttcctcaagtggtcatccattgaaaggggcattgaaatcttgcaatttacacactgatgcaaaaacactaccccattcaacaaaataacacagatttacttttgttttaacaagtttccttttcaaagatgtatatatatatatatatatatatcactaggcacaagtatttttcaagcacattggaaaccagaaagatggagttctacagtgtatggcatacctagaatcttaaaaccagtagctagtgtatttaatgcagcattcctagtttcaccatcccgttctgtagtcaaacttgcaacaatttgcaacgactttagctgcccactaatctgtccacataatgcaaggagtaactatcaaggaaaatactgaataggaaaaagaattcattaaaaagcactagtaacaatacctctgcaccatgatgatcaataataaatccaacaagagtggcacattcaattcgagttcggttattctctgagcaaaaaccctctaatatataagggaaacatttagacacagaatatatggcaacaaattgttttgttagctcccgcatttttcttgtactttttcaatgttatgccctaactgcaacattaaaataagaaatgaattgtgacttcctcatctgtaacacccaaggaagtacactagtcaaactagtatctatgtataccaaaaatttgctgaaatcaaccataccatcagaaagattcactggaataacaacatccttaggtgccacaaatattaaagttgctaatataaaccttctctactaggcacagaagaaacactgccccttcagattcggtcaaagagtacccctgtccttcaaagtgtcaagcagttcaggaagaaattccagcacctaagcaattaagaaaagataagactctatcaactaagtatactcctataaattaaattgaataaagttaagactaacagcagacatctccatgacaaggaaggaaaggaaaagaagaaaactgaaatcacaacaaaaacaaaaataaattgaaatttcaagaatatttatcctaagaagaaatcatcatacattttgttccaagaatattgagccttagaactaattcgataaatggtataaaaaatgaaaaagcagaatgcagagtaaccagatcatactgtcattgcagaagaggcaggcttcagcagttgtgttgcctcgataaccaataaaaaaaaatttacatccttctgcaccaagtttagagtccatcaaagcaattgcaatatatggaacctacaggaaaaccatgcaaaggacacagataccaagacaaaagaatgaaataacacaggaccagcacagaacacagaccatttcaaccagatggacagcaaccagccaagcgtctaatgtattcagcacacattctctcatgtgcttcttgttgtcaccaagacatttcaatatatcagacaaaataccctgcaacaaaccatttccagaaatgttcaaacagaaaacagcaaaacagcaccaaatggggggcaaaatacgaaaacagaacagaatcctcttaccttgcttgccttctctgtatccggggcactgagcagtgcaggctttacatcagtaagaagaaaccctttaatctctgcaaggaggaaaaccttagagccttgaaaacaaaattgagagaacaaatcaacgcagaacacccaagaacttaattgatgcatttctagtagcagcattacttgactgcagcccaatttctttaagaaaatcaatttaagtcctgcaaaataggatttacaataaaccatacaaacttccaagttccaacaacaaataaaatatctaaaaattttgtaaattcagataatgcaccttaagctttatatgtgagaaaccaaaatcttcaacagcagaaaccataagcaaaattccctcactaagaaccttggggttcttatgctccttcattatcttgtaaagctacagtaaaattcacagtttttcaaacattatttgataatacaaaattcccacctcaagatcttgaatttactcaatacgtggttcctcaaacttaaaccttcaaaccaccattcgctctcaatcttcctgcttccaagaaaatccagatgacagtccaaccacatatttataagattttaagcaacgtttggtatactccagttcaacgtttggtacttaacaaggcttgagactggaccgctatatcttgaacagatattgatcagacttggcaccctctgttgccacaactctcttttgagatgatgaaacaaatagttagaaatcaaaacaaatttaaaagtacttaaccaaagaaaaatcaacatgcagaagatacagctctatttccatgttttgaaacaccattggcagttgatttcccagcctttgctttcgatgttgcacccactgaaactgttctacctgactcaaatgactctaaagacaaacaaaaaaaaataatatgtaagcacaaattcaccaacattcgcaaagaagaatgaaccaaagaacgtgccttgaaaagctccatatggtttcaacttctcaacaattagcgtcagtgctggtccatgaatgtctttaaccatcttttcaatctaaaaataagtaaacaattccaagattattgatatttcaagaatattaaggaaacaaggaagaaagcagcatttttgtcatacacataccgttgcatatccactaactctcagtatctcatcaatacaaacctgaaagagtgataggtggtgcccgtggtgggtttcaggggaagaatccaacacctctggagcaattaacacgacaataggggtagaaagaaaacaatacttccttcttgaaaaacaatactttagaacaagtcaccttggtcattttctttaataatttcctgcaatatatcttatcaatgcaatcaagaactctgccataaaagatgaatacataatagataaaaccttaccttcaatatcggtccaagcaattatctaaagagtgcgagaaagaagagaaaacataagagaagaaggaagacgcagagaacatgctttctccatgcatgcatgtcaaaagaaaaatcattattctctcatcttcttccctctattagattttttctcttccttcttgaatagaaatcctgaaccataaagcaatgcagaagtgttttgatgaaagtaggactgtggaagaaccagacacaatagcaatgtatttatagattaataaattgaagcgttgttggaaagaaggaaacggtcatatcaaagatctaagaaagaagcactaaacgtgatatttattttgataataatatgatcattaacagataaaaagaaaattgacaaaattaaatattattcttatgactctattatacatcatgttaaaattgtaattaaaaaaattaattttttatctaaatattagcataaatgtagattacatatcatgaatcattttgtaaaataattaaattaaatttatttgataatatatcatgttatatattatatataataaatttgattgtcgtaatgtaataaaaaaatatgaaaaaacaaagaaccacgctcagataacaattctaatttttaaatttatttgtttaagaaattgaagcgtcataacaaaatgacaccaagataacaatagtaaaagaatgtctctagtaagaataagatagtgtcaattaccttccttaattcatgaatcatattcataatgaattataattaacaacatatgaattgttacaaacttaaacatgatattttgataatttacaactttaacactagctcttataaatagaaaagtctttcctagttaaacttttttaacacttaaatactaatatagtaattcgaagatttaattgacatttagttttgtaaatattgaaagacataaaataaccaaatcacacaaattgatagtgttgtttggttgagaggttcgaggaggaggaggtaaaagaggcaatatgacaatgtggaagtgctaaaagtccaaatgaatctagctttaaattcattaaggctttttggcatatcttgaaggaggacatcatgaggtttatggaagaatttcatagagtttgggtttttccaagaggctcaaattcatcattcataggtctaatccctaaggttgacgacccacaaggccttggggagtttagacctatctccctagtaggatgtatgtacaagatcatggcaaaagtgttacctagaccttgaagaaagtacttaatgatgttattgatcaaatgcaaaagtgtcttctttgacaaagatttcttctacatagtgttttggtggctattgaggtggtgggagaagctaaaaggaaaaacaaaagttgtttggtcttcaaggtggattatcaaaaaacctatgattcagtgaattgggatttcttgctttacatgcttcaaagattgggttttaatgaaaagcggattaggtgttgtttgcaatcttctataatgtcggtattagtgaatgatagcccttcaagagagtttgggatgcaaaggggattgagacaaggcgatccattgacaccatttcttttcacaattgtggcggaaggtcttagtggtcttataagtgaggcggttgcataaaagttctattctagttataaggtgggggtcaattttctacaatatgtggatgatactattttcttaggagaaacatctatgaaaaatatcttgatcataaaaagcattatgagatgctttgaattggtttcgggactcaaagtgaaattccataagagcagttttggagccattagagtggaggagaggatgggattgagatttgctcaaatcttgatttgtagattactatctctaccattcacttatctaggggtacctaatgggggggcaaccctagaagattggagacatggagattggtcatcaacaaattcaaaaagaagttagcctcttggaaacataaggtcctctcttttgcaagaaggttgtgcttactcaatttggtattgacttcattacccttattctttttttaaaaaaataattccaaaggtggtgttacataagttaatttgcttaaaaaaacattctctgggtggagtggatgggagaaaaaaaaatggctttcttgggataaagtgtgttgtcctaagagtgagggagggctaggagttaaaatattgtcatattaacttactttattgaaaaatggagatggaatttatttcataaccaagattcactatggggaagggtggtgttatcaaaatatagggattggagagggttgttaagtgatgtgagtgacaagttggaatctatatggtggagagatctaaaaaaattgtgtggggttgagtgatttaagatggtttgatgaaggagtagattggaaaatggaaaaaagggataaaataaatttttggtgtgatgcataagagggagagcaaaactttgccaatttatatcccaaactattcctcattttattgcaaaaatttgacaaaattggcaatatgggaaggtgggaaggagagacgtggagatggaaatttagttgatgtaggaattgttttgtctaggaagaggacttgctaagaaagtttcaccaacttgtatcaagtatgggcattgatagcgagcagttggatggttggaggtggaaacgaaatgtggattagtcttattcagtaaagacaacatataatctcattattgggaatgacgggaaccaacagacaaacaaaattgttggtgctatatgaaagtaaatattcctccaaaagtgatcttttttttttggagattatttttgaacaggttggccactttggacaacttaaaaagaaaaatgtgagggtagccatgaataattggttatgcctgatatgcactttggaggaggagacaacactcacattcttttctctttcaaattagcagatttggaaaatggtaaattcatgaggaagctatactacctaccattatcacccgaggagaacttttgacaaaaacacgggtctgcaattctgaatgaaatttatgtatgctattatttttggatgtgtaatttttgatttggaaatttaaaataatttaaaccaaataatcaaacaaatgacgttaacataatcaatacagtatgtaacaaaatggataaaaggttttaatgatcaatgatttaacaattgaattgcttaatagagttttaattagcccaaagatatcaaatggtggattttgctatgaccttggtgcttttccggaaaagtagtcaagtcctctagtccaatcagttttgacaatatcagtttttttttttttacagaacaataatactactagttaatgatgtcattattcaaaaatataaagttctaatcagtccaaagatatctattcgtggattttgtatgaagttaataagtacactcctgacatgatttaactctaaaaataagaaaaagtctaagtgagtggttaaatatttttttctttctaaatgacatatattttgagttgaataaaattattatcaacaataaaacaaatttagtaaatatttaacaaaattatatacgaagactcaaacctaaaattactgattaaattatgataattacattttagttcatcaatgcgtttaattagtgataattaatttattttacattattcaagagattctcgaaaatatttttagagttatccctttacgagctacatatgaatagattatatagattacaaattcattattattgtttataatgtcattgagtgcatgttattgcatttaattattgtcattttaataaccatctcaattacatcaataacacaagggcacaattggctgctaacggatactttccttcattgtgtatttatatacagattaaggtgtaccttttaagagaaacattttaattaaacgattaaggcaaaaaatatattatcaccataattattagtagcatgttttttttttcttcctggatttaataaaagctatgatactaatagttattctaatatttctttttaaccaaaaaaactcacttattggtcataacccttttcattggtttacacaaaagaagaaagaaatattttatggaagaaaccaaaaggttaagaatgaaaaaaagggtgattagggtggtggttgcaaagtttgtgtgttggatatgaaaaaatatctctctcccaatggatgaaaggattaattggagagaagtgagaacaaagacagagaagaaaagggtttagtaaacgaaagcgtgagagtgttgtgcgctggaataggtagagagtgatggaaaaagattggtgggtatgcattataaaaaacatgcaccttctatattgcccgcactaacacattaaatgcaccaaagccacattttggatcactacactacaccccagtcgatgtgggacctttccatcttctccccatagccaagccaacacccaactcatcaacatcattgccttctctgaattatctcccactcttcccttttctgtcaccaaaagccatgtccccgttcacatttgataatcataatacttaaccactagattggactcaaaccatgttattttttttcctcctttgcacaacttcttgtttgattttgttgtgtgtatcccttcctcgctcctaaatctaagccatgtttcttgaggagtgagataacaaacacaaaaaatagtaaaagaaaaaaaaaagttttggcttttgtgatggggtgttgatagaggagctagctggtgctgcagggtgtgtttggattttgtataatgggtaattgctggtgtaggtggaatcatcagagtatagagtctcatccaatgtaaagtcaggttggtttactaacaaaaaacttgcctttctctgttttggatgtttttcaattatttatcattgcctggaacgagtaagtgtttttggtttgtgatttgttgagagttttgattagactccttgttttcctccttctggattctgttttcagctcttgaaaatggtttattcatctccttcttttctttttcaatattttgtctttgatgggtgttattctcaaggatttcatgttttggagctttccaatgttccctccttaattgctttcttaatcaccctttcatctggttctttttcattgaagattttctgtttgtgatattatatcatttgaatctagctactggaactttgatatgtaatattattagcttcaaatagctcatccttgtaggcaagttgatattctgcaaatcattgaaagacaaagagaacaaaaaaaacagaaatcttcatataggagttacatgttgtcttcaatcaaatattttttttataacttttctaaagttacttcattgtagaatctgttaatatgacccctaatcaccttttccttatgtgtctgcttcaaaagtgggtcggcttgtaattctcacgtggatagtggaaagcctcttcacaataatgcgttgagtattatcttaactaaatttctaagaaaattagtggtgggtttttaaatataataatccgctgcttcacgattataatatattcccaccatcttatgctttggaaagtgtactatctttcttctctttatccaatacgagagaagaagtttatgtataaatttttttatttatagatagtgaacttattgataattttgtgtataacattccaataaattaactgattaatgcaacatctggttagtttttctgaaaaattggatgaatatatatgaatgggaataattattctcataactttcagagtttcattaaatgtgcatatcatttgttctcatttctcttattgattcaccaaaagaacaaaaccagggaaccaaacaaaggcatgatgatagtaagttaccatcgaatcctgaagaagtagaagatctacggcgtgactcagctgcaaatcctttgatagcattcacttatgatgagttaaagataatcacagcaaattttaggccagatcgtgtgttggggggaggaggattcggaagtgtttacaaagggtttatttctgaggagttaaggcaagggcttcctacccttgctgtagctgttaaagttcatgatggtgacaacagtcatcaagggcacagagaatggctggtacactttttgttgcctttctgtacattttttttatagatgataagtctttctatggaagcgtgctaaatctgcaagacttgagagtgtgtattggatactcttaatttacaaggagatatacaaaaagtatctttttggatggggggaatacccatgtcgcttcaacttctggactgtgaagttccccctccattgtctttctgaacattgtttcgtatgaagttgtctaactgtaaagtcatgatgttgcttcacatgctatgtttattctactatttggcacacataagttaatgtgacaacaaaaatatatcgttggtttaaaaattgttgtaagattaataaaattaaggttttggttgcttcataggcagaagtcatatttttggggcagctttctcatccaaatctagtcaagttaattggatattgctgtgaagacgaacatagggtgctaatatatgagtacatgtcccgaggaagtgtggaacacaacttgttctcaagtaagtatatcttgccacttgttcttgatattgaaattaaagcttaggacaattgctaatgcatgtatccatggctagctaggaatctatttaaagatctcatagcaaaaaatgttaactgttttgctttagtagatgcatatgcatctatatttactttttacttaattacccctttatgttgtctccgacaatgctgacacttaaaagaaaggaatttaagataaagtgattttggttccattttgtagcttcgtggaaaaataccgagttaggaagttttgggcttaagacgttggttctttgtcacttcctaagacatgtgctttagatggatttgataaggacataagtttgacagtaacattacataaggagataacatgtttttgctatactacatacaacctttagtgatcatacttgatgtcaatgttaaaaaagactatgactattaaccctcaacattcctttcacttttgcgatttaatccgtaaaaacgaagaaattacaccggcaactctatgattttttcatattgcatatggtatttttattttttttaatgtttacagcgattttaataaagacacacgatgtaatattttaaaataattatgaaagttagtataatatattgaaaatgtcagtgtgatactttctaaacataagatattagtgtagagattagaaaaaaaatgagacatcaagtgtaatatgaaaatatctcaagaatacacacttttgtggaagatcttggggaaggatctttataagaagatctctttttttcagatccatcattaaaaaaaaaacttatcttcacgtggagatccaggtcttccctaaaaattctagagatctacactaagttcaaaaaaaataattttttatgtgacagggtgaaaaaaataaaataaaatgaaattaaaattaaaataattacttaaaattaattatatgttttattaatattcatatatttttttcttatttattaattaaaattaattatttaattaatattttaaatatttaaaatgtgatccatgtgagattcattaaaattatctaaaattcaatttagaatctatcaataaagaaaaaaaaaatataatctttaatcctaaataacattatagaatctaataaaaaatgatctaaataaaatttcaatttaagataggtcgtgagcaattgagagatttctgaatgtaaattcttggtaggtcctacaccattgtccaatgcaatgagccgaggagtatttttgttctcggaagaccacttactgttttaattttaagccagctactaacttttccagttctagttttaccatgttttccgaactttttcactgtagattaattaatgtttgggttaccattttttgggttactgaggttgacctttaaaacaagggtattcgtgtgggctggaatcccttattttgtataagcccatttagacataaaagtcatgaacttttttgttttgtttttgagaataacaaccatcatcaacttaatattgcccggtgttgaaaaaaaaaacttgctacttatcacatgagtcacctcttatgactagaggatttatatatatatatatatatatatatataattttattttattagagctgctagggcctaacaggtcccactaatcaagtggtgtctaaagaattccaaccagccatgggagaggaaaagatgaatgagaaaaggtttatttacattaaaaaagaatatttctttcatccctcttgtgaagtatgaaatgaattgaatagagatagaaagaaaaacaaggtagaaaaagtaagagatatgcgatatattgaatactgtaataaagaaattaaaagaggaataaaaaattaaaaaataaaatgaaagaaatagtgaaaaaaaaggtttgctaaacccactttatgtgataggttgtcgtatttgcttcacattaattagaccatttttcatgggaatgaaacgcgcttgctggattgatgggtcatttaggagaattcgttaaagcatcattggtaattcctgtaattataatgcatattataaataatttatatctttttatacattactgagttttgtagccaatagttatttccattggaagtttctatagttagtagggtcatgccattaaacatcaaaccagatcaatctcatccacaatatattaaaataccttgagaagaataaaaaaaaaatgattgaggaattactttggacatagcatagtgctagtgtgtgccacacgagttcataaattatcataggttttttcctcacataagttactattccaaatacctaggtgccggggctccacaaggccagccactctatgtcttatacgtgaggagacaagtcagctagacatgtgactaacaatattagttttagctatgttcaaacacaagaacttcttaatcatgcacggttcatcacattatcttttaaataattaaattattatttgatattataaaaccatattttaaaaaaagtgcattttgttataattcttgcaaactaaaatttgcacaagtcaaataacaaataaagtaattacaataaaccgtgtctaataattaaaagttgttctttaataaatggtaagataatattttacattgaacaacacaatgtatgtcatgtcaattatatggatcaccaacctatttaacttccatcttaacctttaaatttcatgttgaatatatttaatatatattaaatattaatatattacgtacaatctaataaattattatataattaatggactcatatagattattaggatttttcctaaattggacataactctattgaacattgcatatttgatacctcatgatgtaatacttaaacatccaacattaaactctttctctctcaaaccccttatctcaacattccaaaagattagcatgagttatgtttaattagtaaatgaaattatgtaaaaatattgtcttctagcaaaaaaaatgtctatctagtttctctgaatcacacccctccactatgaatacactttagtacttcacttttcagtttcacactcacattctctcagaaatttatggatcatctcatctttcacacgtggaacatcactcaatcagaacgaattctaggtagttgaaaaagggagactccttaacccaacaagataaactattttcaggatttgaatccatgacttcagagtcacatagctgcaaccttattattaatatattaagactcactcttaagtctctaattaaataatgaaagttctagatctttgcaaagaatcacagtgaaaatctcccttaatagctaatggaaaaagcattacacgctttatggattctccaaatattaaatgtttttgttttgcatttgatatttttttttaaagtaattgagatattttaagccgattgtttaagagggttcaacaatattagacttggattctttttgtgtcagaggattattctgttggagaaatatagacgcagagttaatgttgcaaggatcctaccacgattaatcataaagtccactagttatattcaaaactgtttgtatttattcaacaaaagaagagactttaatgtttattattgtctttttggttgtatatctaatgtgtctttcttgaatattgcagaaattttgcttcccatgccatggtccataagaatgaagattgcgtttggcgccgcgaagggacttgcatttcttcatgaagcagagaaacctgtcatctatcgagattttaagacatcaaatattttattggaccaggtcagcacacttaaatatgcaactgaaaatgaaaaaaaaaaaaaatgatatatataacgaaaatgtgtagacactagacagatgaggaattaaatttaaccatttaagcatatatagggaggtgaaaaaaaagtgctttccataatttatttgtttagggtctaatttggatgtaggcagattgttggaatcaaacaatcacacaataatcgagatatgagaaaaaaagaaaaaaattatacagagtttacccacacactcataaaatgcactcagtttacaagaaaatatataagtttaaaaattctaagcacaatagttattcatgagtccaagcccaaattacaaaaataataaaatacgagatcaataatagtactgggcctcgaaaaaaattccgagggcctgccccctagcccccgttgaggagactcctgcatatcttgctgacggcacaatataagccatacccaaaacagtatgattctttggagttacacgctgaaagtaaaggacacaaagctattgatgtttgatgctcaatgctcacaagaaatttagctattaaatattgttgttgaggtcatgttgattattgtgttcttcaatttaaaatatttagactttcataacctttggtgtttatgatttattttatactaaacttattgcaaactatagatactgcttgcagttatgttgtcaaattttttatcatagcaaaacgcacatatgctgctgtttaagacacaagactctcgccagctaactatagatatagataagctttactaacaaattgtagttatgttgacaaatactgtttttttcaaagatgaatgtactattaataattggcattgttttagttatttcgtggttcgcttaagcaatcatgcacaacgaaacagtatttgtcacaagaccaaagcacacaaactagtattttgtgatatctctggttagatttcaggtgttgaagcaaacagcaaaatgtaatttttgcattagtttctactcttgtacagcaaagaccacaatgtttccaaaataagccagctttcaactaaccatcttggccttttatgtttcaaaaacaggactacaatgcaaaactttctgactttggcctcgctaaggatggaccagttggagacaatctcatgtttctactcgagtaatgggaacatatggttatgccgcacctgaatacataatgacaggtaaagtatattctgaagctggagttctgtactcatttgtgaatcaaagttcatattttcactaggcataaattaaggccaatgtagagaaattatggttgccccagatttttgatagagtttaatttttatgcatagtctgtgttaagattctttatattatcaactaataaaaaatcacatgaggtataatttttaaggtaacttatataaaagaataaatctatgattggatgatagacgataatataaaaaccctttaaattaaactcttagtatactacaatttgacatcataattatatgttgtgcaggtcatctgactcctagaagtgatgtttacagttttggtgttgttcttcttgaacttctcactggaagaaaatctttagacaagttaagacctgctagagagcagaaccttgcagaatgggctcttcctttgctgaaggaaaagaagaaatttctaaacattatagatccaaggctggacggtgattatccaattaaagcagttcacaaggctgcaatgcttgcatatcattgcttgaaccgcaacccaaaagcaaggcctctaatgcgagatattgtagactcgttggagcctttgcaggcacacacagaggtccctattggaaaaacattgaccataatcagtgaggttcctgaatctggtttgaaaatgaaagatgatgcaaaatgacttaaagagggtgttgttgtaggttatcagtttcacttctcatgttcactgggggagaggttttgccttaacttcttgtgtttattaacatgacatataggcaatttctttctattttatccccttctttgcttttcaacatggttgtcatatatgtacagctggattattgtataaaccgatatcaagttaaacagaaacaaacaagcaatagcagcaatacaggatatgattagacgttcttctgtttcagaaaaaatattttatgcctgagattgtttaagagtttcacactgtttctgaaattgttatgtatggtaaatttattaatttttatataatttaattgaaagtcctatttttttataatttcttatttgacaaagtaatttcttttacagtgcatagaaatgaaactctttctttatttgaatctaatatctttccaatataatgagataaaacagttaatttttttctagccaaaaccttttgaaaatgtccgttatcccaatagttcttgcataaatcagtgaagaacacatgaggctacctagacccgaccagtagaggctaaggaacatgaactgaaacacattttcactgaaatattataaattaaattttgtgtacttttcccactgatatacacttcctaccattttagtttgctgggtaaatttaatcttgaacaatttcttatttttattgttatctgaccaggaatccttgcaaattagactgagtttaacccttaggtcaagtgtgattgtttctgagattaacctcttaattgcggatattgttagcaaaagtcctgtctaaagttgtgttttgggcctatgtctgtggcccatactcaataacaaacatcttggcctagatgggctttgttattcttacccgttcttcgctaacttcacactcttatttacaaatggtgtgacttaacctattttttttttatctttactggaaaaaaaaaagttcatcaatagtaattttgaacaattgctaaaaacatttgttcatgaaattagtaattaaaataatttgttgaattgatattatatttaacaattaattaaaatatcattggttttccaaaacaattttattactattatataaaacaccttttgtcattatttataacatatatagtcaataacttttttgactcttattataagacttgagaagtgttagtaaaacaactttctaacactcatttcatccattatgacttaaaatttattgaaaactataaatgtagagagaaagttattaaataaattgtgagatccatcaaaatttataatttttaataaattttaactaataataaaaatatgctgttagtatttctttataagatttcattttatctctcttatacattaataatttgttgactaaaatatttttatttattttaatctataattaaatgttcatttgaatttttactttctcttttctataaagattaaagaagatgaatagattctgattaatgttaacaataaattttaaaaaatattacagttaaagataaatttaatactaatatctaaattaattaatttttaataaacataatttagacaattatgtagaataaaaagaataagttttattccaatcaagattcttaattattattttttaaaaattttcatctccttaatgaaattgttgatgacttggagttggattgtcatagaggtagtacagccacgtctcaaactcaaactttgcaaaatcgaaaaagtacacgtggcatgatactagtgaactgaatggatgttgcttcttaaatcttaaccacttcagcaatctacgttcacaacctctcatccatgtctttgtggccctaacaaactgttaactatgcacaagcacaacttcaagcaccaaccaagggatgctccactcatagaactcaatatagaaactggaactagaagtagcagtccctaagttttgtgcataaccttaaaccatgtcattgcctaccaccactagtggtcactcatctatttactctgcacttacattgccaagaaccacccaaattcaaccaaccttgttttctcccaccaccaagttcttttcttccagaagcccctcatattcaggtgtttcctattgtttctcaaacacccttttgtcaagacctttgctttttgctgtcaaggcttcatctggggttggctcagaagcatccaaacaggatagtgacaagagtgaagaggaagaggaggaaccgtatgaagagtatgaggtggaaattgagcagccttttggactcaaatttgcaaagggtagagatgggggaacttatattgatgctattgcaccaggaggatcagctgataaggctggagtcttcactgttggggataaagtaattgccaccaggtgtgctattcttgtttttttaatttttctctttctgcaagtttcttatttggagaattagatagaaggtttatagatgtggtataactttgatattcgtggttggatagcatattatgttcaagagagtttattggaggtcttatactcttatttattcttggttggtttatggttgtgaattttgatgagtttaacttttatgcacagttagtgtaaaaattttacaatgttactaattagaaattaagtatgacttttataatatttatcataaaagtcaacaaacttatcatatatatgaatatatcagtttgtgattggatgacccttttcaatatgactttatttagtaacaacaagaagaaaagtctaatcccattaggtgagtgatccatgttttggtatatcaacatgttttacattggctcccaagggcctaacacaaccttcttcctttacttggtcttgggacttgttatgaaaccattagcgtcatttcatactttcagtttaactttggtccttaaaaataattttgacatgtcatagaatcaaggtttctgaatggtctataaattatcctatgtatattatatttggggtggtggtgatggttgggggggggggggggggtcggtctttttatatgtatgaagtgaacttcaaaatccttttgagaagtaaacttgtatactttatgtttgattcataatgtctgagatatgtccaatatcttcaatatctgcagtgcggtttttgggaccgaaatttggccagcagctgaatatggaaggacaatgtacacaattcgccaaagaattggcccattactcatgaaaatgcagaagagatatggtcagttcaatatgtatgcatttttgctatgtttcgagtgctactctagtaagtagtcacttgtgacctttgctcattgatctcagagtcatggttccttattttgacaggaaagagcattgattctggtggtgagttaactgaaaaggaaattatcagagctgagaggaactctgggtttatcagtaacagagtgagagaaattcaagtaagtttcatcatgatgataaaactgcaaaattgtagtccatacattcattctcaaaccattttgtatataatattttctctactatagaaagatgtcactgctgtacttccatgtggggtacaaacatccattatcaattctcaaacttgcaaaattttcagatgctaaatgctttgaggaaaagggaacagaaagagaacagggaaaaggatttgagggaaggattacaactatataagtaagacttagcaactcaaaatcattttctttttgaccctctatgatgtgcccagtattcatttcattgtccaactttgcaattatattcttccgaagggagtagtaggtgaggtatgagaagagttaatcttgattcttgaccatggaactatatttagctataatcagatataagtaaaaccaatatttgatcagcaacgcatgattggttatatggtcaagattagcttcttttacctttcacactctcacttgatacaccttatatatatatatatatatatatatatatatataatcttcaaggttgtgctagatttattaaatttttcctttaggctaattactcacgtggtttcttaattttattttaggttgcgatttggtcccttatttactaaaactaacactagtcgtttttcaattttggggcatcattttgtagttttttttattgattcaagacgtgaaacttatctcattagattcacttacgtgaaaactatgggtcattcagaccaaaaaggacataaataagatgaaattgcatgaaaagtgtgtcttatgaggatctggaaaactgaaaatctccaaagatcaaccagaagattgctcatgagacataaacataatgaaaatcacatgaaaaaatttcaaaatcgtgtcccaaaattgaaaatgataagtgtgctacaacattatttgaaaaggataaatgttgatccctccattatttgaaaaggagggatcaacttactccaagagtaactctttccttatcctcaccattcattttcagtcatttgtctaactgattgaaaccatccatgcttatggccaaaaactggttaaagaaaatacttgcttcactttccaagcatccaatttgcatcatatctaaattaaaagactgactagaattgatgctatctcactactgataagtgataatactactgtgcactctgttcctggattaaatgctgaaggaatggcaaatatgatgaagcactagagaaatttgagtctattttaggatcaaagccagaacctgaggaagcagcagttgcaagttacaatgttgcttgttgttactctaagctaaaccaggtatttgtttccttccgttcgctacttggaacatgtaatttgatcttggattagttccttattatccttgcggaatagatataatccctttacatctgaatgtaactaatttagtccagtaaataaataaaaggtttattagtccttattagaactagctaaatttttcctataacatccaatatctagttttacacctgctaggttaggtgatacaccgaagtcctatagcattgaccaatcccaaacaaaacctgtgaaaattaagtctcctgtttatcttacatttccccatgtagagattagtagctttcttgtagtcattggattttcaacaacaagcatctgattcctcaattttattttttgattcaaagggaggagtggaactctggtaccaagagatttataataactcacacacattgctcaaccaataagctaaaccaccattggttatttttattaattttaaagcattgaaattggtatgagtattatatgcccatatttatattaataaggacaatatacttcttaattaatccattagtcttgccaacaaatgattctataatttatctatctattaatatactaatagagtaataaatatctcttaacagattcaagctgcactttcttcactagaagaagctctgaatgctggttttgaagacttcacggtaatcaacctacttcaagttattccattatcatattggctaagcatctaacattcttgcaattttaacagagaataagaactgatcctgacctggctaacgcaagggcgtcagaggaatttgatcctttattgaaaagatttgatgaatctttcatcaatgagaatgccatcaatgccattaaatctctttttggatttggtaagaaataacccattgtgtggacaaaagcatacagtttggctgactaaggagttggttgagcaatatgataattatttcccatgtataactttatagtttaactacacagtccctcattttttgtcccttaagcgggatcttgttttatgtactagtataatcaagcaaaattataagaaacttatttatgatcaataaaattgtccatttccatcacctcctactttgttgcatgttgtttcccacaaatggccccctaaagaacctgatttgttttgaagcaaccaggtatatatgagaggcttgaatcaagaggatttgcttgttacatgtcatggacattgtcctcttagttcatatagttgcgatttacgaagcaatcctgggcatgacttgagttaaagataatgcagcttgtgattctcaaaatctttaacatctatcttgatgaaatggcactaactccctctttcttttgatgaaactactcatttttttatgatgtttcatgtagctgtttttcaaccatcaatagatacctttctataaattgcaattttttatatttttttactgttttcaacttttaattcgttcacaaaatttcctttgtttctaaaattttacataaacattttcatattttataaatggattgcaattaaatctctatagtgcaaaaatttaaaattattaaatatttatactacaaatttttttgaaataatatgggagtaacaccaaagataaactaacataacaaagttgtaggttttaccaattggattattttctcttatttgattttggacttgaatttcaatgtctcgtttctctatcgcaatgacgattagctccataacagtgattattgaaaccaatacttcgttgaactcatggaagcagatacaaaaagctggggctaatcaatggagcataaagtttattttctaatgctaatatagtaatataagatgactacttagaaaacttctaaacaatatattatgcgtatgaaggtatttgactagaaatgggaaggatgaagtcgaattcaagtccttttactggttctagcaagggatcatacttaaacttctcatcaggaatcaccaaatcccacttgaaccgtttcacgatattatgcatgaacacaagaatctctagttagcaaactcttgccccaaacacattcgggggccacctccaaatggaacatatgaaaatggtgtaggccctgccccttcaaaccttgaagcatcaaaagtttcgggatttgagaagagtgtcatatcctcgtgtgaagaaccggtgttccaatgcaactgcgagaacagatcaacatgagacaaggttctctccttgtagcgaacatgcacttgttttactggtcttatatttgtaaaaagagaaattatcaccaacaattagtattgttgagtctcaaaaaaacaaggaagttttggtctatttaacaaagaaacctcgagtagttcatggaaacaagaacagcaaaaaaagatataaaaaagatttcaaagattgaaataaggttaaattaaacatcaactgaattagtggcctaatttaaaaatattgttggctgatgtaagaaaagaatattaataattgacagcaagaagacaagttttaaaagtacactatagactgtaactagtctctttagctttgatgttccattgtgtgacagtaatatcttaatggtacatatgaaaatacaaatttgaagcgtgagtatgaagtaaagttaaagatggggtagcatttggctatctgcaatcataaacgagatattcccaagtccaaggtatgatatgaaaacacttcatgaccaaggtgtgatttcaatgaatgcagagtgaagaaagcatgataatagtataaaagcattacaaaagaaatgaaacataccttccaccctttagggatgttataatcagcatatgtgaaatcctttgtagcttctctgtaagcaccactaacaggtggggacagcctcatgcttcagatgcaacattccaagagtatttcatttctgaacatcttcccattgcaacaattgctctgcctctttcccttgactaatttcaagttgttctgtcataaagataacttcaacatttaccctgatcaagttttaggtaagagcatatggctgaaaattaaaggatttattactaacctttcaagacatgttcataaacttgaggtaatgtccaagatacttcatgaccaatgataacactgatctagaactatcgtggccggcaaaaagtagaagaagtatgttatcaataacctccatttcggtcataaaccttccattgggatcagatgtaacaagcatgtgtgatagaaggtcttgagtaggtgatgccctcttctcctccaaatccactttccttttctttaaaatcattttaatttccttccttattacatctgcagctttcattgcacgatgaaaccttgtccaggaatgttgaggggcaggccaatgatccctttcagaaattcatcaaattttaacgaaagctttgatatatggtcagagtcttcaatgcttaaaaataagcaacaagccaattcaaacgtgtatagctgtacgacgggatagacaaacacctgctcctttccttcaaaattgcaaagtaagaaaatagtattcaactttgagaaaataggctatgcattgacattgtaaagtaatcacaatccatcatatatgacaagtttgtgatttttataataactaccttaaaatcataccaacagtgatttcatattggttgatcatgctatttttttttcatttctgatgaataaccagttttattagtcaaaacaaaataatatactcaatcaacactgtttaatcatcagaaaacatgtaaaacaggtgtccctcttaggactacttctgatctaagaggttataaatctaataatttatttctttatttcaggatgaatatgaaaagcagaattgagtataaggcccttctgtaactatttgctaatgctaaatcattatgtacctaccgactaacccttaatcatatatacagttgcaagtgttggatttaacccaaatttcattgaagattgttattgatagttttctataatatcgatacatatgtaagatttgtgtaacagataaatatatgtgagatttgatagatatgtaaaaggtatgggatatattagaaagatatgagagatttgaaaaatatgtaagagtctattagagatttattttaataggaaattgggtaagttttgataataaatttgactcttctcatctatggcaataggcaagttgggcttgaccactataaattgtttatgatttgtttgtgatgcttttacccactcactagtagttatgtaagcatatgaaaagaggatatgatatttcccaaggatatggtattccccaccaccaaggatggaagaagggccacaaagaacaaggtattatttaagtaccattagtaaatagaatttagctgttatataacatttcttaccttcccaatatgtgtctatatgacgctgagcaatgctatccatttttggcaagtagtttctgagtgtttctgcattaagaaagctcatgagcaaccttctcaccatctttgcctcatcaccaaccttattaaccaaggacaaccttcacaacctcctcaccgaactaggccaccacacttggacattcttgttctcattgctgaataggaacttgttcccagctggcccgcaaaacacaacaacaggatctccaaacattgaagtcttgaacaccctggagtcatatttcttcactctttcttgtatgaaccttaacacgtttccctcattcattgtacgcagaaactccaaggtttctccaacaacaggccatcctaatcttccaggaggaagattgaggtttggatgtttcctgagtctgtcagctttagtgatgaaatgaagagaaaggacaaagaatgccgaaactgctggcaagactacaaggttggtcacctccataagatttagtgcccttaagaccttaactattgatgaaggacacaagacaacggagagtatgaaagactattctgggaaccagggaaactaaggtgtaagatggatgacagagagattgctctttggggactgaatgaaccagataagatatataaatggaatttaattttcatatagtatctatgtaaaattgtaaatgtaacactggaataaatagaaatcatttttaattgtttgagtaattataataaaagttaataaacttttttttcttggaaaaaagtttcacatatccgaaagttataacactaataccagaaaagtagaatattagttaagaaataatttttctctccacaaatattactctatttacattgtaaaatataagtcaataaatttactaacttagcatacatatgactttgtcataagaatctatatagtgatgatatttgtctcctgtttttataatttgacccacctcaattttaagttgtcataattttttttatcttttattgactagtttcttttttatattttgtttcttttatgctttatttgattgaacattttattttatagaatgagatatgttttttgttctttaaaattttagaaattcaattttaatcttttaaaaaaaatatccattttgcattcttttaattttgaaatacatcactatttttctttaaactggtttagatatatagcgctttgaagataaaaaatattttaaaatagaaagacgagacaaattcttttagaaaatctaaaatagaacttttagacaaattataagaaacttatttatgataaataaaattctgcatatccatcactttctactttgttgcgtattgtttccttcagatggccccaagaagatcgaacctgatttgtttttcgatgaaggggattgtccttattgcatgtcatggactattgtccttagtccccatcgttacgaagcaatcctgggcatgacttgagttatatttatgcagcttgtatttattatttctaggttgtgattcccaaaatctttacttatcttgatgaaatcgctctagcttcccctttcttttgatgaaactaaatttttttattatgtttttcacgtagctgtttttcaaccatcaacagttacctttttataaatttgtcaaaaatatttttttattgaatacaacttttaattcgtcatacaaaattccctttgtttctaataaaaaacattttcatattttgaatggatttcaattaaatctctattagagcaaaaatttaaaattataaaatatttagactacaatttttttaaaataatattggagtaacaccaaaaaaatagcataacaaagttataacttttattaattggattatttcaaattagggctctcttagcattcaacttgagcacaatttggatttgaaagcaagaccaacagtaactcctgttttaaaaaaaaaaaaatcccatgacaaacaagaaaatatatttgtctcctttgcgtaaaactcttctatacttggttctaagattcaattgtgtgaattggtttgtctaggttgtgcaacgtgcaattttggtcttttatcagtttttcgttaactatttaatgtttttttttttttgttgaggactgatatagcagatgatatcacatgtgaaaggaaaataatttgtcaaagcactaaagtagagatggagttttacaataaaaatagacatgaagaggggggaaataacataaaaaagcattacgttttcctggtgtagttttgcagacaaaagtattgcctcatattctttaggaattcatctgattttcttattgattttgtacttgaattttaatatctcgtctcgcaaccacgattaactccaaaaaactagcatcaagaaagcatagacatttgttcaaaaaaaaaaaaagaaaaaagaaagaaagcatagacatgaactatgtaagctgtacataacagaataatcaaaggtttattgaaaccaacacatatcatagaattcatggaagcagttacaaaatgctgctaatcgatgtagcagaaagttttattcaaatactaataatattgcaatataagatgactacttagaaagcttctaatcaaatgttatataagataactacttagaaaacttctaatctatgtattatgcgtatgatgaaggtgtttgactagaaatgggaaggatgaagtcgaattgcaagtccttttactggttctagcatgggatcatacttgaacttctcatcaggaataaccaaatcccacttgaaccgtttcacgatattatgcatgaacacaagtatctctagtctagcaaactcttgccccaaacacattcgggggccacctccaaatggaacatatgaaaagggtgtaggccctgccccttcaaaccttgaagaatcaaaagtttcgggattcgagaagagtgttgggtccttgtgtgatgaaccagtgttccaatgcagctgtcaaaaaagatcatatatgacatgatcaactcgagacaaggttctctcctaggatactagcacctcttttacccttttactgtatattatatttgtaaagaagcaatgcttttcagaattttgtcaccaacaatcgttacttacttcagtattttttagcctcaaaagaatgaaggctggtttcggtctagtgtaacataagaaacatcaaatagttcatagaaacaacaactgaaaaagaagaaaaaaaagataacagagacttaaaagattgaaacaacagttaaattaaacatcaactgaatttgttgcttgatttaaaatattgttggtcgatataagaacagaatactaacaatcgaaagtaatatgacaagttttaaaagtatagactgtaatgtaactagtccctttagccttgatgttgttacagtaagatcttaacgatacatgaaaatacaaatttgaagcgtgtgtatgaagttaaaaaggggtagcatttggctatttgaaatcataaacgagatattttcctaagtccaaggtgtgatatgaaaatacttcatgaccatggtgtgattccaatgaatgcagagtgaaaaaagcaagatagtagtaaaaaagcataacaaaagatatgaaacataccttccaccctttagggatgttataatcagcatagttgaaatcctttatagcttctctgtaagcaccactcacaggtggggacagcctcatgacttcagatgcaacattccaagagtatttcattttctgaacatcttcccattgcaacaattgccctgcctctttcccttgactaatttcaagttgttctgtcataaagataacttcaacatttatcctgatctagttttaggtaagagtatattgctgaaaattaaaggcgtgaaaatagttgtcagcaatagcttgctacaacaattttctttatactacaacaaagtaaacaaacatgttcaaggattttattactaaccttccaagacatgttcataaacttgaggcaattgtccaagatattcatgaccaatgataacactgatctagaagtatcgtgaccggcaaaaagtagaagaagaatgttatcaacaatctccatttcagtcataaaccttccactggggtcagatgtaacaatcatatgtgatagaaggtcctgagtaggtgtaccctcttctcctccaaatccactttccttttctttagaatagttttaatttctttccttattacatctgcagctttcattgcccgataaaaccttgttccaggaacgttgaggggaaaaccaatgatccctttcagaaattcatcaaattttaacgaaagctttgatatatggtcagagtcttcaatgcttaaaaataagcaacaagccaattcaaacgtgtatagttgtactattggataacaaacacctgctcctgtccttcaaaattgcaaagtaacaaaagtattaattattaaactattgatcacaagtattctttttctttttcatttctaatttataaccagtgctattaatcaaaacaaaataatatagttaatcaacaatgtttaatcatcagaaaacttgtcaaacaggtggccctcttaattctttaagactattctgagctcagagaacataaatttaatgattttttatttcaggatgaatgtgaaacaaaagtttctagttgtataagaaccttatgtacctgcccgctagtattggatttaacccaaatttcgttgaagattgttattgatagtttgctatactatcgatacatatgtaagatttgtttcacagactgaatatatgtgagatttgagagatatgaaaaagtatgggagatatttgaaatatatgagagatttgaaaatatgcaggagtcctattagatgagagcagttgggaaaaagatatcaatttcccttccagacctgttatgaatggtcttgtacaagcaaaatgctttatacacaaacagtaattatgcaagcaacacaacacaattttaacgtggaaaaccttctccatgtgagaaataaaaatcacgggaccgatctcggtgtccacccaaattcttcactatcaataaagtgagattacaaaatggttccaacaaccattacaatcaacagacaacttcaacaaaagttgtaccaaaccgtcacaagaggcaaacatacaaaataggcttttgtacgaaattaatttctcctaccagaacaacaacaaacaaatcccaacggtcaaactgacatattgcaagagaggaacacactgatcaaatttgaggacaatccaacggttaatgtgagagaaatgtcccttacaataaaactgcccgcttcagaaaacggtttcataaccgcttcggtttgggaatttccggttatactacaagcctttattcacgaaaccaaccgttagatgttaatattggtgagtcacgaacctgtttaaaaaatttcaccaagatccaacggttaaccaaggagatagagaagattgaaggatgacagtttctacccttctccatatgcgaatttggtggtttctttctcctctcttttctctctttggtttcaaattaactgtcaacatttgaaagaagtaactgttgacctattaaataaggaactccaatctttccttattggctggacttgattgcaacaaatttctttgaagattgttattgatagtttgctatactatcatacatatgtaagatttgtttcacagatgaatatatgtgagatttgagagatatgaaaaaggtatgagagatatttgaaatatatgagagatttgaaaaatatgcaggagtcctattagagatttgttttaataggaaattaggcaagttttgtaaggatgggtcatgagaatgaaaataagagtgagggagagattgcattgcaataaattctacaagctagatttgtttggattatagcagttttctgctccacacttgactacccagcgtttaccgtgggcaccataagtggcaaaccagaggtgtgtccttccctgtcctctcaatgctctaatgcccacaccagatatggacctgactcaatttgattcttctcatctatggaagtaggcaagttgggctggagcactataaattgtttatgatttgtttgtgatgcttttacccacccactagtagttatgtaaccatgtgaagcaaggataaaatatttcccaataatgttgaagaggatgtggtattccccaccaagattgaagaagggccacttagagtaagttacctctatctctatcaatcttttgcttgatcattgattcataaatttaatcaacaaggtgttatttaaccatcatttagtattgatctaattggaagtcgttggtagcacaattctcatatgacctacccaacacagtttagctgttatgtaacatttcttaccttcccaatatgtatctatatggcgctgagcaatgctatccatttttggcaaatagtttctgagtgtttctgcattaagaaagctcatgagcaaccttctcaccatctttgcctcatcaccaaccttattaaccagggacaaccttaatagcttccttactgaattaggccaccagacttgaacattcttgttctcattgctaaatagaaacttgttcccaactggcccgcaaaacacaacaacaggatctccaaacattgaagttttgaacaccctggagtcatatttctcctttctctcttgtatgaaccttaacacgttgccctcattcattgtacgcagaaactccaaggtttctccaacaacaggccatcctaatcttccaggaggaagattgaggtttggatgtttcctgagtctgaaaactttagtgatgaaatacagacaaaggacaaagaatgccaaaactgctggcaagactacaaggttggtcccctccataagatttagtgtccttaagaccttaactattgatgaagagcacaagacaccagagagtatgaaagacaactctgggaaccaggaaaactgtggtgtaagatggatgaaagacagaaagagtttgctctttggaataggactgaaccagagaagttcaagttatataacttaaaagcacttgaactgtgaactacaattcagtttatgttcatctggtttttgttttaaagcaaaatagttggtcctccaattacaaaacatgaaagtgacacttcaatattaatgtatctttccctgttgctccaatgaaaattagtccttgatggcatcactataacgaccattaaggactaaattgaatatttacttaacattttgtatcgtacccttttgctccaatgaaaatcaatcaagaggaataaagcttaagaaagtaaacattgtattaccgaagttgtacatatggatacaactagtgaaccgacgaatggaagcactaaaataaatgggaggaaaggcttagtgggatacatgataaaccatggcatcgtcaaagatactaatctctttgttgggacgatatttagccttgtaccataacatttgtgacctgcggcattgccattattagacacttggtcagatgaaagctatgccataagtccataacaaaccttgtggctgttaaatagccacttcagtgtttgtggccttttgagattattttctcgttttgaaatgacaaaatgataatgtttttgtctatcacttcccctctcttctgttccgctgatgaagttctgtcatgtcatgtggaatggttaacttctatctatactgatgataagataatatttttgtgattaaaaagaaaagtaaaaaataaaatcagagagtttttattaaatagtaaatgaaggcttagaaacaagaaattattaggtggttcataccatcacctcatccatgatttcaaccaataatcatgtgacactagataattgattaagattctttaaattaagggatagtacaattaattcttgttaggtaattaatgagtatatctttaatttatttaatatattttttattgtccatatgtcacatgattattaattagaaccatggacgacatgatggtcctgaaccacttaataatttttcgaaactagaatacatcttgagtatattgacgataataacctaacttgtcttgtcatgctagtatttgcaagttacatacgtagaataaatattgcaagatgataattgtcgaaaaaggacacatgacattgctggattggtttctttattttttttgtcataactcttcgatttactagggaaaatggatcccgactattccagtcagtcaataattattttcgccaaaaattgaattcgaatactacttgaaagattcaaccttaactttaccacattaaccacttatgtttaatcacttcattaattgatttctttgtttgataaaaaataaagaaatagaatggatgaaaataaaaagggaaaaaaaaggtgaaatataaagtaaatttgattaaacaaaaataaagaaaagatcgagataaacatgagtatatatatatattagattatgtcttacaaggtacaacaatgataattttaataaatagatgataataatattattttaaatttaacttaagtttgtatacattgaaccctaaaaaagttatgttgtgtgttcaaaattttaaacaaattcataattatgtttttaaatatgttaaattttaaatcttaagtgtacaaacttagagattatgaattatttatatttttaatacggataatgagaatcaactagtgatttatgagtcagtttttaacccgttaatttagaaatctcatcaaatcaaatgattcattcgagtctcataacattgacagtaattatacatggtatgtttataggtgcgtgctataacatgtaaatgagtgcacaacaacgtacccttgagctgaatatcctttaattttacgtggtgacccaagatgaatgccttaatcgcatgaaagtgcataacccacccacacgtacagaaaatgggaaggagattttgtgattcatgataaccccacccacgtgtcccatttattaaaggaaatatccttgtccatactgaacctatggaagcgtaagtgacgaacccaggtcagattgattggtagagtaaagatacgttggctagattgtgttggctctatcctcgtttggctagaattttaattcaatcatccatcatggttgtttaatacgataaatgaagtggatgacaaatgtttcaatccacaaattattttatgatctcgttttttctcgaacgcattgatcgagttacaacatactagtacttacattttagtctctagtgtcacgttcaatctcatctacttctattaattcaaagtccatttaactaataagtcactacataaatgttatttcacgttcccttatgactttatagttgtcaaatatcttataaaaccatcagcgtgaattcaagtctggcataaaaaaactatatataaatattaatgtttgcttttagtcgttcatgatcatttttgcttgtctttattcgagtatctttatattttcaaattgaaatattccatctctttgaagatattgaaattgctctaaatagagctatttttattttaataatcaaattagagtctttggactttttagtaatattctaaaatatttctacaaaattctattgtttagattaattatgcgactaattttcaaaactttgttatgcttaaaacttttaatgatatcttacatgaaaattgaatctaaatctctttcataaaactcagcttatattattaacggagtcatattcatttggtagtgttattatagttttagtatataaatatgagacagacaaatacatgtacaccttaacaagtgaagttttctacaacgtgaatttaatttaattctgaaacaacggattcttatcaataaaatgtttgcccaataaaatcatattcccagaagttatggacctcagcctcatacagttggctctgataagagattagtggaaggactaatggacgaatcaagtggtgacaaagttgatggtttcgttttgaaaacatgtactgttgaacatttgaaacttctgtggttgagattatccaagacaaattgtatcgcatttgtctactcctacatcatcattgtgaggacacatgacgttcacaattggagaagctttagtgaactctctctaatttagaaatatgccatttttagcaacaattctgtgcagactcactattcaaggcctccatcgtttgagttttatttcttgccaaaacactaattttataaccaatgtatttaaaaataattattgtttgagttttataaccaaaacactattcaaggcctcgatcgtttgagttttattttgttaaagtattctagagtgagaggtcatggaaaataaattatttaagagggagtaaattggtatacaagctcctacaagattacttcaaaagaagaaaacctgggaacaagatctaaaaaaatcttataatttgtgtatacatataaatggatttgaagataaccaacgaaagttttcacaagcagccataattttttataacaaaaaaatgctgggcagagatgtttatgagtttctttgggtatgcataattaagcatgattcaattaacacaagcgggaatcaattgttctgcctctcactatatataaagcgtgcaaatggaattatttaaaatttcaggaaatttaaaatttagaaaattaaaatgcatcaattaaaattttttattttcaaattctgtgtttggataaaaattaaatttcttcatttcaaaattttgtttgcataaagaaattgatttttttcgttttaaattttgaatctcattcacgaaaaacacgtaaaatagtgtcatgagagtagagaggtcggagtattcgtccgagatcaagatgaacaaaagtggtgcagttagagctttagagaattcaatttctcacctttagaaggaaattcaaatttcacattttagttgtttaaaattctatttaaaattccaaaaatttaaattctcgtataaaatattaaacaatgaatttatattaaaaatttcaaattccctgataaattactttttccaattaaattctctatccaaacatactgtaagaaaagaagtaaatcattttgaatcgaggattgtgtcaatgattaaaaagatgcaacaacaaaaatccataatattcaagattgcaaacacaatatcatataaggaaattcaaatagaagcaatacatgttaatcggggagctatatatatctatgaatgattagtactattcaatttgtttttgaggtctatagaatatggaacctttgccttgcaattgtttgcatcccatacggcatgcattttggcactctgaatctgctgcaaatttaatcttcatgcatatcttcatgcatttaccgaaacatgtcgttacgggtatcttgccacgttcaacttcgtgacctgttgctgaatctactaccaccaccaccaatggcatgtatagaaccaagataaccgccaaacctaaggatttgtaaaccattgtattgtatttgcggtgtgccaaagaaatgcaaatgtatcgaaatgtatgtaaaatggaaatttccttggaatgttgcgtgtgtgtggtgaaaaatcgatcaattggttgactttgttctaaattgggtttaggaatttgttttccaaaattaaaaattataggaatttggaatcacgagcacggtaaagaagttgtatagtactcaaagaagattaatcatcgccactccaaataataataataatttattattattataagaagataaaccattaacttggtaaaaaaaacaaataatatagaattcaatacaataatttatttaattacatatgagagaatatattgaacgacatacagttgttaaacataaccaccacatagcaatgaaacagttaaataaaaaaactcgtcattctaaaaggttctattttaattaacaattaaaacaatggataaataattaaatttttctaagcagcactcataaattaattcctgaaaaaatgacaaattcaaagttagtattcgaacatataaaaaatacaataaattagttttgcagataatctaataataaagtggtttctaaaattataacttaatatcaaattaatcctcaaaaaatataattatttatcaaattgatcgttaaacattataatctaataaaaaattgtttcacaaatttaacaatagaactaatttatcacattttttcacattcagggactaaatttgtatttttatcttgcagtaaccaatttatcattacatcacactttgagaactaatttcaacatttacccttaaaacattcataatattcttattgattaattatataagtatttaatagcatcaaatttggaatcaaggaaaagaagattataagtgacatttattgggatgaataatagggtgctcatgaattgaattgaatcgattttaaagagaaaaatcattcaatttaaataatttagttttgttaatttatcatttaattagtttaatttaaacttttaattagatctaatttaaagcaatttggattagaacaattttttattttaatcctttttctaattttttcagaaagtactaaataaaatgtgagatatatatttaaaatggcaaatattttatgtaactaataataaagtatttatgtattttaactcaaataattagtaaaaaaatctttaattaaatacattttttataaatagatataaattatataataattttataaatttatgagatataaaaataagtgatattataaatttacgaataaaaacatataaattttaattaattgcggtgaacgtggatgaaacacgtgaccttcagatcttcagtctcaaactatcccaactgagctatacccacttttaaaatattatttggttaagagttaatataactataataattcataaatcatcttacaaccataaagattatccaaaaatataaaaaaataacataaacaaaaacgtaagttgcgagattcatttcgtccacgggagaagtaagtggagttatccaccctttcatttctctctttacaatatattgacccttttttagttttagttacttatatataataatagtataaacagtaaaacttaaatgggtacgcctttaaaatttgaaaaagtcttgctttgacatattaaaacaaactattatgtataatcatttttttataataattatattaaaatttatacctgtgttgattttttattagtgtatagtggtcaatttcaaaataaaaaattgttacgtaagtattagagtgttcataaaacattcaaattaacacattgttagtttgagtataactgaatttaatttttttaaatgagattttaagtttaagtcttatgaactaaataaaaaattgatttaaagaaggatgttgctaaggatggttactcaagttttctgataaaaattagttatcaattttaatttgaattgacttggatgaaatttaaatgttaaattaaacaaattagataatgaattaaagaaaattgatatgactatataattggtttattttcttagaaaaattgattctatctatttcagagacttccctatcggtaaatcctatccataacaagagaattggagtgaaaagagaaaataataattatgacaagtgatgcgatgaaaattgaagagataaaaaaaaatgaatttgggtagaatgagatggaagaaaaatatgttgatttacgctattaaaatatacatgcaagtaaaagatttaaattaataatttttatagttattaaaaaattcaaatatacatactcatacattttgtttatctcatgttatattaaagaggttttttattttatttttgttacaatatttgataattatttatgactatttttacatttagacaaatcataccaaacaaataacataaattaaatagtacacttcaattttattatgtataaatcatgttgtaattgtgtatatttcattattaataaatattacacaaatgttcatttccattaaataaagacaacaacattcaatataaaattgtgacattagatggacactaaaaaaaattcaagtaaaatttgttactttttgtaattgtttatatctattttctcacatggacaaatcacaagttaaatattatgcttgatatattaattttgttataattttacatatttcaaatgcattctaagtaaatattgttcaatagttcattttcattaaataaaaacaacctcatttgtgataaaattgtgtcattaattgatattaaaaaaaagtgaaatttttcactctttaacaattgtttatatttattttcacacttaggttaatcattttaagtgaataacacaggtaaaataaacagttcgattttattatgaatgtttatgcacttaaatattatatttaatgtattaattctattatgattttgcatatttcaaatatgtttttagtaaatattatccaattttattaaataaataaatatatttaaaataaaattattacattagttaaataaataaaaagtataagttgttatattatttgacagacgtctatatttattttacagtttaatgaaaaataaaattcaaataaaaaggcacaaatcatatgattaaaaaatctatttattgaattgtttgagagataattataatcacttcatcaaaactaaatcatcaatcatcaattgttttccaacccctagagatgttgaagccaggccatcctcaatgtcatcctttgaccgcagaacctacaaatcacaaatatcatcagagaacaggattgtatagtctttatagataattttaactcttatattatagatagttttattttcgtgtaattatgaataaatatagtcaacaattctcttcttttaccgattctgaaataaattttatcaagaaataaactaatcttataactcataacttaacaatcaagattttactctttttattacatctcatacattatttcaaaaaaattgaatgaaatatataattatgttttctttaaaaaaatatatagttattaatcaacaattatatgtacatttttaaccctaacgtgcggccattgagactggtcaagtccatggagaagaaagaaatgcgaagagtaaacccggaggaggagataagaagtgagtaggtaggtcaaattttgcacatgttgagatgatagagagaagggaaagaggaataatcgagaatcgagatggtgttgagagtggcacgtgtctctgctcaagcgtggcagtgccttgcggagcctgagcctctgagcagtgagcagatattggatctgctttgctgtttccctctccatcaactcgctttctctctctactcctttttctgcgctcctcactccaattattcctatttcccttctcactccgactccgactctcaccgcgatcattcttccgatttcgattactattaccaatcctattcagactgaaaccaaaccatattaggtactattgcccattcaaatttctccaacaatgcttttattcaaattccatccttattgttaaattatgttgaaactcttttctaagcctgatcttcttgtcatttatgatttatgctgtaagaggaatcattttactagagaggaaggaacatctacatatttatgacttttatttttgctggagtgagttacaaatgtttctattaataattacggaaacgaattgctcattgtcttgagagtatcattcctcatctcagaataagggaataccaaacataataagaggagtgagactttcattcatttttccattactattcccatcaagcaaagccattccaatgaaccaaaagttagctaattggttcgtacagaaattcacagaatgccatttccacactagtgttgtcatcacaagagttgctatggttcgaaatgttatccaataacctgcattatgtattcaccttgattcattactcaatagatctaagttcttgtgactactcctgcagttaaacaaattttgacaagttgccagaaattttgagtttatatattaggaaatcctgcttaaatttcttcaatgaaatgttgtgttcttttgggaatttagattataagaaggattttttgctttgtatttgtccaaattctgggataatttgctgcgagttattgtcgttagactctttattatgtctctgctgactatgctttatgcccttttgacaggaatttgcctgctgaagtgatgtattgatagactttgggtggtaagaacgagatcctcaattgcagtctctggtttctcagtcagttccttatctgaggatgaaagcttttttcttttttttttcgaggactttagtagtgttcaagctgcctccattgtataaaagcatcttttatacttagattttgtggttgattgattgatctcttcacattttatacccttgtaaagagtgatttgtgagtggtaatatataattttaaactgcccttgaaagggagttttgtgatataagttacttcaaaactgaactttgtatagtatatagtatataccttcaatcatcacatatttctgaaatttttttttatacttttttctttcctttaacatgaggtcgttggagctcatttgctcatgaaggtaaataatcaatggtagcagtaccagaattcaaaactaggatgtgcagtattcctctcaagtgtttttggtccgaagaaagatgactattattctcaagattttgaatggaaggaaaaatgagagggcaagattttcttcctttcatttttgtctcctctccaatattagtatcaggataatctggaggatgttgacaaaattattctcaagattttagtaaaaaattatgtcttttaagattttagtaaaaaaattattctcctacttacatacaatattgtggtcatataacgtaagatctccatatataccagatcggggaaatgagatagtaaatgatgtgaattttattaatcacatcaccacttatgagaaattgaacaattttttttagaaagaacaaaacaaaatagatactatattatatagggataaaaaaaacttattaagagtattgaatttgactatgtaaaaagttattgactttgtcttataaataagattagtgtaaataattttttgtctagaccacaagtatttttcgttagagacaatgctatttaagtcaggtgtttaatatggacgtaaaattttctctctaattatttaacacaactgcattcctttcattagataaattaatttatttaatgaaattatttttgatacatatagttatatatctaaatctgaatagttaaaatatatggaatttgtattgattaattataatgataagttatttagatgatatgaaaatattttttttatcggtttgagtcttttagaagatgtaaaattggaaagtggaagatttaggatacaaatatttaattttatgttctgattttttggttgaatattaaatatattataaagattatatcttttggtaaaagtatattataatcatgaaatttccttcaaacaatatatattaatatgacatataatcagttttatttggtaacgtcaaatcatgatgaattggtaagtcataacatcgagaaaactcaaatggttgaaatacatatcttaatataataatgaggacataaattattggctaaattactgtccataatctgcaaattccagggcccaaaaggataaattaatgttgttcttgattgaggctcttactactatttgatttagtcattaatatcattattatttctgattacatttttcctccaatagtgcatgtactcttatagaatatataaattctcatcctttgtccacttttcacttcacaagcaccttctagctagctccatttagattatttgataactaaagtatagtagtatcatttttttttttttatctcaaagatgaaggtcatacttgccgtccttctaaactttgttattacttcatctaacttgtgtactagagtaaggcctgaggcaagtcccagcttcaatgttgttagctacggtgccaagggggatggcaaaagtgatgattcacaggtatatttttcctagtttcatataattgtctttataaatgaggctatatatatatatatatatatatatatatatatatatgatgctacattaaacctatttggcaatacttgtaaaggcttttgtgaaagcatggcaagacgtgtgtggtgcaactcaggagactgcaacacttgacataccgggggaaaaacattcatgttgcaacctgtgttgtttcagggtccttgcaaaccagcaaccattaacattgaggtaaatcatagtaaatgaattacttacagtacatataaatctgtgaatatatgcatatgccttaattcagccatatatatgcttattaaagtttttaattagcacatcttcaatggtgcaattatggtaaaattgcttaattcacttttaatgtgtcttacaatgttaggccttaattgatcagccaatatatatatgcttattaaagtcattaattagcacatcttcagacttcaatggtgcaattatggtaaaattaattgcttatctcatgcactcttagtgtgtcttacaatgttatttaagagctttcaacatccaatggtacaagaacataaaatgaattctacagttattaatttcacagttgtttgtataagaacttttacatcaatgttacttaaattctattggaaacggtttcataatatatatatatatatatatatgtatatgaatatatgatattctttattaattaatcctcatttgaatcgcagcttgaggggactatcattgccccagaaagcgttggcgcttggaaatggccaaatggcgataggaaatggatccaattctcgaacataaatggccttgtaatcaatggaggacaaggaggacaatttgatggccaaggtgatgcatggtggaatgatgtctctaataggcccactgtacgttgaaaattagtaaaatcatgacttaattactcttcttcaaattcttcataccccaaaatcgaatattaatttcattcattcaaatacatatgtgcatgcaggctcttcaattccataactgtggaaatctaagtcttagcgccacgactcacatcaacagcccaagaaatcatataagcttagatatgtgcaatggcgtaatcatttccaatattcgtatcattgcaccaatgcagagtccaaacaccgacgggatagatatctcagcatcatccaacatcttaatacagaattccaccattaaaaccggtgatgactgcattgccattatttccggttcgtccttgatcaacataagtcgtattttttgtggacctggtcatggcataaggtgggtttagttcaagtcaatttccagcttattatcaagtatatataacatgaattaagaaatttagtttaattgattaaatagagtatgtgagtgttatattctttgatatttcctttaatgataaatccaacagatttttttttcaataggggcaaaaaaaattataatttttacaaaatacataatatgataacaaaaaaatctaaaatatcaatatttttacaaattataattattctttaatattttcatattttaaaatttttgtatgattttttattgataatactataaaaaatagaaacataaaatataaaattaacaccaatttatctcttataaatatttacgttcatcttaaaaatatcttatgggggtaacttcaattttttatgagggcaaaataaaatttattatacatagacaaataaaaaaaattattatgcgtgggaataattgcccgaataaactactatatggatccgtggttcagtatcttctgttccttcttataagaaaaaaaaaagcgtatatagcatgacctttaactcgtggttaatttggtgaatcctagtgttgggagcctcggacgtaatggagattatgctagagttgaagaggtacgtgtgagtaattgcaccttcagaggaactgaaaatggagtcagaatcaagacatggacggtaacgatatgattgattaattggctctctatctctctctctagctaattgatactactattaatcacaattaatgcatattatgtgttatgtgttagggaggatccggttatgctaggaatatcacatttgaagatattgtagttgtaggggttaagaaccctctgattattaaccaaaattattttgggcttgaagcagaaagtagtggagaaggaaaagcagtgcaaataagccatgttacttaccgaaatgtgaagggaacttctagtgtgaaggatgcagttgtactgaattgtgatcccactgtagggtgcaccgacattgtattggatgatatttgcataaccactgaagatggcatgaaaacacaaggatcatgcaccaatgcacaagggatgtgctctgactgtgatccaattgtctcatgtctttccaacaaagattaatttgtaataaacttccactagtgtcacgtggagatcatccaaatttcttgtctttcaaactattgaaatggcatactgaattttgttgttttttaaaaatttaaaaggctatattataaattaagttcttcctttcttttgaatatataatattcttttctttagttgttgattttttttattcatttatttttataactactataaaagtaatgaaatatatatatatatatatacacacacctgattccatcttttaagaattagaccaaaggttccttatgtaactggtggcatcctccttgggttgcatggatgtatataacagtatgaaaagattgcgtttgttttcttttgttttttttttttttttggaaatcttatactttgcaaatatttgttgctcacttcgtacatcgcaaggaagtgttattctattgtacacggaaaaataatttcatgaaaaaggtatgattggaaattagtaaaaaatcactcacatggatggtgaaaatagcaattgctgatataagaatagcagcgcattagttgggctacttctgtaagtactaataagtccatttatggatgtgactggactcagtccaaccaatgagtaatatttgttttcattgtaggttttttttttttttttttgttctattttagaagttatgtatcttaatttcattttatgaattcatcttcttacttttttatataatgacaaaataaatattactgtaaaattttgtaattttatatttcactattgagcttattttaagttgagagctagtcaggaaaactaaaagaaaaatattaatcgtcctaggaaatgacatacaacgttattcgataatcaacatttaataatattagggcgatgtagagaaccagtgcatgcttcactaaatctaaactaaaccttattaccttcgagttagacagcaaacagataccactaatggcaatggcatgattttaatttttaaataatctaatgaattctgagtttggtttcattctgaggcaatgcaaggaaaggctacgttggattcaaaactctactaggaaatttgttggacaacttgcctattctttcgttagggtgtccagattatatgttggtcaacattgttttcagtttattctaaattgtatttgtgtcattattatgattggaatgataattttgcagtaaaaagaaaatttaaataatatttattcgttatatttatatagacgacagatatttaaataatactactttgttgctgtggatttcctctattttttaagtctactctcttcttcctaactatgagttgtttatttttttacttatttattaaatatatatttctctttaaaaaattaaatatttttctggcaatcatttttacttttaatgtttatgttcaaattttatccaaattacaaaataccttaataatgtttgatatatctaccagtgttattgaaataattttactttatattgaagtttttttttttgcaatgataacaataaagataaaatctaatatttcatgcatattacttaaacttcttttcactaggctggctcactaaaaaatttaaaaaccaataaatcgaaaataggttattattggttcaacacaaaatgtaccatcaaagataaaataaagtattaaccaaaatgattaaaatctaattgaaatttatataatcgatacccaaaacagaacatggaacatgtatgcctgtattcaatgttcatttcgttctctctctttttcatttatattttgtctttttcaactgtttaaactccttttttttgtttacttttatatatgctcttctctttgtaaattttgtttatttgttatttttcagaatttaaaaatgaattggggcaaaatatggaatttagcaaacgctaccatttttcaaagctccattgaccttgattctaaagcagggataatctttgcctgtgatatgggtgagtgatgcaaacgtttccaagggtttagaaccagatccacactcatatagttttatattcttgattaactttatgttggtgatcaagtcgtctatacaaccatatttcgtcaatttgttcacatgaaaagactgatgaaaattgaaaaatgctaatatatatcagtagcgttttgagtgggtaatcttttaaaaatgaagtgatgaaaacgctaatagtattaacgtttttatacacgtagtgtacattgttaatctctgaaatccacgtgttgtccatttgagatatcacaaattaacaatatcctacgtgaacaacatatggtgcagtttatatttagaaaaaaggaaatagataatttctggaaacactccattgactagcgtattctaccgttaatttccaacgtactttaataatacgtttcaaaaaacaatcctaatctgattaaatgtttgtaaagtgaaactataccttactatgatgaaatgatcaatcaaccaaaaacaaaagaaatggaacatactaaaaataaaggcccaattataatagtaatatcacatcccaatgatgcacctcattttctttgttttagttgctattttcagaaattgggtgcgtatttaattcagaatatctttaatttttagaacttcaaagaaaaacatttcagactttatttttttaattacctacatgcttggagagcttttctttgtttttgctctggagtaagaattttttgcgttggtggagtgtgttgtcccaatgtgtgtggatgtgagctaccacaaaaactcccttaaattacggtccaatatccaaattgattcagagaagaaagtaatcctagccaccgcagaaccttcaaaaagcatttggtatcttctatgccttttcaaattcaatgatacaccattaggggaaaaaagtaacgtttaagtcaatcaatcataaaatttatgagtaaatagtttattgtaaaaaaataatattatcattcaattgttaattgtcatatagaattaatggtagtgtatttggtttgcggtttagacgtccatatgagttttacttctcataaaaatcattttatagttgaattaaaatcttaaacgtaatttctattcaaattgaagttaagtttaagttattcttctattattttttcattaaacgtaaaagtttcaaacataaatcaagttatattaaacttttttttactaaattttacaaagttggatcaatcaaatttgggtttctcaattataatccaaacacatactattttaacttttgtgccttgtaatgcatgttttttcaattagttgcactcaactcaactggcgttgaaaaaactattactctcacattgctttggtttttgtgccataaaatgtgttttttcattgaatatgaatttaaacaattaactaaacacacactaagttattgatcttaatcgaaatgagttggaatgcttaagtaaaatttaaatttgagtatagtaaataaaaaaatatggttgaaaagttcaaatttttttaataattttggttatgaaagcaataataatttatcgcaaaacaaaaaagttcatgactttttaacaagtaattcaaataactcataagaaaaatcctacggcaattcaagacatatatatcttcaattaattagaatgtcactctttcaatcattgaagtaactgtgagcataagatttccctcttatccatgataacccgaacatatatctatcgaagtacacattaaaaaatattacaaaattaccaacttatgatagctaatagcttacttatttaatagtacgatagatatatgtcatataaaattattccattgtgcaaagtactgctttaaataacattaacgcaaatagcatatgaggaataaattgtcaacatccaatgtcaagactcaagaacaagaatattgttttcattctctttcgttatgttttcgatagttcattcatttccaaccaaacctaccatatttgctaataatcaagtgatatcccaccttgttgaaatgctttgctactttctcagatctatctaatctatagtacatataaaagaagacaatgcattttgtagtcatcatatagagctgacccattaagcactatgatcacgattccttataaacttttttttttcgacgggtaaaagtaaaacaatagtttgcaaacttaaaaagatgaaaatatgtagaccccaaagaattgttttgatcaaaatttccagcttgtattccttcccttttttcatatggaacatatatactatattcttctctaatactataagttatttcatcctacctttaagctttctaggaccatttgcaaaagtctctcacttgcccaccattataggatcctaaaagcgcaataattcgataaaaaaaaagtcgattttctatcaaaacctttacggccttgctttagtttttatttatttataacatttgtttttgtggttcacattaatattgggatatttgaacgagacataattcatatgaatctgattttactatggagttgtgcaatggaaatgcgtccttcagaagaagaacacgacactgacacgagaacatgctctgtttgcacattctagatgatgctggaaaatcaacgctgcaaatatagttggctatgcataattttaggtttattcattgaaaggcctatctttatatgtgcaataacaaataaagcagatttatatatagaggaatggtgtaaaggaaaatgatgagagttattttaagatagaaataaaaaagagaaaaaagcttaaagaagaaaaggagaaagatagagaaggaaaaatgagcaatcttttgtgtcatagttgtaagaatcaaatccaaccaagattgcatccttattaagtgtgttttgatggtgtagaagaaaaaataataaagaaataaagaaaaaatatttaaattaaaatagaaagaggtgaagaattcacgctatttttaaaaattattcttaaataataattttctcttttcaaccaaatcattcctaaatgaataattcattcgacagcagcataatttaactgatttgtaaggttaggtcagttttaattgttgctagcaaattagtactttatactaaaacaaattagtactactttttatttttaaaaatagcaaaatactacttttcataataagacattcttatgtttgtttgtttttacatgctaaaattatctatagaaaagataatcttatttaagttgaatatcataattataattagtaaatatctctttttaaatgttgctctaaatattttttaattcttgtaatttagttttttttatttttagttcttgtaatattttttttttaattctcataaattatgtttttttcatcattattacattttagataatatgttttcagtgtttaaagcattacttaaaaagaggactaaaaataaaataatataatttataaaaacaaaaaattacaaaaacaaaaaataaaaaacactaaataacaatgaacaaaaatatatttaaatcttaaatattgattaatgtatttgtatattcaggaatcaagcttaaaattatattgactaaaatagaatcattcatgttaattaatttacacgttagatggcaagaattctatttcagatataatttttccaaaaaaacttttaaacattatttactcttaaataggatgagtttactatgacactttctacgacagcaatgaaaatttgttaccagaagttaaaaaaatgttgcctagaatacaacaccgatttttccacatatataaagtgacaatgtggatgtatcaagagaagatatgaataacacttattgaaatttaaataacagtaagtttaagcaacgagtttataacatagacttccatccaatttaataaataacaagttcaagtttgtttcgccagaggattcaagtttttcttcatgtatttcaacaaacaataaaaataaaaatactaagttgctaacccgtcagagttccaataataagatgttttctgttttttataaatagaaatatctagctgaatatttagtatgttaattttgaatcaataactttttttaaggtaattatgaaagaaatatatttagattaaacaaaagagaaaataaatatatatatatgagtatatctcttatttacaataatattacctttagattaatctttaattgttggactaggatatttatttatttagatctcgttaattattatgcacgtggttgagattttctcaattaaaattctaaattaataaatctttaataaaatattttattagattcatatattaggtcaaatatattattaatatatgaaatatgtatcttacaattcaaacgaatgtaatgaaaaacaatatatatatatatgcattatttatctttaattcattcttatttatagctattgtaattttgtaatattaattgattacatctttacatcatattaataattatgccatggacaattttaagccatatgctatattttaacatatagttaaagtgtctcattttttattttatattaatagaggtagtaaaatgaaagtatgtaaaataaataacatgaaagaaaatttcattatcattaaattaataaattaatattttattcataaatttcatacgatataaaaaaattataataattcacccaattaacaaaaattagaacttgttagttcataaaataaatttgatgtattatgctatttttttatatcagagaatggacgttaaggatatttaaaaataaagttctcaatggtggaaaaaatgttctaaataaaatattaaacacgcataacactaatgtttttatcttcccaggacaatcctgtgtcaggtcaaagaccaacattggattccttttaaagattcgaagatccaaccgttgcgtaattcccatttttggattatttttaaaaatttaccattcaataccgtacagaaatggattcagttctgtgatggtcacgggcgcgcctctgagtgtgatgatgagtcgctgtacacgtgtagggtcagtgatgcactttgggtgaatgtgaatgggtctaatcaccctggacatgacgaaatctctctcacttacccttgctactacttctgcactggattatcatatctcaaattttccatgatcttatgttaaattcactttactttttttggattaaaacttcattgactatgattcattcatatcaatattattacattgttctagaccaaattgatcttaaactcattaaataagatcatgagttcaaatttaataaacgttattataaaaatagtcttcattataattagtaagaaaaattctctaactgttattaatattttttatcctatatcaatgatagcggaagtttcttaattcattaaattagagatctatttcaatctagatacataatttttgttgggccaacactttttgtacacataaaaatcaaacataatctgctaaataaatcatttactaattgtggtggaagtgtgtaaccttacaccactaccgaagctctatgggttttaaaatattagtataatgtataataaaaaaatgagaatgacttaataaaaattagtataagttaaaaaaataattgatatttgattaattaattatgttataacatataatatgtttatgtatagttagatgtcaactataaatatttattaataactaatatataaaaaaattaatgtacaattatagataatatatataatagttaaattatattcataaaaaaattgtagatgtctacaagtctttatatacggttatgactatatataaaaagatatgccataaagtttatgtgggttttatcttgttgtctggttctctctctcgagttctgttctgcttattgtgagaaatgttactgttagtgaataagagaaaaatgtttttgtttacaattaaaatagggaaattttaatgttctctttcattttgaaagagattttttttagaagtgtatataaaagaaataaaaggtaaaaataattatatataatgttaaacgtcatataattaattgattttgaaataatagaattattacttggcatgctaaatattcgaggagatttgttcttttatgtttttcctcttaaaaaaataataaaatataatatttttatcctatcatttatatctccttccttctctcttctttttaaaacaacaaagggattagtccttgtcatttttttttacaaaatagattaataacgttttttttccaaaaaatataaaaagattaaaatttcatatatatatatatattataaacataaaaagagatatattgttgtgtatatatatgcatgagggatatgtgccaaaaaaaaatatataaataaatgatcaaattatatcattattattttgactaactattatatcattcattaatttttaattaatatattttagattaaaagttttctatagatcatatatgtaaatttatgtattaatccaaattatttactattttattatgtagattaaaataatttaatatatttttttaaatatattaaaatataataatttgattattttattgattttttttataaattattatgtttaatttaaataaaatttgaacaaaataatatataaatataattcaataattgaatgaataaaatttatattttatatcaagttataaaataatgtaataattatttaagttatattaatataatttaattttttctctcgtgttgtatagtaatatattagtttttaatactcactcttcaaataatataacactgtattgtttactttttgtgtgtttatttttttctttttcccttctcccaaaattttcctacccaaacatagctaaggcatctattatgtcattgaaatagattttgtcgaaacaagcttaaacaaagctgaggcatttattatgtcaatgaaatggattttgtcaaaacaaactaaagtcaattctcgatgctttaatgccagctaaagctgtagtacacacaggacatcgttagtcagttgataaagagcgatgaattcgcgagtgtttggtatatataacttatttttacaaatttatcgacattgttttaaacaatgattgtttcccaaaacaaattaaaaaaatgtgtttttttcagatcattttttttttttctttttaaatttttagataaaatatgttttttgtttattaaatatttcaaaattcaacttaatcatataaaaaattaatgtttcttcagctttacatttcagttcccaataaagtacatggttttagtttatgataagagactaaaactacaccacattttataaatgtagaagttaaaaacttatgaccttaaaattggaatttttttagggataacaacatatttgatcatatttcctaaacaataaaaatatttaacataacaaattactcaaatgagtaatctatagcatttcgtgtttactaattgaagctatatttactattatacttgtgaaggtgtaccggatttcaaaactgaaagaaaaaaaatgttaaatgaaaatgaacccgagtcatattctattcataaagctagtaagtactcagtactcaccacataggttgttagaaagaaattgtgctaaagttatttgagattatgaaactgatttactttattacaagctttaattttattttaacatattttttaatgaaaaatattaaatttataaacaaagtttcatataaccaggggcaaaattagaagaaaaatgttagggggccaaaaaaattaccataggccaaagactaacgaacttaatgcttagggtcaaggtttgtggggacgaatttttattttaattaactataaatgttggaggctttttgatatttgaagaacgactgtccctgtacccttaccctagttctatccctcaatatacagttttttttttttcatttttttttatggaattggtgtttacttaaatagttaatcaaagtgtagaataagtgtggaaatggatcttttacatttcaaaaattaactacacctaatggtattcttatcctattgttttctttatacttataactttttatgatagctgattttgatgattgtagttatttgtagtttaaattttgggatatacatgttataatatgaagtattaataactttaccagtaactaatttttattaaaaaaattgattgattatttttagtaatttttttttcatctttgattatgggattttaattaaatgatatgaacttagtttcatttgaactcatgacatgtttggtttgaaattttgaataattataaaactgcagttgtctgctacaaaattaagttccttcaatagacagatatttaatatttttttaataagtactttcaaaagttcctttaaagattattattttatttaatattataatttaagcacgcgtcaagcctcgattattaatacagtaaatttatatcaatttaaagttaacaatacagtaaataaataaataaaaactttatttataaacctacattctataggacagtggtctgcggatctagaaactagtgctttcgtttgcatagaatatattatcacctgtttaattgtgatcgacttctaagctgaatgaaaatgtaacaaaaattaattaaaaatatttattatataaaaatatataataattatattttttaattatttaaaatcaaccctaaaaactgatgtgtattcctatcatcgcaactattttcttgagatgttatgtctattgggtgatggagaattgcatacaattccttaaaaaatcgaatacgattcaaaaggaaatcatattttagaattggaataaaggaatcattgtctttagattaacactaagataaataaatgaaacacatggccgtggatgcgacgccaagttacacgtgattgtctcagagaattgtgtaattaatatgtgcatacaatatctgcaaaatatttttccatcggattcccttgtgaatgattaaatataacactttttttttttgctgagaaatggacccacttattcatttatcaaatgatgaattgttgattgacattatcctttttgttagagtggaagaataagagtgggtactaattgcagtaatgagccaaaaatataaaatactaattattattttctttaaaactgagcacagcgagaattaagtgacctaaggtgataaaatactgtgataaattaagtcatttaactcattaatttattttaagttttcaacccaccaatttattggattgaaggtgggacaagacgagttattctattcagcctattaacattaataacatattaaaataactttataattttatataattaaaaaagaatgaattataccctaaaaataatggtaatatcatgaaaatgtataaataacatctattgtcttattttcctcataaaaataattgatttagtatcatcataaattaacataaattcactctctattaatccactcttcactaatgggttaacccacctcgcacttatgataagttgaatgtgagtttttttttttttaggaataaataggcttgtgttattcagaacaaataacagaacagtgtacatcttgcactaaacctcttcaagccaataattatctctgggagttttttatagttgtgaatttaagcttaatttaattaaaattggtttataaactaaaattgttttttatttatatattttatcttgatgttattctataatgattttgatatcattttagaattataaattttatttaactcaattttataaaattattttttaaataaaatttattctaacttatatattctattttgattttcagtgtggttaacgtgggatttgagttttatttcactaggttaatttgttttgccaatcataagataatcggacatgtaaataataaaaatagcaattaaatttttaataagtgattttttttcaatgaatgaatctaataataatggaagagtaacggatagtcacggtcagaacttgggacaaaagttgctcctccttttacgcataaaaaggaaatttccagtccttttgttgctaaagaagggaaaaaaaaaaaaagaaaaaatttcatctcaggttgcctgaaaagtgaaacccgtttaaagcaacaagaagtatactgaaaaaaaactcttcggttaaattttataaattaaaaaatcaattaaaaatttaagttaaatattacattatcttattttttattatcaacattttcattatttttatatattcacgcattttaaaagccttttcctttttatttttatttttgaaatgcataggataaaacggtaaaagcggattgggtctggcacagtgccacggacacaaacactgaaacacgattcacagttcacaaattcgcatcagtatctatgtaaacgacaaaattaacacaaatataatatgataggaatgttagataaatcttattttttaagtatgtgattataaatttaattaaattatgtatataaaaatatttattaaaatagattaattttgaatatattattatctccaagattaattcttaatttttggacaatgatatcattcaaaagaaaaaaaataaattaagtatgattattgcttaaaaataacaagaagagtgttcactgtattcatgaaaattataaagcatattcacactcaatctgtctaattttttttttatttttttttttttttttttttttttttattttttttttttttattattataaaaaattacaaaaaataacatttaaaaaaaaaggaaagaagaaggagatgatgatattgttaatttgaaagtgagaggaaaatgacaagaaagagggagctagaaagtgacggtttttgtttaattatttaatgaatcaattattcaatataatatgatgatggaaagtggaagggcgagagagaaaaaaaaagtttttttttaagaaagagggaataaaacaaaagagggttagcttagtatgactgtttggtgtttagtggctgcccttgctttcataggaagtgagaaactaggctagttagtcccattggattttttttttgtggctgaagaaggtgaaaggggggcaagtttcactcttcaagggttttgaaggtgtcaacttgcgttttgagactctgaggttgttgaggttgaggttcaagctgcattttttttgaagggtggggatgggctctagttgtggttgtggtgtgactcttgttcttgttttctgcttatggggcatgttgatctccctctcttctgctgctaggctcagtgctacaaggcagaagcttgaggttgctaagcatttgaatcgcttgaacaagcctcctgttaagaccattcaggtctctctctctctcgttctttctctctctttacttttaactttatgtttgtatgtgtgttttggggtgttcttcatccacccctattttggtgtttcttcttgttttaatctgtttggcacccaatgaaatggtctagttttgtgaagaaaaaaaaagattactttttttttgttttgcccttgtttgctggatgggagatgctactgaaatggttatgtacctttcaaacattttcacttaaaataatccatcttgcaagctgctgctaccgattttttttttttgtaagtattaggtgatttcttttcttctctttgttttataaaatgtagatcttttatgtggatgtgctgatttctcaagccaactaaaatttccctttaattttttttctcctacttacacccctataaaaaaaatatatagcccatttgatgggaactattgattgaattttgaagcagtaagtcagtaactagaaatactgtaagaaagaagtaggcaatgatttgccttttttgtttatttattttccctttctaatcagctactgggttttgagtaatagaaagatattggtttcaatttggtacatagtatttcaaatgttaacaatattatgatgtgattttgtcaatgttgcagagtccagatggggatacaatagactgtgtgcctgtttcgaagcagccagcatttgaccatcctttcctcaaagatcacaagattcaggtccattttcctcactcaagatctatttttctgttctttgtttttcttcatttttatgtaattttttactaacaccatgctttgatttaatagacaaggcctagtttccaccctgaagggctttttgaagagaacaagttatctgaaaagcctaagcaaaaactcatacccccatcactcagctgtggcatgcgaatggtagatgtcctgaggacacaatacccgtcaggagaaccaaggaagaggatgttctgagagcaagttcagtcaaaaggtatggtaggaagaagcacagagcaatccctaagcctaggtcagctgagcctgatctaattaaccaaagtggtcatcaggtaagaactgttttgagtgccttgtattttattaggttttcttgtttcctcttttaagtagtaaccttggtctaatctcctgatggtgtttttgtggggggttgtaatcatcagcatgcaatagcgtatgttgaaggggacaagtattatggagcaaaagccactataaatgtgtgggaacccaagattctgcagcctaatgagttcagcttgtctcagctttggatattaggaggctcatttggtcaagatcttaacagcattgaagctggctggcaggttctaagaaataagaatcactattcatttataccaagtgtgcaatctaagtactgcccttgactctgaattataatgtaaattgtaatgactgttgtgcatgataacaggttagtccagatttatatggtgataacaatacgcggctattcacctactggacggtaagcttgatgtatttttttatgcatggctttgattttttattttaatgtttgtgttatccaatttattattattattttttttatcaaactcacttgctgcattttgcagagtgatgcatatcaagctactggctgctacaatcttctttgctccggatttattcaagttaacagtgaaatagcaatgggtgcaaccatttccccagtttctgcataccgaaactcccagttcgatatcagtatacttatctggaaggtaaaatcccaggaatttcctggtttttaatctgcaaatggaaaccacccgttaagcatcttggggtctcatctcattaatcttccaactaggtgtttggcatgtggaccatggtaatgtcccccctagtgtttggattcttggacacctctatcatctttcaagcatttgtatgaaacatgatatgtggagatccaagcctatgtttgctaattcatagctaatatgggaatcttgagtttttaccgtgttcacttattaactggccagtaaaagctttttttttacctagtatcaatagcattcttcgtggtagtggcaccctagttagaatcatctttatagcacagatccctggtatctcctcccagtttcttttgatcaggatatggaccccaattttaattgatgatggggacactgttaacaattcagccatcaggaactttgaaaagtcatgaattgcttatactcattctataaatgcacagaacacatgttgtattttcaaccttcataccctttttaatttacacacaatgctcttttctgttggtgagctaaacaatatacttttaagtcattaactttgttactggtactaattagttatcttttttctatttttcctccttgtaggatcctaaagagggacactggtggatgcaatttgggaatgaccatgtattgggatattggccttctttcctgttctcatatttggctgacagtgcttccatgatcgagtggggaggtgaagttgtaaattctgagcctgatggtcagcacacatcaactcaaatgggaagtggtcatttccctgaagagggttttggcaaagcaagctacttcaagaacattcaagtggttgatagctccaataatctcaaggctcccaaaggcattggcaccttcactgagcaatcaaactgctatgatgtccaaacaggcagtaatggggattggggccattacttttactatggaggccctggtaaaaatcctaattgtcaatgagtaatgatgagaggaaagttaaaaaaaaaaaaaaaaaaaaatgcaacctctcttgtatcattgaatgctagtgttaaagcccttccttctcttccatcttgtatacccttttttctgtagtggaaagttttgactttttttcttctaatattgaaagattctccatgtaagctagtggagaagtgtggccaagtttctcaaaagcctaaagaccttttataacatctttgtattttatttgtttgtccactcctcctccctctataagagtgtttgtcaatggcaatggagctggtcttttgtgattaccaaaactagaacttattacttactctcaaaatgagtcactaatgttgttccattaattttaactgattattatatggtacctatggctatggccatgctttgaatgaaaaatgagtcaaataaaaaagtgaaaagtactgtgagaccagtgaaagaaaaaatgaaattgtattattattaaactttggacttaaagatgcttgaaaagggttgcatgtcagtggctgacagtatatttgtttgcatttcaacttttttcgtgaaaagtgggcccacttcttccaccctatattttcaatcgctttctccattctgcaaaccatcgttgtattaccattaaagcttgtgaacaagcggtgctaaaagtcgtaggtccagctcctttatatggatttagttttcttgctcgataacaaaaattataattattaattaagagtcactaatattatgtcttaaactaaaaatagaaattttaaactctgaaggattggtttagcagtaaactgatactagcaagttatgcaatggattatgtggagacactttttaaagcttttagttatgtaagttagttggtgttaaattgatactaggtgggtgttaaattgggtattcctgcctcctattttttttttttttgtaaatgttaaattttattaatctaatcagattattacacttactaacttatataaagtgtaatatttataacttgtaaagaattaattactaagttataacaaaaaattatagaagtatgttatgaaaataattaaatatttttttccatgaaacttagtatttttttttttttgtttgttttacaaaatatttttttatttttcgttcttaaacgttttagataatgttttgaataataaaaaaattttaaacagtaaaaaatgttatgtaaaaaatttaagaacaaaaataaaacaaaatattttgtaatgataaaatgaaaaaaattacaatatgaaaatgaaaaaaaatgctaaattgcatagatgaaaaatatacttaaaccaaaaatataatacaaaaaaagtttaatttctagacaatctttgtcattaattttttacataaaattatttaaaaattgaatatgataaatcatcatgttattttttttgaaatagcaggcaattcacatttgtgtcatcatgtatcatgtataggttaaaatataagtatggtccttaattttttttcttcaattgttccttaactttcaaaagttctaaatggtcgtaacttatttaatgaagactctttagtcattctattccttacttctcattttttattttcaaacatgttttgaatcctttattaatttgattcaaaatgtgaatttgttccattagattcatctgcacgaaaactataaaattaactaatgtttaaaaaaagaatcataaacatagtgaaaatcatatgaaaagtgagtcttgtgaacaataaaaaaagaatatgatattaaatttcttctgtttgatacttatgaaactcacttttcatgcaatctttaccttgtttatgtcccttttggttcgcacatgaattgattctcatagttttcatgttaataaataatgaggcaaactttatgccttgaatcaatcaaaaaaaggttcaaaattgtgtccaaaaattgaaaatggtaaattttaaaaagactaacatgtcattaattaaataagtaaggtgatatttttaaaaatttaaaagtttggaaactaatttagcaaaataaataaattaagggagcatttgtatattttatcctcaagtatattaaacaataggttctcagtgactcattggattttcaggtgagttagctctcttttgaagataccaatctgtctcacactcttacatagacttaatacattggttctctccatcttacggccaaatgaactagtatgcgggcttagtttttaaaaaaattacaatctcaaaataaatatttttttctctttaaaaattaattacactcaattatatatatatatattttttttaaaactctcaataaatctttaataaattctaattataaagttttaacacaaccaataaattttcaacataaatgtaaagaaattttgaattgagtttttaggattaattgggtttgattcaacttggtggctgcaagtttgcagtccaactcgcggatcttatggtccaaattcttaaagttcgtgaattatgaaggacggatctaaaattctgcataaccattaattttttaaaaaaatggtccatgactcatgcataccctgagctccacaaaccgattcatagacttgaacctgtttacccatccgcaatggtaacatgcaagctgtagggcgttggcagtaatgagcatggctgcgacccatatcgttcctggcatatatgcttcgctaatctatagaaacacgttgattggacaatgttctgatttctgaccaaagctagtccccaaatctgcacgagacaatgagttaggttacgacctaatctactactcttcaaataataattgatgtaccatatcaagaatgtacccactactagtattaatttgtgaggtattgtatgacttctttgtaaatattcaataaatttgattatgaaatttattttactccacactgttttataagaatccaaaagaattgtcttaactatttgatcgagcgttgcattgagtcaattacatttaattatgagtcaatccttgcaacatgcaaaattttgatcttaactttttcacttttttcgttgtcattttttaatccgtatacatcaaagacatctactagtgattagttaatcaagtgagatactccccaaataaaattagctactttatctctttaaatcttgtacacttttgaggatttgttgcttatttgatatgttttatagagatttgtttaatagtttaacactttgaattagaacatattatacaaattatattaacttatatatatatatatatatatatatattataacatgttatttccatacccatgtaaccggagcagagcctagcctggcagtgacagtggtaggtttacatgtcggtgatggcaagcacaaaactcattgcaaacccagtgatttgtcagcggctcaatttggtgtatggtttaggcattgtttagtgttattggttaatattctgcacaaattttggaaaggggcactgcaatattttctcaatgtgtcaaacaaatgcaatgaaattgaatacgatcagaatcaacattaaaaaaacgtaggatataatttcaaaaacgaaattgctttccagttctgtgttttttttttttttttcctgttacatatgtgcacacagcatgtattggagtgccattaaaacgtatatagatctatagagtatatacaatcttctatcattttccatattttgatgaatagtatggttctgagatggaacctatgtttggaacttgagaaagagagtggaaagaaaaaaaaattaaattgaaatgaaagaaaaaaaattggattcttatttctataagttaactttctttttctttttaatttttcttaattaaaaaaattatatcattattcatgtttttttctctattttttttcttcttatcaaacatattaatagattttctaatatttctaataattaaatttaacagattttgagcgggaatgaaaggttgaagattggacaaaaagttaacaataataaactttaacattgtgactacaaggattaagagtgttcacgggtatggtcaccgtgaatctgaactaatctgaatcgattcgaacagtttgagttggtcatttatgtatttgagtcaaaatcgaatcgagccgaccaaaatcattcatgtacgagttgggtcatggatttagatttatagatcgtgaatccgtaataaaaatataaattttattatatatatatattaaaatttaaaagctaaaattattttgacaataaaaaaaaagtgtggtactgtaaatgtctaggtcgaatgaagggctacccataatctctcatctcatctcatctttactgtgaaggtgtggtactataaatgtgacatgtttaggtttttttttcttttgcgcttatgtgttctgtctcatctcatctcttctttgcagttctgcaccagctccttctctattatctctcatctcatctccttctctattatctctcatctcatctcatcagattgatcaaacatcaagttttattctacgctttctttttcttttctaagctctttaacttctcgtgatttttctggtttgtattcattgagattttgatggaaacagggatgagaagaaaataaataacttcattgttgaatgttgactcgaatttttggttatagcaaagtttattacaagaaattaatttgtaagaaatagttgtgattcagactattataataaattttgttcaaaaatcttttgttttaatttatattataagtctattttagaacattatgttgattgtattaaatgaatcatttttactattttcatacatttgataatattgtgttaattgtattggatatttgaaaaatcatgatataaaataatagtttaaaggaaaaatttaaatgcataacccgttgacccgaaccgttcatgaatgggttggattgaatttaaaaaaaatcctgaaaatcgaatagatcaaatttaattagattagatcttaaatttaactaaaactaatctgaactaatccgcagacaccctatgaatgtttagcctaatctttgtgacaagggaatattctagccgaacacgagaaatttaggtaatgtttacgtaaagattttaatattcaactcagtgcatacattacatgatacaagagataaaagttagacaacacctccattcctatggaatctatttatattatttctccttcgcctattgtggcatttcctcatcaataatggtgtgacaattgcctcactaagcaaatagtacaaagatttattaattggatttggatcatgataaattatttacattatattgtaattcgtccatgatccaaaaggttcttaatgaggtgcataggaggtttgattatcaatcctagtttattgggtcaactaaaaaaaaacaattatcatttgtcaataattaaaacaatcctaaatttattggatcaactcattggctcattttttgtatgtgatgtgtccacctcttcaaatagggatcaagaacaattatccccaaatcaatgggcttggttataatcgttcttctaataagtttaaggttttttcttagatttcatcttattttagataagatagactcttctgttttttcgactctagacttctaaaagtttttttgtttttttgtttgttttaggatttgacagtgtgaatgtgcatttgttttgatggttgctttctcttaacgtttttggtttttgtccaggtttcttctttttatattgcctatctttctttctatcattcttgttttcaattttttttagttgagctgggttttgatcatccttttcattttgctagcttttactctgcttctatgtttggttaataaaagaaagtgaaaggaaataaaatgagaagagaagagagtgaaaaaaaaagatatttacccattcaacatctttagttataacttaaatttagattttttttcaaatcaaactatcattaattaaaaataacaatctattaaaacataaattattcatcataaatctagaatataatttacgtgttaaaatatttatttactataaaattaattataatgtaatttatatatttagaaatatttatttattataaattaaaaaattcatttcataaattaaatatttattatgttattctgtgctctggttgcttataaacaacatgtggtgagacccatgaacctagctatatctcagctcattgttcaaatttcatttctacttgcatattttggatcaaaagtactacaaccatatttcactaacttagtctcaacttcaaggctacctccttgtggtttaaagtttccttgaactcacgtttcttatttacaatacgacatcattgtattgactaggacttttccatgctctttttgggtaaatttaatgattttaaacgtttttgtatttaattgtgtatatgattaaaattaaaactattttgaataacttctcatcaaatcattaattttactttaaatgtattttttttttctgattgatggtaaacaaaccaaagtaaatcagtaagtaagaacccaaaatgactcgagaaaaaaaaatatatcgacaaaaagtataaaaaaaagtcataaaaaatgtaaaaacaaaatgatcataataaaataaaacttattttcgaatttcgacagcaatgtaaagcagcatagtactccattattagaaccttgtaaagcaccaactatagagactcttcatcagtaaacatcaaaatgagtttctaataaatttccgacaggactcgtattgagaatcaatagtagtatttttcttctttttttttttttttgctgaatagaagtcaattagttgttgtaaaaaggaaaagaaaaacgaaaagagaaaaaaaaaaaccatgaagtagatgtacaaaatgctacacattaacaagtaaaaaaactgtacaaaaagcaaaaatcttagaaagaatgtaatgaaataaagcaatcataaagagggaaactcaccttcaatgtatattaactaaaaggattccaaattaataatgaaaaacttcatattgaaatagcacaactaatcaatatgagataaagaacattagataataataaaaaataaaaaatatgactgatctgtttagggaaagtggaagcctggagaatataaaacattagctagagatataatctaaaaaagaagaaaaaaatgcgattatataaagctgtagtaggatatgaattaatgacagagaaagagaaagaagacaagaatgttttacaataatgttttggaacagtggaatacaataaaatgaaagtaaaagaaaaataaaaatcataagtataaaggaaggttaaacattttgtagaaaatcaaatgcacgagaagagaacatgtgctatttcttaacaaagcataaactatatttgatagaagttttttttgcggaagatattttatagaagttatggatagttaaataaatctgtggtttaaataaaattgaatgtttgatcagataatatttctttggcagcggattagataatattgaaagcttaatactccatttattatttttgaaggagaaagcttaatactcctaacaaataacaatagatttttttttttttttttttataaatcgacgttgacaaattctagtcaaatcataatttttttttgaggatctagtcaaatcataatcaataccagtgtatttaaagaaataattaattatagcatccttaaaaataaaacctaggacaggagcatctttaaataaacaaaaaaaaattcttcgattaatatctataataatagaatgataaagaaataggaatctgggagtctcaatgattaagaagagttggatttaaaaaatcaacgagttagaaaaaaaaaaaaaaagcatatgaattaagaattactgttgacggccaccctcttgatttcgtgggcaaacatttgtttttcctttttaattttcatcttctatctcagtgtttgtttgtttgtttaattttttgatttttaaatgttccaagagaccaagacacaatcacgggaagtaaatgaatgcatagccaccaagaatgtaaagaatttcatttaaaatgtcaaattccaaacttttaatcaagtcactattatattattgactttctcagccaatatcttagcttattttttaaggaagcaacaacgtttaaaaaatattaaaacttttattataataataacacaagaattatttagcaaggagtacctttttttatgttaatgatattcaatattttaatcaatatttttagaagaattaactaaaatacattaaaagcataaaaagaaagtaccattatagtaaatttgttattctataataataaatatcttaaatattatacttaggatgatttttgataagatataatgcaatttttttatattaacagtatatgaagattaacattttctttaaatattcgctaaaaattcttattttatttaatataagttgacaatatatttcttaatccattatttctaacatatttttattattaataaataaaatttaagtacattatttaaatgtcatgctcttattttccatataatgaattttatctattttaaaaaaaaatataaatgccgaaaaagagttgaaaagtgagtcgctgctggtccagaaaaaactgttaaaataaataaaaagtctcaaaccggtaatataaaaacgttaaagcaattctttctgcacattatttgtctttactttctctctcatacgtagaggagagagaaaaagagagaatttaattttatgtttacttgatatagttgacagaggctgagccaagagaagaagaagggtgggtgtagtagggtttcaatcttcattcttcactaatccttttatacaatccgagtgtgtgtaagaaagagagacccgaacaaattcacaaacccttcttctctctttttttcttctttcaatttcaattttcttgttactattactaaccctagcttccttgaacactcactttgaaaccctagctgcttcagccatggctcatttcagctgaattcgccactatgttgctgccatttcaattcacaacagcgaggtaagttcaaaacccgttcgttccgtttcggcattctcatgcaccgtcgcaattaacgctgttttgtttttctttggctgtaatcaggtgcatgcgcgttgtttgagtggaggagggacaggcatggaccgtgcgcttctcctcgcgtgcgtgatttgcgggatcctcttctcggtgttgggcttggcgtcgttcttcatcctttgggctgtgaattggaggccctggcgaatttataggtatctcgtcaagattctgtgtttctgtttacctgtttttcacttggtgctttgggtttgtttgtagttttaagattaaattgccatgctgcaatgttaatgctgttgattttttgtggcgcatatggattctgttgctaaaaattagtagttgttttaaagtattttataatttgatatttactggcattggctgctgtgtactgtcgctgaattgcataactaattagctacatttgtttaacaacttgggaattaagtgtgaaccattcgggtgctttttctgtttttatgatggtctgctaagtatggtggttttgtgccgtttttgaactgtgtgagccggtaacttgggaattctgtacacgaggttgatgcttcctagtcctgagtgctttgctttcttttactttgcactccttttttaagtaatttggtcggaattcacatgatgatgcatttcagtaacgccttaagggctagtgtttttagtgaatgtatcacacataggatggtgccaaatgtaagatgagaagtctaacatttaaacattcaatgtgatgtacttatggacattgtaggaaataaccttttttttttatctattaatcaatgtgtttgttttaaacttaaaaaaagaaactttataataagtgcttttttaagaagcagataggatttgcctcttaaaaaaagcagaaaactgcttattttaagtacaagcagtttatacaattacatcagaaaaacagaaatctacttattttaattgaatttcctttgtttccttaaacctaaaccctaaacctaacctaaccctaaacctaaacctaaacctaacctaaacctaaaccctaaaccctagaaaaaaggacgatttggatagagttgtggaaattctcatgaaacttgtagtcatatatattaggtttacaatttagtatatctgttggaatcttaattaacagtggtctgaatttgaagaaatgattacctggtttaatgaatataaatataaaaaaattgagattacacatctgtatggttcatatatgtgatttgtattaattgagttgctaatcaaggagataatagattcataatcttcagtaggcctttgattatttcattgagttgctcctatgataaaactgtatcaccaattgcatttagatcgtcaattagggattggattcaaaggtgatactaaaaaatagttcaatcttaaagcattgtgcttggaagttctgtgtgaagtttctgacctccacattcttgtgaaattgaaaggagtgaattttatcccataattgcccagagctttttcatctgattactcaagcaatcatattgtcagaaatagacgattgtaaccaagagagaagcaactggtcttgttactctgatgtgatatagatttcagaaatgtgatttgccccacattcttcatgtgtgcggaattatgatggaattactgtattggcgagaaagtggtgaagatgacagccttggattattggttcaacttgctggcactgaagtagataatttttcaaatcattttctaggaaacagagtgacaaaatataactgcggatgatgccagagaagatcccatggaggagagaggtgttgatggaggatgcaatctcagtggcaagcatgaattggttgttcagaggccatcttgggttcgagcaaagctctcgaagtcatgataaagttgtgaggaagagaaaatgaacactgaaccataaatttataattctgtaaaatgaaaggctatacatagcaccctgggctggcttcagctcatcaagatatcctataggaatgggtacaatcatattacagagagtgagagagttacattactctaatatagatacacctttaaagaagaaacctttgaagctaataagaaaaggatgtctcataaaagttgagttggaattatgttctagcagatagcaccagatttcttttgtgtgtatattatttgttctattattaaaaagaatttcttagctctttagtgttattatactattattattggatagaaagaaagaaatatgaatttattattgtcttgcaggacaaggctagaataggtaaacagagcaaaaataaaagtaaaaattgacatctaggatttttcctactttgtttcacatgagtctctaatctctatatacatgttctgaaaattgggtaatttcacttcttgtgttgatgtggtctgttgtgattaattttaaaatatttgatgaatccacagtgatagaaactgcattcttgaacataacacataatgttgctctgggcctcttgactgtatttcaggaacaaataagttcaagttttgctacataactttctatgttatctcatatgttttgagaagaaatacaagttgtttttatgctgctttgtcatgctgataaaaaatgctgctttgtcatgctgataaaaaatgctgctttgtcatgcatttaaagtactctgaattttggaacattgttttgggcttcttgcatctatttttatttatttgtttctatttcagttggatctttgctcggaaatggccaaatatcttgcaaggtcctcaactccatttgctctgtggtttcctgaatctttctgcatggatagttgttatttctccaattctggtgcttatcatttggggctcttggttgattgtaatattgggtcgagacctgattggtttggctgtaataatggctggcactgctcttctattggcattttattcaattatgctgtggtggagaactcagtggcaaagctcaagtatgtattttccggcctattttttatttaacaaaacatattttgtgtcgtgttcacagttattaagcttatatattctattaatctattcaatatgaaacccaaatttctaaatactgtatcttaggtagagactgtttctggtattattactgttgtggattgttttctgtcgatgatcttccatcatttgagcaattgacagcctttggatgtgatgattatgtcttctgtttcatgaaaaagtgaacagaagagagaagaactgtaactgctgtcatgtatgactcttccattgttaaaattatgatattctcattataaaaatggaacaaattgcgcaggctttactggattcagtgcaaacctggttcccaaaaaaaatggtcaaaaaggttgctggacatgttggttagtggtcataaagttgccaaaaaattgagaacaactgggaactacagcagggtgaaagtattggatgccaaacaaagaagttcctcagttgagaaattgactaaaaataataacttgatcatgtttataggagatggtattgccttggttagtgaaaagaagtaaaatagaacaagattgattgaataatatataagattagattgatatggcgtgttttacttctaacacaaaaatggcgctaatattgtaaaacttactaacaacactcatagcaaatcagaaggtaaacagttggattatcaataggtctaggtctagcattcaacatgcatgtttcctttatatgtctaaggcgtactggcagtggcggatctaggaccttggaccagtggggcaatttatttaaaaataaaaattgataattgtcattattatatggaatagttggattcaaatacgaagataagagaaacaaaatatgaagttttaagataaatatttgcattttattaaaaagagggtgcatttatttactcttacatgtaaactggtaaggagattcaaatacataaaattaagggttcaaatataaaattatgggtgcaaaatatgatatttttttgcattttattaaaataagatgtgtatttacttatttttacatgtgaacaggtaaggagtttcaaatacataaaattagagggtacaaaatataaaattatgggtgtaaaatataatattttaggacaaatactagttattttattgaaatgaggggtgcatctgccacctcaaatacatgtaggtccgccggtgcgtactggttgatgaatagtaatgttgaccttagattgagcaacatcaattctttagaagtaccagagttttccctaattttggtccaaaattgataaattataattatattttctaataaaatgaatgctatggtgatcgtcatctgtaataacaatttcattagcatatacaaccaaatatattgtaaccgagaagtacaacgacttcaacataaagatctgcttctttataaggcagaacagcctgttgcataacaacgctatcaagcttaaggaggctgtttgaggccataaaggcatctttgtaatcaacacactggttgtaaagattccccctctgcaacaaagcccggcagttgctctgtatgttgttccttcaattgtccttgttgaaaggctctgtatgtgtgtacaaattgttgacggttgtgtgcacatattggatccaaattttgctatgttgttaaaagagaaaagtttaaaattagatctaaatgtcctggcatttttgcttcttagtacaaacagaaataccgaattgacttcgaagcagagctaaattttttaaaaatggaatttttgttccttttttgttaagaattacttggttcaatgagaatatcattgataaaattgtaacaaaatattgaaatctctaggttgaaacaatatgatatagaccccatatgtagtatgctctagatatgactttgaaattactattgtgtcccaatcatttgtgaatgagattgggagaaaacaagcatcaggtgaggttaaaagttgataggagccatgtgaatcatgctttctgctgattatccttttcttactgtggttttgcggaagaaatgctcttttgtttatgctcctgctttggagaatgatctggagctagcaatttaataaaatcaaatagtgaaggccgtacagctgaaagctcaaataatttgacatatgttcctcaactgtgagctagtctcatgggattgtgcttgagagttattactctgtccagaatgcctagggcatttagagtttttgccgtctaagctgatatcatattacatttcttcttgtccaacctatgtaaggcgtttgttcctatttctatgttttccaacagcagtgaaataagttgcttgtaaataggtattttgttatgagtacaacaaacaacaggaaatgttctttgattaggtcttcagtcaaagctattgacggaaaattttgtccttgtcagctgcacatctttttttcttttgttctctatgctgcttttcttccaatgcctaagtttagtatgaataggcgaatgatgtggccaagaagcagtgttgtacaaatattagacatgaaaagtattttacctggttttataaagatatagtatgtttgggcatcttatatgattgatttagtttcgttttcatgttgggcgatgttatagttgtaatacccaatatcttcatttttcttttgacaggggctgttgcaatcctgcttcttttggctgttgctcttctttgtgcatatgaactttgtgcagtatatgttacaactgggtcacgagcatctgaccgctattgtccttctggtttcttttttggagtctctgcaattgctttagcaatcaacatgctatttatttgcagaatggtgtttaatggtatgcttttgaatcacttagttcatttacaaattgctattcctgattattattaaaaggttaagatatttttttggttgttgtacaagataatcattttcaacgtagtccttatgtgacgaaacttttcaattagctcctaatccttttcaatgttgtctgtactgtttattgtcataatattgtgatattgaagttgagttaccctaaaatatatggatcaaatttaataatgactgtgatgtagtgacaaaaatatagtattttagtccctacatacacaacactcatctttagtttggtacacttcattgtgttataactccagtagatagtagtattataatagtagtagatgacattcctttttgatgtacatggtgtcccttcgtacgtatactgcttttggcttgattctatttgtttttttgtttttcgttatttgcatatcttattaccattattcattgtagggaatggcttggatgtggatgaatacgtgcgaagggcatacaaatttgcttattctgattgtattgaagtaggtccagtggcatgtttacctgaacctccagaccctaatgaattgtatcctcggcaatctagaaggtatgttctaatgcttgttctcattgttgactatcctattggagacaaataattttaaggtatttttatagcattcattactagcttagacagacatttattttgctattgcttctcaaatatttatttggattagacatatagtactatttcattaagctttcttcctccaagttcttattgtttttgtttgtctttgtagggcttcccatcttgtactgctctatcttggctcactatgtgttctgttagtatactccatcttgtatggtctaacagcaaaggaggagaattggcttggagcaattacatcagttgctgttattattcttggtaatttaattagctcttggtatttattatattatttttttaatgttaacagaaaattcttgtgcacttttcgtctctggttatttgatttgctctttttctgtgcacttcttgttttgtagactggaatttgggcgcttgcctgtatggttttcaacttcttgatagtcgtgttgcagcactgtttattgctggaacatctcgtgtgtttcttatctgttttggagtgcaatactggttagtttcttaaatgaaaaaagacctttttctcagcgccactgcatgtattattggtttgttctttgttgacttttctctactttcaccactcacaggtatttaggccactgtatcagctatgctgttatggcatctgtactgctaggagcggctgtttctcgccatttatcagccacaaacccattggctgctaggagggatgccttacaaagcactgtagttcgtctgagagaaggattccgtagaaaggagcacaacagttcatctagcttttctgaaggctgtggctcaagtatgaaacgaagtagtagtgttgaagccggtaatcttggtaatgtattgaagctggcagggctatgctgcaggtgatgggagcaattggaataatgtcctgtctcaaactactagtttgccagatggaatcattagtgataaaagcatagatagtggaaggtcaagtttagcattacatagcagctcctgtcgctcagctgttcatgagccagaagttggaacatcatctgatgatagaaatttggatcacaataattctttggtggtttgttctagtagtggtcttgatagtcaagggaatgagtctagtgcatcaaactctgcaaatcaacaaacactggatttgaatttggctcttgcattccaggaaaggttgaatgaccctaggattgcaactattctgaaaagaaggacaagacaaggtgatcgagaattgagcagtttattacaggataaaggattggatccaaattttgcaatgatgttaaaagaaaaagtttagaattagatccaactatactggcattgttgcaaaggagtagcatggatgcagatagagatcataatgaaaatactgataacaccagtgttgacaatgccatgcctaatcaaatttcattatctgaagaattgaggctacaggggcttgaaaagtggcttcagttgtgcagacttgtattgcatcacattacgggtactccagaacgagcatgggttctgtttagttttattttcatacttgaaaccatcattgttgccatatttcgtccaaaaacgatcaaaattattaatgcaacacaccagcaggtgagtgctgagtccctccctatatatttctgtttgttttgggggactgaaagatacacacacacacacctatctctagaagcttgttatccgtatttcatttgtttgatcttggggttgtaactgtttaaaccttacaatgctcattttgatatttttgaacctttattgcttgtagtttgagtttggtttggcagtgctcctgttatctcctgtgatatgttcaattatggctttccttcgatcacttacgacagaagaaatgtccatgacatcaaaaccaaggaaggtactagattggctgttttttgattaaaatgcaaagttcatctactgaaatggatgaatttaatttttaactgtttatcttgttgagctgactaatgtttggctacttgactacttgttgtaaatttgtaatataggaagtgcttctgttgccgtataatgtttttggttttgatgcggcagttttagtcttttaaggtttatacattcttatagtgcacatatattagttttagatgagagggctaactttactggtgctatcatgataccattctcttgcccatataagctcttggggtgggattattgggaaactctttggaaaagtgggattgtcctagtttgttgaactgggtttgcctgtctgtgatgggctgagctgggcagcctgtgatccaaacatgcaatttgaaaacctgaaatccctaaatccccattgtctcagcctctttgaatcacttgacctccctcttctctcagaattaaccccctctctcttggatgtggccccgaaccactataactctactctcaaatcactttggtatggcgagtgttgaagctttatttatttatttgtttgtttgtttgtttttgtttcttaaacccataatttgagcttatgctgggtctataaaaggtctcatgattctttgacttctcattacttttctgtgttccttctttcctttccataattgctgtaaaatatcaaatagacattgaattattaaataatataactattaaacaaatatataaattcttccttgaaatttgctggtgggattgtacatcttatgtcacacaatttatgagcatcccaatttattttagctaataatagaagatatgtattaatataacatgatataattaacagatgattatgtttttaaaacatgtgattagatatccaatcttatacaacacatttattaagagatatcagtttttaataaatttcaatacttcagggaaataatatctatttcgcagtgaaagaccatgttttcccctcattcctaagtaggatctcgattttgacaaccttgcatcttgatttccacttggacttaagttacaatgttgttttcttagcctgtcagaggtgtgcagtcatgtagctcatgaaaattaatggttccttgaagttcattcccccaatttatccgaacaacttgctatcgtctgttaaatcgggattgtatatcttaatggaaattgtagaatcaaacaatcctactagtaaaattgtgattttgaccaggggtggagctagcatttttatgtaaggggggccaatataaaaaaaaatcatgacttataaaagaatatttaaaatttttcatgcatgatatttatagaacttttaagatataactaaatgtattttaggagcaaaataaataaataaataattgtgttaagcatgagagagatactaattaccaagtgcgattaacatacaagggccaaagaccagtatcaaaagaagaagaaactaaaaaaatcaattaaattaagtgaaaataatttttcatagtcaaagcatattattaaaaaaaaataaattcaaaagtaaataattgtgtcacatgaaaaatacgtagaaaatacttggataaatgaatcacacttgataaatacttacataagttaactaagtataaatgtatcattaacaaaaatagaaactataaattagaaatgaagagaatttgactttttaggtaaagtgttttaataaaaaaatattgaagagaacttagaaaagtaaaataattttatatgatgagagttttttttagcagcaaagaaagattatattatagttataattatattataaataaatggattggaatttgtcacaagatgtgggcaaatcaccaaccacagaaaattacaccaagaaattacacaaacacgactcataaatataacatagcagcactgagaatccaacgactaacaatacataaaactcagtaaaaacacccaggctcattgaacccattacaaaacaaaaccgtaacatactaataccggctaaaccaaactaaaagaaagtatgacaaattccctgtatattgtgtccaataagaaatagccgattaaactgctgctattaacctcccctataacgtgttacgacatcccctaatattttttccatatacaacatctcctaatattatgagagtttgaaaatcttgggtgggccatggcccctgtaggcccctgtgcctccgcctctgattttgtcatccttccttggaggggtagctacagcctatgggtactgattgccttgggaggtttttaactcactgattgtaatgttaactagaattagggatttcatttagccatgtgttttctttttaatttattcaatttattatgtttggcctggctatgtatgtctgttgttgcttattcttttaagagactcttgttttagtgcatgcatacaataacatgaataactaataacatattctctctttctctctctctaattcaccgtcttcagtatggttttattgcttggctactcagcacttgtgttggattgttgctctcctttttaaggtaagccctactattcctgaaagttgttcatacttttaaattttgacctcatttcaattgaatgtgaataccttttttgtatcagcataactgcctatgcctttgtttgcattttattaattattcatcatataatttatgcagcaaatcatctgttctcctcggtatatccttgactgtgccactaatggtggcatgcctttctgttgccattcccatatggatttgtaatggttaccgattttgggttccccgcatgaattgtactggaagtgctggaaatgatcgaattcctcgaacaaaggaggttagttcttatgcctttcctacttactatcagggtgtctataatttgatgttttctgatgtctcttagctttatctcctgatatgtgatttctcgtagtcttagctttatctcccgatagatcactttgtttttcattctaggatatgacatattaattattttaattcatgaattcattgcatagggtgtgttatgcatttgttactttttgctctgtcaagttaaatttcttgtcaatgcataagcttgtcttgttcccttttacagggtattattcttcttatcagtatgtcagtatttgttgggtctgtactggctttgggagcaatagtttctgcgaagcctttagacgatttaagatacaagggatggaatggtgatccaaaaatcttgggttccccttacacatcatctgtttttcttggctgggcaatggcatctgcaattggtttagttgttacgagcgtgcttccaataatttcatggtttgcgacatatcggttttccctttcctctgctatatttattggactttttgcaggtattttctcattttgtatttacaaatacctacccccccccccaaaaaaaattgtttttgttgttgctgatatctaattatctatgtttctgaaactattgctgcagttattcttgtggcattttgtggggtgtcttatttagaagttatcaaaaccagggatgaccaagttccaacaaacggtgatttcttagctgctttacttcctttagtctgcattccagcagtgctgtcgctttgctgtggattgctcaagtggtaggtgacactttcttgtatttgtcgatttatctatggtaaattgacaaatgacagctattattttgctttttgatatatgtctgatcttttttaaaatgtctatttgcaggaaggatgatgattggaaactttctcgtggtgtatatatttttgttataattggtcttttgcttctgcttggtgctatttcagctttgatagttgttgtcaagccttggactgtaagtgtgttgaattcattgtctctttaactcccccttccccaaggtcaaaattctttggctgaacctcttccttcatattactgcagataggagtagcatttcttttggttcttctccttatggtattagcaattggtgccattcaccactgggcatcaaacaatttttatttgagccggacacagatggtctttgtttgcttccttgcttttctgttggctttggcagcatttcttgttggatggtttgaaggttctagtcaagtccattatattggcattgatatgcatatcttaagtagaaagtggctgatctgtaagtgctaacatgatcttttttgctctttttttctccaggtaaaccatttgttggagcatcagttggttatttttcatttctttttcttcttgctggacgggcattgacagtgagttactgattctaattttcaatcttataatatcagcatgttatcgtatcccaaatgcttttatgcttcaatcagttcatctttgttttgctcagagttttattcctttgtgatttttttcttctattccataggttctgctttcaaatcccattgttgtatattctcctcgagttttgccagtgtatgtatatgatgctcatgcagattgtggaaagaatgtcaggtttacccccactctaaattttgtttttaaatacgttggttaattttttgtttgattttacttgttatgtgatttattactttatgtatccactgcttgtattgttatttacagtgtggcctttctcatgctatatgggattgccctggcaaccgaaggctggggggttgttgcaagtttaaagatatatccaccctttgctggtgcagctgtatcagcaattaccctagttgtttcatttgggtttgctgtatctcgtccttgcctaactcttaaggtctgtgaagtcattgtgatcaacactgacttttaagctacttcaaaatttaaatgattggatttattatatacactgaaatgtctgatgaaactggcttattataatgtgctaacttctttcttcagaaaataccttctaattgaagttctaacctttgtaaaattgtacagatgatggaagatgctgtgcatttcctcggtaaggaaactgttattcaagcaattgctagatcagcaacaaaggtaagtagatttgccaacgagattgcaggaccctattgggccaatatctatattttattcttgtcctcctagcattgtttggactctggagtagtaggtagtaggcattctagccttctctacaactgctatgtatgtctgtctatgttggcaaaatttttcttcctttacagaaacaatgttcttgctaaaatttggtttactgctctgcagttaatacttctgcaaatgtagtgagaaatttttccactgattataaagtactctgtaaatgtggctgtatttattttataaagtactttattctcaatcatcctgagttttggaaatcttttatgcttttgaattaatttgtttttatcttttgcattatcattgagctcagtaattcatgctttttcttttttaacagatagtccatgttttatcggaatctttgccaaagtattctagtttagttttgaaaagtgcttcatagtgaattgattctatttgaggaaattgatatgttattctcatacattgaccatgtttcaagcatgttatttcctattaaattgttgctttttgaaataatttctcattggaatccaatctttattgtgaacaattgcctgaatgccttagtgtcagagacaatgtgccaaacgtttgacaaaaagttacaacagattaacggctaattttgtcacaccagacttgataacaagtagcaactctaggttctgaatttcaactgtttctataaatatgagaagtctattcagagtttgttcagtgaattgaattacataatatacagaaaaactttccaagcttctcttttttatgtcattttctaactcaaactgcatctctatctctgaaaatgtttacatttgaatcagaaaacttgttaatgaaataaaatttcatcaaccaatcagtctatgtttgtgtttcttgtgcatgcattgctttgaaaatagtttatgataatctctttcagtaccctgaattaatataactaaccttaaaccaatggaaatgtgttaattgcttgaataattctctttaatcttgatacttacataaatattttctaacgaatatgttctcctttatctgtttgttgattattgaatgttattgtcggaaaagaactcctgcatttgtcaatgcaattcaactgtgaattaatgatatatacttgcactgcagaccagaaatgcattatctggaacctactcagcaccacagaggtcggctagttctgctgcacttttgattggagaccctaccattatgcgtgatagggcaggaaattttgtgcttcccagagctgatgtgatgaaattgagagaccgcttgagaaatgaagaattagttgcaggttcattctttagtagattaagatatcataggacattccgccatgagccaaccagcgatgtagatcatagaagagtcatgtgtgctcatgctcgaattctggcactagaagaggccattgatactgagtgggtgtatatgtgggacaagtttggtggttatttgcttttgttgcttggtttgacatctaaggcagaacaagcacaggtaatggatatctagttttgcatatagtggatgatatcttgtttttatttttattcttgtgacaatgataatccatttctctggtaggatgaggttcgtctgagactctttcttgatagcattggattttctgatttaagtgctaagaaaataaagaagtggatgccagaagatcgcaggcaatttgaaatcattcaggagaggtactatcctgagtatctgatattaatatgtatagtatctttaccatgttttttctatctaaatattttgttgtgaattttctagttacataagagaaaaggagatggaagaggaagtcttcatgcagaggcgtgaagaggagggcagagggaaagaaaggaggaaggcgctacttgaaaaagaggaacggaaatggaaggagatagaagcttctctgctctcctccattcctaatgctagcagcagagaggctgctgccatggcagcggcagtacgtgcagttggaggcgattctgttctagatgattcctttgctcgagagagggtttcaagcattgcacgtaggattcgtgcttcacagttgtctcggcgtgcacttcaggttcattaactgtctttgatatttattctgaattctgatagcaattgataggatctttttcagttttttttttttttttttaacagtctgtttaatttgttggagggatttcaatgggaatagaaaaataattggatggaatgatttgtggaaacaattggcaggatcttttttcagtttttctaacagtctgtttaatttattggagggatttcaatgggaatagaaaaataattggatggaatgatcatcctctttatgtataatctgtgatgtagttaatagtggaatggtttccgttcccattttggttttcaagaattagcaggattgtggaggaaaagtattacaaaagtaaatgtttttttttaaattatgttatttgccatatttttttgtgaaataatgtaaaaaaatagtgctctgtagccttaaaaagtagtaaaatattttttgaaatattttaatttatgatttttatttaaaaaattaaatgttaaatctgatgttattttatttaaaatatcttttaaacaaaacaaatccatctgataaatataaaagcttataaatatagctttttaagtcaaatatatattgtttgaagtgtgtgtataaaaaacaagattacaagagtcttaattttataatatattattcatttgttcttcagatctatgtttctcagtagattaattttgttaattaaaccaaatttatttgataggtaccagcaagcaagaaagactaaaaggaagaaattaagtatgaaaatatttgtattgcagtaactggtctgaatcgagggaattcagatcctggaatattctgtattgtgtacaatggtacaaaaatgaaaagacacctagacagttctcaagagtgtctaatctctcccagcccaagcctacatctacacacctttccctggcttgtattttctctctctctccccctctcccccttacatgcacttccctcatgctctggtgccaggttggcagttagctctctcgctttctcttccccctctcctataacaaatttgatacattgcaccttttgcctctcttttcatacaccttcagtgatcttgggccttggcgctatattactattcctttccaaagtattcagtaaacttctgattcattgcatacttgttccattcccgccagctcatttcagctaactggattttctttatgataatcatctatttaaaatttctgcatgcgctcacctttattttgactgatggattactcactgaaaaaaggatgatggaaaattatttttaagaatttaactagaataatgcattgacactgtatatgttttttactgtctgattgttgtcagatcctaaattgtcatgtgtagtaaatttgttgatttttttaataattaccttaaaattcatatttaaggttatttttaattgaatgacagtatacaaatatttacactgacatgaagattatacccatttttttattggtatttatataacaatccattacgaaagtctaattttgtttatctccacttgtggtatcataatttaaataattaggatgactcttctggagattacttaatttacattgaaattttgatatctttgcagacaggagtggcaggtgccatatgtgttcttgatgatgagccaacagccagtggcagacattgtggtgcaattgattccagtctatgtcaaagtcaaaaagttagcttctccattgcattgatgattcaacctgaatctggtcctgtttgtcttttgggcactgagtttcagaagaagatttgctgggaaattcttgtggctggatctgaacaaggtattgaggctggacaagttgggcttagattgattactaaaggtgataggcaaacaacggttgcaaaggagtggagtattagtgcaacaagtattgcagacggaaggtttggtctttctctttattttatgtatcatatatttgttttttaaagttcaggttcagttacccagttctcttgttatatatgtttaccttttgttgcaggttatcttcacatgtgtgtcagtaatcttcttagtataataacattttgttattctaattttaatccaaatgcattttgggaattatatggtttcagtatttcttattaattgttttacaattctctccagatgaagtttcacaattttttcaataattaagaattcaaaagtcaaatttcaatctctgccagctttcttgagatgcaaaagatagctagttttacctttaaagactgttaggactgacttttactattttggcatggtaaacttgcaactgaacaaaatttatactgcatgagtctattttaaaatacaggagatttttatagagcaaaatacttatattatttgctcaattgcttgagtttgtcattatatatttggatggttctgtctaggccatgttatttcaatgcacaataaattgttgtagtttcttacgtttctgtgtgggtaatatattgcaggtggcatattgtaacaatgtcgattgatgctgatttaggtgaagcaacatgttatttggatggtggatttgatggctaccagaatggattaccattgtgtgtgggtagcagcatttgggagcaggggacagaagtgtgggttggtgttagaccaccaacagatattgatgcatttggtaggtcagatagtgaaggggttgaatctaagatgcatattatggatgcttttctttggggaagatgcttaactgatgatgaggtttcttctatttataactcaatggcttcggcagacttcagtgcacttgttttccctgaagataattggcagtgggctgattcaccttcgagggtatgctgcttcttccttcgctgcctctcccttcttgtagagaattgaaattttaaaaacaacatatataaattatagaaacaaaataaattgtcctcctaatactgctaaatgctccaacatgtagaaaatgttcttatcatgctttactaaacatcatcctgttgtctgctttattattaaaaaataaaaatagtataacaagtggtgttttagccatcatgtttactttgtctaatcttattaacacattttgtgtctaggttgatggttgggacagtgatcctgctgatgtagatttatatgacagagatgatgtagattgggatggacagtattctagtgggaggaaaagaaggtcagaacgtgatggcatggtggtggatattgattccttttcgaggaagtatagaaaacctagaatagaaacacaagaagagattaatcaacggatgttatctgtagaattagccatcaaagaagctctctatgctagaggagagagacgttttactgatcaggaatttcctcccaatgatcactcattgtttgtggaccctgcaaacccccctgcaaagttacaggtacttctctttattattatcttttagtttactgtatttacccccccttacaaattttatattgtttcatgtacaggttgtttctgagtggttgaggccaggtgagataggcagacagaaccatcttgactgtcgtccgtgcttattttcaggagctccaaatccttcagatgtttgtcaggtctcatgttttacacctcacttgcaagaattttgaaataaatgtttgttctcattatgttttgttagtatttagattttgcaatgtgttaatagttatgtatattgaacagggccgtttaggtgattgttggttcttgagtgctgttgctgttctggcagaggtttcacgtatatcagaggtaataatcactcctgattacaacgaggagggaatttacactgttcgcttttgtgttcaggtaataagcatatagagtcagattttagtttctttttattttctctttttcatgctgtgactggatagataacattttccaaataaatggcatctaagttcttttcatattttggttcatgatatctagggtgaatggatccctgttgttgttgatgattggattccttgtgaattaccgggtaaacctgcatttgctactagtaagaagggctatgaactttgggtctccatattggagaaggcatatgccaagttgcatggctcttatgaagcactagaaggtgggcttgttcaagatgctctggtggatcttacagggggtgctggggaggaaattgacatgaggagtggtgaagcccagattgaccttgcaagtggtagattgtggtctcaactgttgcgcttcaagcaagaaggttttctcctaggtgcaggaagtccgtcaggttcagatgtgcacatctcttctagtggcattgtgcaaggacatgcatactcaatactgcaggtaatgggataatgttttatatttttatattcacgatcattgttagatgtaaaaccagtaataatccttcacctaaataacttggtaagtttttaagagagttggtccttgacatggaaacaaagccttttatgttgagttagtcaggagtttatccttgttactttgttctatttttttaagttgaatttgagcatgaagtagagtggagttgtgtatgattcatgctttaagcccaaaaggttctcttatttgaggagtgtgtttggtatatagtcattcatggcaactcatgagccttcacccaacaactcaagccttatggagagttactctgacaatcctaatgatttttaatgatctctgctgtcatacaattttaggtaagagacgtggatggtcataaacttgttcagatccgaaatccatgggccaatgaagtggagtggaatggtccctggtctgactcatcgcctgagtggacagataggataaagcacaagctgaagcatgttccacaggtagttctttatgcttttctgttgtggattagtcatatgcttgacttcttagcatctctttatgattgagccgactatttgctcttacccaatgttattatcatttgctgacgtcaattaaccattttatttgttacttttttcaacagtcaaaagatggcatattctggatgtcctggcaagattttcagattcattttcgatcaatatatatttgccgtatttacccatcagagatgcgtcattctgttcatggtcaatggcgtggttacagtgctggggggtgtcaggattatgatacatggaatcaaaatccacagttcagactgactgcaactgggcaagatgcatcatttccaattcatgtattcattaccttaactcaggtactactgatatttccatacttagtactgcaatttctgaaaagaacctttcccttgaatttctttaaaacttcatttcatgatatttatagggtgtgggattttcaagaacaacagctggttttagaaattaccaatccagccatgattcacagatgttctacattggaatgaggatactcaaaactcgtggcagacgtgctgctttcaatatatacctacatgaatcagttggtgggacagactatgttaattctcgagaaatatcctgtgaaatggttttggaacctgagccaaagggatatactatagttcctactactatacaccccggtgaagaagcaccgtttgtactttctgttttcaccaaggcatcgataactctggaagctttgtagtgcctaggatagtttttacatgtatcttgtcctcttgataagtttctctgcctgggttctcggtggatcatgtacttgcactgccagaggccgtcttagaacaattgggtaattttctcttccccctctcccaacaattttcttttcatatatatgtcatctaacatttatggtttgtattttctcttcacagcattgagacactattcctggggaaacgacatggcatctgttcgagagatggatgaggtttagctgcacataaactcttggtctttgaatctgatgattcatcatcttgaacaatgcttctgccagcattgaagagggctctcgggtgtttattgtgtacataaaaaagtggtactataggggtatacttgtaaccatgtaagcaaagttgaaaaagaaatagctgcaaataagtaggaaattactaacacctggttcaaatggaggtaaggacagtgtggggaggtatagtaacaagcattgagtgactgattgtaaattcagttgccgttttgacaattgcaaaaaattgtacaaacattaacaattatcagttcctatcatttattggcatttgggaaaattttgtacaaatgtctttctaatctaatttgatttcaaaataaaggagcattcactagttgtagttttttcttggttgaaatacaaaatgatgaaactatgaaacggcgagaaatgttcctatcttacagtatttagtcttgcagtccttatatgtctatagagttccaatcgtttatataacttgaaaggtcaaaaagcgtttcagagttttttatactttctaaatgttaatttctatagactccaattttaaaattacaaatttctaatagtaactgtagatactagctattttttatatcagcaaggtgttgtcaatttagcataatttttttaaaatgtagggagcaaactaaataaaagatttgtaaagctaaacaaaaatttgacgaaatcatgtctgtggagggaacgataagggcaatgtcaacataacctcgttttgtctgctatgacacgtttctctaagcttttctcttcgaatataaataaaataatgtaattttttttaaaaaaggttgagaatagaaaataattgttatactaggcaattgtatgggcatgcagaggaaaagtacaaaaaggggaaagaaattcgaaaatgaagatttaattaaaagaaaaattctaataacattttttaatatatacttttaaacattttttattattaattgaaatctatatatccattaaataatgtgagttttatttgtcgtacttttaataaatttgagttaataataaagaatgtattgcaaaagatattatataaaatgattgttttcgttaaataaaatatatacatagcctaaaagtgaatgaaaaaatagatatttacatagccaaacctttacgataccaagagagagatataaggtgcaaaacagagatagtgttgaggtgaaaccgtgaaaatttgacatgtagtattaaatttacgcgtgtatacacttgtgtattgataagaacccctcttattttggaaaaacaaaaaaaaaaaaaaaaaaaaacaaaaattggaaaaaaaaaaaaaaaacgatgagatttggatgtacgatgttggcggattgcagaagacacgcgagtttccattttattttgataggcaactatttagtggctcaacaaattttgcgggaaagtgagaggttttatcaagtcaaaactaatgtgcttcacgttcataatatcgtttgattgttatttacttcttgtaatataggaatctgatgagttaatgatgaaatggtttgtgttattggtgtgcagagttgtgagtatatgtgtgctgtgttgccttatccatagtgtcactgtaagagggaaaataataaatcttgaaaaaaatatgaaaagagatataaagaaataatgtaatactacatgatttgatgaaaagaaataaaaagggtatatataatatgttagcatttcttatgtttataataagaatttaacggatacgtatttttaatataaaatgtttactgttagttaattaaaaatcatattttgtatgatttttaaaataattattataaaattaacaaactttattatacataatataacttgtgagtttgaaattgaataaggtcttatatatttttcttataataaatcaaatctaatgaattttggattatagacttgtatacgaaacaagtagggttgtgttacatgacaatgttccctccgagtgatttgagagaagaaaataacaattaacaagtgatcctgcaaataatttcaacaagttaagatattttattatcacctctattgccaattctccttgatagcttatgtgagtgtaggaacgaaagatggaagaaagagtgagtggatgtaaccatgtcttaatggttccatacccaagtcagggtcacataaacccaatgctccaattcagcaagcgcttgagcaccaaaggagtgagagttactttggtcacaaccattttcatttccaagtccatgcatcttgaatcttcttccttacgaggcagtgttcaatttgatttcatatcagatgattatgatcaaggtggttttaatcaagctggtaatgtaccaaactatctttctcgcattcaagaagtaggttccaataacttgagggaactcatcaaaaaacacaactcttcagatcaccctatggtgatatgggtattggatgtagccaaataatttgggttattcggagctgcttatttcactcaaatgttgcagtcaattacatatattataatgtttaccatggacttcttaaggtccccatttcatcaccaccaatctctattccagggcttcctttgcttgatctaaaagacaaaaccagcctttgtttatgatcctagattctatcctgcttactttgacttggttattaatcaattttctaacatccacaaagcagatatcattcttgtcaattccttctacaaggtagaggagcaggtatatttcttgtaaacttgcacagtatttcaattcctttccaagaatatgtttaatttactattcatttgatatcaattcttatgtcaatggtttcaaaaaaaaaaaaaaaaaataattatgtctatgattgcgtaccaacatgtttaaaatttatcatgagccatgtattggggtattgcagagctagtcaaaacaataatttcatccctattcatgaaaatgactaaactattggtggtatgcatgttaattgaagcggttgaatagtaacagtaatgattaggaaaggtaaccagaagggagtagtagagcaagataagatcttatatcttatgggttacaagttcgagtttccacttgcctttctgtttttttgagccattagttggctcaaacaaaagcctgcagggtcagttattttcatatcatttggcagcatggtgtgcttcagctcacagaagatggaagaaatgcattgggcctaatggcaactaccttcaacttggtcatcctgattagagaaagaatcttccaaaagcgttgggagaggaaattaatgcgcgtggaaggggtttgatagttaactggtgcccacaattggaagtgctatcaaaccatgctgttggttgctttttcacacactgtggatggaattcaacacttgaagcattgtgcttagggtgcgaatggttgcactgccacagtgaactgaccagcccacaaatgcaaaattgttgaggatgtatggaagggattcagagtcaaagaatataatggattgtaatagagaagaggttgagaattgcatcagggtagtaatggaaaaggacttaggaagagaaatgagaattaatgctaagaaatggaaggaattggctatagaagagtgagtgagggtggcacctcagacaacaaaatcaatgaatttataaataatctgaaaagatcctaaactaaatatccatattggtttcaattaatatttattatggttttccctaaaaaaagtattgaattgtatgagaatttatttccttctgtctgtttagttgatattatatgtttatttgattgtatgttaaattattatatatacaagcaatcacagactaaactattggtatatctttcattgattctgtattctaaatttgaactagatgtaaatatgagactgagttatacacgagagaaacgtagtaacacgtttttttttttttaatcaacaacgtaataacacgttcttttaaaattctgctaaaactacatggctctcacttgataacaacattatgtaattgcaccagatagcaattcagtgcaatacatatcgagtaattagtcatctgtctatgaatgaagagtataaaagagttttataaagacatctaataacaaattgttatagatggtaattccttttacaataattactttaaaatttatatttattgtaatttttatttgttgatgatatgattttttttcctacattaacacattgatttgcccaattattaaatcatatttgaatgatcaataaaaaataaaatacacatgacttttttaaatagcatgtgatcactaattaactaataatcttatagctcttctttcttgcaataaaatatatatcaaaaacttgctaatggatgtgctagtgaaataatcttttaaagaaaacaagattccgattgtcaaatcaccacgattcaaagtcatttaataaaaaaggtttatttcctaaattttcaacatatttttagtccctgaattaatatttttttttttttacttttagtccctcaaagaaattaaagtaaggataaaaaatgaaggttaagagggacattgatcagtaaaaaaaacgttcaggactagaaacaaaaatctttaaaatttaggaactaaaaagataatgaacccattaaaaaattataacacacaattcaagcgtgttaaacaaatttaattaagtagtgagaaagaaaattatatttgcaaaggaatcaacagtgcatgcataaatgatattcatcatatgtctcaagacaaaataaccacactcacggatgtgctaacttgtttaatgtaataattttttttgcagataatacaattttgattgaagaatccagtgaagcaattaaccttaaacttgaactttggacactcacggatgtgctaacttgtttaaagtaatcttggatgtacttaccaaaaatgtataaaaattatccctaatttttttttttgcagataatataattttgattgaagaatcaagtgaagcaattaaccttaaacttgaactttggagattggatttggatagagtttaagaataagtaggaacaagacaaaagacaaagtatatatatatatatatatatatatatatataatatatatatatatatatatatatataacacacttagctagaggcaaaggtttccaagtttaaatatctaacactattaatacaaaatgacaaaaaatgaatgaagatgtcatatacggaatacaagcaaaatggctacatgaaggcatcgacagttatccgtgatcacatttttttgtgtgaatattatctgtgatcacatgttacctaccaaagtcgggcaagttttactatatgtcctagtgacctactatatgatattaaatgttgaaattttgaggaaagaaagattcacagaaatgataatgttaagatgaaatatgtaatcacacaagaaagaacatgacataaaataatagtatacaagaagatattaatgtatcaccaattgagagaaaaaaaatgacaaacaattatgatgattttgacacaataaaaagaaccagtgaagaaaataaattatatggtttttaggcgtgtagaaagggagacaaaggacattaagaaaagttgttaagatacatctcagtaaatatcaaatgaaaagttttgattttctacatactaaaggattagttttcatttaataataatttttttatttcttaacgtgtatttaagctattagttaacaaattattaaatggtattgtgtttcacttatatttcaattttagtacagtaatgcaccccaatagccaataaggcctaagtgtcgtatcatgtataaattaaagtatatttgtgtgctcagctgtcaaaaatttacagagcttgctcacacttcattttcgtctgtctgactgctacaattgaactatttgttaatacgaatacaaaaatcaatgactggaaaattcgaatggcctagagtacatttgcgcaacatattttgtggcatggaactcaaataggatgtctctggaagtcaaatgatgggatcataccctctacctgctctcatcttcaggtgcattaccatctttcctccaactgcccaacttaacaatgtcctcaactagaattttcccatctatagcaacaaaatgatatccgtaaattattgttttcatgaactaatcttcataaagaatagataagtttgataaatagtcactggatatattattcagataaacattacaagtattcaacatcagtccttgatgaaactctttagaagttgataacttcgtagggtaaacattaatttggagaccaatttttttaggcgcatactttgaaaagtaaatagtaacactatatttaaaaagaagcggcaaaatactggtttagtaacatctcaaaaccagtcattttaaaagtaatttttaaataattttgataacccactgaataatactttaatggcataaccatcccgccaatattcatagatgaatacttttggttgatctgtctgtgatactgttcagttacctattgctctacacgtgaatttccatgaaaatttcactggaatttattttatgtgaataaagaacaaaactatttctgaatgcactacattgcaaacaaaatcaagaattaataagattaaaaaaaaattagcatcatgtgcgagagaaatgacagacctctatctttggaaagactgctgacaagttcttggataccctccttgcccaatgtatcctttaagtacattgcagcagaggctacctcctcaggagttactttcccatcataatctctgcaaaaaggcccaaaaatatctctgaaatcttatgcacagaagtcattacatatatagattgtcctaatgaagtaaggcatgtataagtggcaaacaagaagaaattgtgcacaagactaatcaaatttatcgtgaaataataatcacattgacatcccaaacaatattcaacttttagaacaaatgtggaaatgtattcttcccatttagagttgattgataagcttgcaacttggaaaatgagttcagacttatacctctgtcattcaaatgccagcaacttataatcaatattattattaacagaatgaaatatattcacatctttctcttgtggtagtggaacttaaattgtaaacaacacaaatcctttgtagattatgaagcacaacaaagtagtgcccttggtgaaatttataattgttaaaagccttaagggaaattgaaaacagcctcacttggcggttatatatgaacaaagaagcaggagaaagttaagcatggtatctttggtggtaagtcattgacttctatctatgcttattttactgactatatatgcaataacatttattcttactataatatcaggttcagaccccagaaaggtcccttctcatacaattacaatatcttgattaattgaacagtaatcacagtctgtggcttaatctacccgtcactctccttgggtaagaattcaattacaaaagagaacattttatgacatcaaatcatttatagaaaatacgaagtaagaatcccaaccaataaccaaatgtgagcaatagcaactacagaaatgccaacacacgccgacaccttttgagttttgaacatatttttttattattggttgaaatttattccaacaacaaaatttgtgggtctcacttttatttaatgagcactactcatgattttatagttttcaataaattttaaccaataatagagtgtgttgaaaggagcgtaagtcaaatgattcctattcagcaaacttgaagcagtatgatatattcaagcatgcagtggcaatcacagattcacagtttaactttcactaaactaaatttatgcaaatgcattatgaaaccacatacttcactttaatgagatctgataaggttagacaaagcatgaccaatgaaaattgaaatgtcaaagagccttagctcaaaagcaccatgtccctttagggactgcttgatcatacaatccatctcagcccggccactttgcctaaactttatcgtacctccccccgcccaaataacaatgttgaagagctagtgcaaacctgtccagcagcctccaacggtcaccaattttcgcatcaacgtcatctatttccttctcaagattttgaagcatagcatcaacctgacagattttcaaataattacaaattcagaagtgcaaaattagtttctaggttttccctaaactagataaaatgaaatgggtcttactctcccaatgagtgctgatgacaccttatccccttcacctgactcagtagcgtgttcatgttcctctcgggcagctttatatgccttaaaggcatcttttttaccatttgaaccctcttcctctaccatgctgttatagagttctatctggacacatacaaaacagcaatgataagaatggcaaatggattaaatatatgtgcacaatcacacagagggtggggatcaatttaagtgtaacaattgtcatacaaagacaaatgcaacttatagggcaaggggcatgtaccccacacttagaattcatcctcactatcactacttgttaaaaatgctacatgttaacaatgtcacagatgaattgtttgtttgattacattaatagagagaaacatttgaaagtggtagcaataataatattattattaataataatatcaagcatatgaaattgtgtattaaacaattgtagacttatctttaattaggttatattattgtatttttctctataaataaatatttaaaaaaatatttcatgtgttcattataatctttgaccatgccccagctaccaaaactgcctaggtttgccagaacaacaaaataggatttgatacattacagttagttacaacacacaacaacttcctacaagaaaacaatgactacttgaaatatcaccaatggttccgtatatctttcaagccaatcatttgaaaattgaaacaaaaataaatctgtaataaaaaggttaatgtttcacttatttgcaaagcatattaaagataaattctaatatttttcaatgaagtctaaaatgctcttaggcaaatataaaattttatgagaatatgagcatgatacagactttcaatccaaaataagacttttctgaaaattcatcttatagaaagtaattcattatagacacacactactctttctttctgtctttgttgatggatgttagcactccatctttttttttggaccaaaacaaattcctccgttttctttttcaaacaacttaatcttattggtatttggtcttctaataatttatatatatatatatatataaaaacaatctttctctttctttccccctctcttttgtatctctgaacctctttcccttaccttttccctctcccacacctctctctgaaaacctgacccccctccctttcagctttttaacctgtctatcctctgatgatgaaattggatgaatctggtgcagaggagaacaagggaaaaaataataacgtatattgtagacatggtgattctcacagcagaagagagacattaacccgagaaaaaaaaggataactaatgaattttaaatttaaaaacaccaccttaataaaatgtgttaaagacctctacgtgtttgtattgattaaaactcaaagacatattgttagcacacttgcatgcacaacaaatatttaatgcaatctatagaagatgtaaaagcaaatgatgaattttgaaagttcacacatacctctttgttaaccagtctaagaaaatcttcacgctctgaacttacagactgccaccagagtaaaagacaaaaccacacattaaacagcttaatgttaaatagtatagattatgcaaaataaaagaagcaattcaccaaattaaaggaattgaatgttttagatatcaaattctcaccgatgcagaagctaaaacagctaatgcacgactaagttcacacagttgttctttgttttcaaatgctctgtctctagcaagttggtgagcctcttttgtgttgaaatattcatctctttcagggccttatcatcttgactagaactactctccatccttgcttgcaccacctcctctctctcttcctcctcctgcatttatttataatactatgttatgcattgtgttttttgataacatggaatcttagatcaatagaaagctacttaattttcatcaatagttatttaaaatcagaaaatgaactttatggtgaactctagcatatcaacacccaatacttcatttgttaaacttactgatcagactcccaatgaattctgtcaaacaaaatattgaaatgattctttttatgtcactgatcatttagtattttttagtagattcttctcatatgaaccagagcaaatatcaaacactatcaaacagaaaaccttgtcaatgtcatcctaatacaacaaagataccttttaacgggataactatctagagcaatgcaattccatagtttaccttaataagttcttcttgcatttcaaggaactccaatttcctcctcctctctgagacagaatcctcagagggcaaagatgtaacctgtatagtatctacaacctcatcagggagagaagaaagtgtagcctgtacagcttcttctggtttcaatctcccagacacagtaaatgacctataaaggatatcaagtgagatttcaaaatgcatatccagcgcattttttctttaacttactatttggccccatcaagggactgagggaggaagccatgctaaaattaccttgaaagtatcaaaagagatgatggaacagagtgattcagagataagtccaaccaatctcgaagctgcacaggcaggttcacaaattttagaatagaaacaccaaagcaacatttgatattcaagaaaactgaggttttaatatcctcatcaagatccagtactcaaatagaatacaaatcatgaattgtttccaacacaaaacctgttggcgcatttcttcaacagaaagcaacccaagcatgcctcgctctctacaatcttcccgaagttcatcttctgaaagagaatccacaccttctgcttgaatcaatttatcatcttccttaatcctaaaaaagggggacatgttgcaagtaacacaattacgaggttcatcaagttatatggtaaattgaagtaaataatctgaaaaggtgaaaaagaaaactattttgtgaagtttttgtcaccaatgaggctaattatagtcataacagaaaatgaatgcagtagcatataatagcagtttgaagcaatatattaatgagagattaataaggaacaaggcctacatttcaaacctaaatttgtaccaaatcttttaggcctacatttttgtctccaattttttctttttttaaataaaattcctctctaaatgatccaaccttaaataaatggaaagaaagtattcttgtaataatttaatcatgcatgatgataccaattttcaaaagttaacatagcattaaactccaacccaaacttaggaccaattccaatccaatttgggcaccaaagttgcatcaatggatttatcgggaatttgatatttgattgagcccaatgacattatttgtttcatgaagtcaaacctatctatcaagatgaggctttggttgttgttgtagccacaagatataggagtactctggttgtgttcaatcttttgatatttatatttgaataatacaattcacagagattatttgttctcttattttgtaccctaatgacatagtatggggaggtaatattttctaataacaaggtatctttttttaattagagattttttttttcattttcctaattgtattacaaacagtttagataaaaccccaacttgcaattaaaattagtaaagaaaaaagttacaaaaacatgcattataaaatgcatcctacctccgtaaatgttttcttagcatataacgcaagtatgcatcagtgccaaaagggctgattcccatgtacttgcacatattgactaatcgtggcctacgagcagtaaagacaaaatataagtcataataccacctcacaactgagaaaaacgcatattgaagtcaaacaggattaagaaacaaacctgcttatattatctagagtaagttcatcattaaacaacttagcaaagcccaaaatttcctcattagagacagttgcacctcttctaatctgcagaaagtaaataaagcataaaaatgacaaactaaggaaaacattcagaaagaaagattgataaacaattctttgaactgaagttttaaccgtgtttaaaaattcatcaagatcttcagctgttttctttagttctccactgcgggagttctgaacttcttttgccatttctttgactgtatcctgaaggaaccttgcatactctattcttgccttgagtctccttttcaatgcttcctacacattgagcaactgagtcacccaaagaccctacaatgggcaatcaaatcacaaattcatggtaactgaaaagataaaaaataatgcacactacaaatacagagacacaaaaatggtttctaatgaggatatttgttaccagtggctgctagagaacatagaacatatattggtgcaagctcatatacaattttcaaccaaagatgctgattattagggtattttggaagtttggttttagaagagaagggaaggaagaacaaatttttatttcaaaaaaatttctctaattcaataaaaaaattaaaataaaagaaataaaatgatagatcagcatcaattaatatgttaatcttttataaacattatacagctctcttaatttaaaaataaaatatttgtcctcccctcccttcccctccaaaacctaattcccaaacatatcctggtaaaaaatggacattatgttgatgttaatccttgggagctatactttacataggaccttcaacaaaggctaggacaagccttgcagttgcttagttatagaatttctatttcccctggtattattagaatgaagaatccggctttttaaagtgagtgatttcagttgttgataagaaaattaacggttacgtgcacatgcataataaatcaaggatgtgttgaaatatacaccattgattttctcatcaacaattaaaaatacttaatttatccttactcacttttgagaagccaaatcctagatggaatgggacaaagaattcaaacagtttatgtacagtttattttaaactagcaaagataacagcaaacagccaaaaaaattcttggcaattacctgttctttcatcttgtcttgaaatgttgacggcaacatgttagggaataactttagaaacacaggcaggaggaactccataaagggaacaataatgaaaacagcaaaaggaactagcctaaagatatcggcagtagtccgcgtcagttgctgcctttcccttctggagagactcttcccacccgcaagcttcaacaacaacctggaactgatcctcacatcagcccacagcagcttagaacccaaccaataatgctgcaacgtcgacacaaattcccctttccagtgaaccagtttttttgcccagtcctccctgcagcagcagcagcagcaacaattagcaaaccaaaacaccaaataaccaaccattaacgaataaacatttcactgcttcaaatttctatctaataaattcaaaagcccgagctgcgatttctatactctaaacacaactataacctcaatttaaaatcaaatgcactctcaaccgtaaatgcaacaattagcaaacctaaacgccaaatcaccaacgaacaaacatttcactgtttcaaatttcaatctgaaacagcaaatagcaattgcagccacaacactacaatttcaaaagcctcaccgtaattgctataatccaaacacaaccgtaacttcaatctaaaatctaaaatcacatacaaatatcaacagtaaatgcaatttcgcgtaatttatgaaaccgtaactgcggacctactcatagacgcgacagctctcaacgcaggaccgattcccaaaaacgcagtccacactctccgcaacacgctttgtaggtctttctgcgcctcttcttgcgcccgtttcgccatggctttggccttcgcagtggtcaagccttcgacggcttgatcgcactcctccggtgacgcttctttccgcttctgcgccaccgtctcatcgttctcatccggttcatgacgtttcgccgccgaggccgacgactgcgacaaccaccgcacacctatcggcgcgttcagtgtcgaaaaagcgtcacacggaaccgcgctcccgaatcctcgaacaacttgcaccaatccgaaacgattgaacaagtcgtctctgtacggcgtcgttccgtgcttacaaggaaacagaggtgacgtcgtagctatagcgcgttccagagagcgattactcggagacggagaagaagcaaaacagttattcaagtattgatggattaaacttctccttctcaaaattgctcgtgatgccattctcgaaggaactaaccttggaaaagtcacagtaagagatgagaaaaaaagaatgaagaatttgtggtactacacgtacgaattgcttagatcttatttttggttctattgttagtgagaattcggttagaggttgaagatgagatggtgattgaacttacttatgcggagcgtagaaaacggaggaggagaatacgaagaaggaatgaagaaacaaagtgtggtgagagttagggtgttaggaaagtagagcggagaggtttaaggagtttttgttgtgcagcgtggggaggggtcatcgggttttcttacactttgtccttcctacttacgtcttattcattttataccctttcaattcgtgctgcttgactcgttatttaggttggtgggtaaggcaaattattttgttggtttaaagtattttataaggcaattgcttcttgcatcccatgtttgcttcttgcatccataagaaacttaaaacatgcaaaaacatactaaaatatgcttctcctttgtctaaccctaacacacctctcccttttcccctaattgcacatcacttcctttccttgacatcaatgttgtttaaggtagatccgttgcagtggttgatggaaagggtttatcttggacggcggtggcaatgacctcttgcacgaagaggcatgtgagacaggtatcgtgggagtagtggaggtcaacgtactcgttagtgatggagagtggagtaggagatgttggcactggtctagtcgatgtagagggtgacggcgtatcaccagttggagacaaatcgggagggtgcgacatggtggttggaggctagataaagtgttgtagttagggccaacaattgcagctaagcaactaacgaaaactccacttgaactccactttgaatagtcataaatttgccaatcgaaatagggtcttcaaagaatacacaagtattgtggactctatcttgaatgtgtacacggttgaatgacaccaaacaccatagtgttcccttttgtgtttttgtttggagaacataatttggaatagtttttggtgtccaaattatgtaatttgaaagaatatgggtaacctgaaaaacttatacttttatggaatacctattttggaatatgattttcattttagaaggaccattatgtaataagtgaagggtgatttgaggatttaaaaacctttaggggtggaggaagcaaaaaatcggtgcaggaagcaatggcgtctttagaattgatatattgttttaatctggcccaaatatatgaaactcttaaatccatttgattcattttactatccccaccttaatgttttgcatgtttgaggttgagaagttgctattggcttcaaccccatttgttattggcctctacaaacgtgagaaaataccttcttatccctctatcttcctcttcacttcttctcaccccacccaacccatcacaaccacaccaacgctgcgcgccaccaccttcgcctagatccaaaatcgcagcacatcaccacagtcttttcgaccacctcaccacgtgaccacctcaccaactagatctgaacgcaccactaccatcgtcgcacatcgctcccaactttagatttgcatgcacgacctctcaccagcccagccaccgtcgcgcgtcctcaccattgtgtccaaacaccattgcatcgccgcaactccttcccttggtttgtgcgcccccaccaactccagatcacatgaaaacatgcttctgttaaggaggaaaaaatatatatacacaacaaaaatgtgatttcgttttacactatacaatagaatcatatttccgttgtatatatttttcacccctacttaatccaatgaaattgtgttttttggcacccccattacataatgaaaagtcgaaaacccaatttcgttgtacaaatagaatcatgtttccacgaaaagggcatttttggaagaaaaaaggtgtcagtcccttagtaggggccattagcaatggcagcagggccaatagcaaccaccctaaggttgaagtgtctcatgtaaattgaaattgtaacatgaatagttttgagaatgtggacttcttgttcattaaaaaaaaaaaaaaaaaaaaaaaaaacagaatgtggacttcttagtgaacttgccccatgtaatatgggaagagaaattcaaagaagacacaagtgattctaatcctgtaaaattatctagatgcaatcctgcaggagttgaggaaggcaatcaaggcatagtgtaatgcttttcctttgggtaaagcctccacagtaaagatgattaatcatgattgcatggtacattgtaagggttcctgtcctgtcaatacgaactacaaagtatatccctgcaacattaaaaaatgtaaatacatagaaaaagtatttgctagaaagattcatatttcgaacagaacaagcctcttaatcttatattccttgcagtattttctggacctgatgttttcattcatggataatgatgttgtattgctgttgcatcctttctttcttttaacttgtgtgcatttttgtgttcttttgggtatttaggggtgggttcaattattgatatactgaagtcccgtgtatacatagcacaattgattaaaactcagaaatcaaaaaataatttagaccaagcatcatgacaacgaagagagaagaattaattattaatttatctgttactgcaagttcatatttatttattgtgtttctaatatatataactcctatatttaagccttggtaattgaagattttcacattctgattttccccaccttaatctgcaaaaattaaaatgcatgctagtctaactcttcaatcattaattgtctgttccaattctcttttccccatgctatgattttgatggtagggacaggggaaaggtgtagctaatgatgggtcagaatggaaacttgaattcaaattttaagataacatggttgagttggttcaaatgtgtgcagctacacatgaatttagtgtccaagtcttcaatcagttgatcttaatgtgaatttatacttatattgatgataccatctcacgtatagatgtctttgccatagcaagtgccccttttgcaaggcatgtactgggggaagcatctgaggattgagggcagatgcaacctgagatggcaaaacgaacgctttagctcaaattgagagatgtaaggtaatttacacaaacatcatggtaacaattgttagcatgacagaaattacaaaattgagagatacaactaatcatttctaagcaaaattcttcattcaatttgacaatcttaaagataaaagatataggaaattacaaaattctggcattggtaaataatgagtttagacacagatttgtatcctcgtgacttaagtacagcaatattagtatattactgtgatcgggtttcttaatgcaaagacaagatacaaattactcaacatatcaccataacaagatagcctggttatggatgtatataaggtccagcgaaaattatctttttcaaagaagagaaataaacttactattttttaacttacagattaataatgttcactgaacctttatcatccaaacagaattgagaaccacctccttactgtcaatcatccatcctgaatcaaaccataaaatttccaacttactgaaaacgtcagccaatctttagcttactgtcatcaacttatcatcaaagtgacaactattaatcagattatcaatactcttccttcaattttttaataagaaagatatattttcatttttcttcaaaaagaaaaacttggccataattaagtgaaagactgatcaccatgcatgcaacacgttgttaatgagagaaaggaacactgaaactttatttaaaagataaagttacacttcaccgttgaaactttattgtttcacgctgttgaaatataaatgtgggttgaaatccacattggttagaaatgaaaaaaattaaataatatataaatgaagaaaaaatttatgtactttaactttaaagttttaggttaaagtaggatgtgagtgaaatttatttatttgagactctaatgtaaatctccccatgtttcgaaagtcttgtgagcccaagtttttgtgtgaatctatcaatcttatcatcaaagtaacaactagtaagcaaattaccaatggccctccttcaattattttaacgagatatatcttttcctattcttaaaaaaaattctcaattattaaaaaactacattcaattttatatcattttccaaagtaacaaaatgtaaaaatgataacattttacattgataatcaatataatcatgtaaaaatatatatttacaagtttattttaataaatgcataattattaaactctaatttttattcaatgtttacaaactttaattcaaaccaaacatacatttagtgagctgcattttttaatattattgctttttgttttttttcttgctatctgtctttttttcaaccttacatacactccagttgatattttttcctaatataaggtgccgaatgtacttgaagccaatgcgcataacacattattccaaactgataaactatcatcccatatatatatatagaagaagcatcgatcttgcagtctaaagtatttgaagatggtgtgttataagcaggcagaatctcataccttgcttgttttcacatactcgtggttgtggtgggctacttgtcttgctgctgcaaataacagtttaaagccggagatacactgaatacaacaagccggctatgttcagaaaagaataaatactgcatgggtttttccccattaataaatccaaattctccagtctacacttctcacttgagaatcactgacaccgtaaacggtgatgatggcaacacagtgtgggttgcaaatagaaatcaaggtgttgaaaaggattctgcagttcttatgctgaaccactccggtgtactcaaaatagaatccaaagatgcaaaacccatcatcctttactcttcacctcagccactgaacaacaccgaagccacgctgttggacacaggcaacttcgtgctgcaacaacttcacccaaatggaacaaacactgtgttgtggcaaagttttgattaccctactgatgttttactccctgggatgaagttaggggtcaatcacaaaactggtcataactggtcacttgtttcgtggttggctgaaaacgacttaagactcgggcattcagtctcgagtgggaacccataagaagagaattgatcatcaaggaacgaggaacattgtgctggaccagtggagaactgagaaacaacaatggattcatgcacaaaacaaactacttggttgtctcaaacgacgatgaaagctacttcacaattacaacttcgaatgaagagcatacgttttggacgctattagaaactgggcagatgataacttcgaatggagaagaggctgcaagggctgatctgtgttatggttacaacacagatggagggtgccaaaagtgggaggagatacccacatgcaggaatcctggtgacactttcgaagtcaaggaactttacttcaattttaaacacataagcaatctagctaatcggagttatggtcccagtgattgccgggctatttgctggaaaaattgcacttgtgatggatacacaaattattatgaagatgcaggaactggttgttcgttcttgcatttgaattcaacggaaggtgatacttttgcaattgggggcgagaagtttttgatattggtaaagaacacccatcacaaaggtaagtccatatgatttcatgacttcctacttcacattttttatactctttccgtttttaattataattatttttttataaattttttttttataaaattatttttaatttttagatgtattaattatttttctcctatatatttttaattattcttttttcaaattcaaaatatatttcacttgtaaatttaatatgattaattaaattaattattttttaagaagcataaattaatttaaaattcttataattagaacggagacattaatttttttaagaagaaaaatgtgtattttaattcttatgttttcatttaaatttgattttggttcctatattttcaaactaatgaatctaatcctctaattctttaaaatatgtgagcttaatctttttcgtgtttaacttaacatttagtaaggggttttaccgccataaagttagaaacaaaattaatttaactcctcctataatatcgcaagaaggttattgatgtttagaattatgcttttgtgaacacatattagtctgcaaagagagaaagaaaattagaagaacgaaaagtgataattgatgtgacatgtgataatgtgatagaaaaaagagctgaaaaaagattagttgttaaataaatatttatactgagtattcatgcatgtatcattgttgtaatattttactttaagtcacatctgtggtaaacgttatagatctggaatcacacttacatgtcttcttacatgtaaacactatgcaggtaaaaaaaagtggatatggataactattgtaacagtagctgctctattatttgtgatatgtgctaatttcattctatttttcgccttgaagagaagaaaaaatctgcttgaaggttagctatatctttccagtaaacgttgttccaatattttatatattgagcataatccttcattcactatttctatttctatatatcattcaaaattttatgtaaattaatagagaagaaaagaaatagaatgaagatgaagacgctagattcagccgttaaagatcttgaagatgagttcaagaagagacaagatctaaaagtatttaactttaccttaattttgtcggcaaccaacaatttttcaccagaaaacaagctaggacaaggaggatttggacccgtttataaggtgacgtgaaactattgactttgtgttgtaagctgtaacaagttatgacaaggaggatttggaccagtttataaggactaataattttttgttgtttagggaatcctaccaacagggcgagaagctgccataaaaagactttcaaaaacatctggacaaggaattgtggaattcaaaaatgaactaacgctcatatgtgaacttcaacacatgaatcttgtacaactacttggatgttgcattcatgaagaagagaggattctagtttatgagtatatgccaaacaaaagcttggatctctatctattcggtatgaaatatgttggagtttatttaattataggtgatgctttaatttggaagacaaattaagatgatatttttttaatcatcaagcaataattccaatgccatcgtgtagagaaacattaagttttcaacggaaattttcattaatgagaaatattagtaacacattttctaatatattttttaaaacacatatttattcatcgattgaaatttattgaaaatcataaaatttggtaatttaatataataactttttctcttaatttcatattttttaataaattttaactaagtaaaaaggatgtgttaaaagagtatgttcttctttcatgttatgggcgattcattgacttatgctttcctttcttgaacatataactgtgtaaatgtcatgctttgtttaacttttttccatcttgaacataattaattaactataactaaactataccaatgataaatattgctaacatattccaattaaaaataagtttgtataatctaacaaatgtttccgagatttagtaacgtacacatttatttttttagttggagtatgttaacaagttataattagatattatcttaaatacatcaattaaatatgtaattgttaacatatatacaataagtatgtatacattaaattctataatatatactcacaaagattgctttatttttaacacttgctttatttccattgagaagatagcactaaaagcaagtttttagactggaagaagcgtttcaacataatagaaggaatttctcaaggattactctatcttcataaatactcgagactcaaagtcattcatagagacttaaaagctagtaacatacttcttgatgagaatatgaatccaaaaatttctgattttggattggcaagaatgtttgcagatcatgattccgcaagtacgagtaggataattggaacatagtaagcttgcaaaactctatcatcggtttcaagtgtagttgaagaaacataaataggtttgttttgccaagttataattaaactctttttttcagtggttacatgtctcctgaatatgccatggaaggaattttttctataaagtctgatgtctatagctttggagtgttggtccttgaaattatcagtggaagaagaaatactagcttccatgaggatcaccctataaatttggtaggacatgtaagtgaaattagtctcaacgacttcttttaatttgattttttaatactattttctttatctaatttgactaaaatgctaataggcgtgggagttatggaatcaaagtgtttctttacaattaatcgatccatcacttaatgatgattgtttgatcctgatgaagtgaaaagatgcattcaaattggtctcttatgcgtagaacaagacgcaggtgatcgacccacatgtctcataactttcaatgctaacaaatgacagtgcagtaattgccatgcctcaaagaccagcattctatgtggaaagaaattgttttgacagtaaaacatcttccaagagttatatacagcttctacttaaaaattactacttccttgtaaatatataagtttgtggcacgagatatctattccttatttttgtttttataaaaaaattattttagaattatttcctgtaaatttttccataatttacttatatgttaggacaacaaaacaatatatatatatatatatatatattaattattgactattagatattaaactttccacctttaccaaaagatgttaaattttccaattgtgttatgtgctggtgggggagcatgcactgaatgacaaatattttaaccaaattaaaaagatttgtacctctttgcaaggctaagcacttgagaaacattggtaacaaaagatcagttctaaattaagcattcctagagctttgaagcccttgatcagaaaagatctaacagctaggataaatgcattaccacctagctagcgttcttgttggaaagaaattctattatgcttccctttaaaacaattatcacacttatgcaaatgtggacacctcatgccagacatcagacaacacatccattttggttagttcaactatgcctttctcacatgtaacacaacctttgatgtcataacttaactttttcaactagctagttccattgcatgaacaacatcaataaacatttttgcttgtgtcacgtaaaggttggaatatttcatacgtttagaaacaaccatagaacactttggtgagtttccaagtatcccgattgtcataagcttcatcacataccctagcccccaaaagatcctctttttgtgtttctaatttgtttcccttttttttctccataggacatgagtttgtgtggtttttgcaagtggaattctataatatttttatctaacaaatgttagtggttaatttattattttttgttaatagaattgtatagtggttggttgtcatggcagtttgcatgattctcttctcgatctttttttttccttaaagacatgagattattttgatttagatcatagatattttttattaagacaatctgacttcaatcttgtgaaattattatgatcaacaaatttttctctaaatatttaacacttatatacccaagacttgaatttgagtagatctttctcatggtgaaagagtttatgtttaggttaaaaaaattataaaaatgtttattatattattaataatattttaaattttctataaataatattatttaaaatatttcattttaaaaaatattttgttatgcatctttgttttttttaaaatattagaaacataaaaaaattatatttattatttaaattaaaagataaatatttataaataatgattattttatattatattataagattatgtcaatatattatttccggaaaatggtcatcctttttattttaacaaataaaatataattttattattgaaattttattattaggttatattatattattaaaatatatttttaaatagttatattaatttaattatattttaaatagtaatatttcttaaattttccattattatattatgttatagtgttctttggaaaattaaaaattaaaaaaatgatgacgcctaaaaattataatatagtcaattttttaataactattgtattattatgaatcatttaatctagtcttaatatttatttattacttcattgtaatgtatacataataatattatcttattaattgtaaaaatgtctaatatgaacatataaatatagaacaataattttaaattattatttatgaaatatttttataatgttgatattaatattttaaaaaaaatctctaattatgtttgagttagagaccaaaaatttggtttgaaatcatcgaacatatagatcaattagtgtggaattattttagtttaattaattgtcttagagtttgaatttatcctggatatgtagttatcaaataaggaataactttgcttccctaaaatggatactatgtgctatagaaaagaaaagaaaaaaaaaaaaaaacagttagaaacaaatttttagcctctaaaatggatcaatagcgactgaagaatcaattcccattttatttcagtcactaactgaaaattttgtctttaattcaataacaactgaaaaattattatattttaattagagaccaaaaattcaatgtttaaacatatgagtttgcctaaaaacacatatttgagttagagaccgtctattagtgtataaaatgagttaatagtgacaaaaaaattgtctctaattaaatttcaactagagaatattagtctctaattatataattaatttttaagatcattaacaattgaaacattagtctctaatagacggatttagagactagttattttggtttctaaatcaatttctatagtaattgattattttcaatttctaaatcaatttatgtttaataaatttcttgtgttaagtatactttgtttaccaacaatggttagtttaagtgatcggagtttgaacttcttaaacatgtgatcagatgttcgatttcttattggtaccatgaaaaaattattgttggaaagagacaactcattgatgagtgttaacagattctttgaaggagtttaaaagttttgataatcaatcgagatatttctttgcaattagcgcaaaaaaaaaaagtataccttgttttagaaattattggaataaaattcaaacatgaggccacaatgaaattattaaaaatacaattattaaataccaaaaaaaattattaacatatgtagccattctttatataagattagataaaatgatttacaaatttatggcttaaccatataattttcatggtaattaatgtgtagaagccaaaatgcttgttttttgatatcatgatgaagatccaaaatatcataaatattttggtgtgtctaaaatatttttggaaatgagagacacaaatgtaaaagaactttctcccttcatagaatcttggattctcacccctcctatggaataatttaagtggaaaacttaactaaatattctttttcaggaaaacttaattccaaccctcctaattctgcagtcattcatctgtgatggattcgggtatgcttctgttttctaattaatttatatacctttaatcatttgacaaaaaaaaacccttttatttaataatggttatcatgtttgatatcttcctcatttctaatacaatttgcttgtacaaagctcttcaatcactgttagcaaccaaagctgactgagacattaggctttaaatgggccttgcaagtggcacgagaactctcctttgataaaattatggtttaaactgattgcctacagctgttccaagtttggacaaagaagcaaagacaagctttctcctattttgagactatggaccaatgcagagacaagcttttgttcgatgactccatgtacagacattcttttctcatcaatgcatgatatttccaccctttacgcaaaaaaaaataataataataaaaataaaaaatcattgaattctgcttgttacgttctaataatttgtacgttgttgcgtgtttttaatgaagcaaattattgaattacgatacgattcaattttttttttttttttgcatttgaaaaaggttattctatagataattaatttcattaccgtgatgtgtaacatttttccttttacaagaataaccagatgtttttttagatggtgtattaatagatagtcaacccaataataaaacatctataactaaaagttttaggcctatcagtaaaaaaagttttgttattaatttttataaatgaaaaataaactcagaaagactaaagttgatgagtcagaaaggaaaggaaacgggttatcaaacaaagaaaggaaaaaagaaacgaaagaaactcaaaggagtattgtcgcctttttttttttaaagaaacaaagaaaggaaaaaagaaacgaaagaaatcaaagaagtattgtcgcctttttttaaaaaaaaagaaaggaaaaaaaaacgaaagaaactcgaagaagtattgtcgcctttttttaaagaagattgaattatttatatcatcatcaatgtactactgcaactactactatagtaattaaattatcactactctctcccttcaattattttaataagatagatctttaggaaaagttacaccactagatattattatttttgtggttatttttcttttaagttagtgtggcaattaatagcaatagcaatagcaataaattaattactaatattttattatttaagcaacattatttatgactaatatatattatcggtaaaaattatttattaagacaattattaagaatagccagtaaaaaaattatattttattcaaatcatatctaatttttatttctctttattttttcttttaaaaattgtgactaacgcactaatactttttttagtaattaatcgttctctttcttgacatactttctcgcttttaatcgttttcttttcaacaacctctctcactcatcacaatgactttttccaatcattcattttaatcatcctctttctcaacgacctctcttttttgtaatcactcaccgcatttgacaaataaatatcacttttataaaatgtgtattatctcctttttctaaaaacttatcaaaattaaggagaaaatagaagaaatggaagagacagaaaatgaagagaatccatttccctagcaaaaatgcttctcatataatgcttttagatatctctgtgtttattttttagagcatctccaatataaaatatctatttggatttctttatcaattttttgtggtctatgtggtatttttttgtggtccctaagtgtcatgtcactcataaaaaattcacccaatattttattccaatgcaagaaatcacaaaatactcaaaaaaatccacatatttatatttttttaataaaatttaatatttttttcaatttttataaatacaaataaaaatatgaataattgaagaaaaatgaaatataaaataaaataaataaaacataatgcctaatcatataaaataaaattttacataataataaataattaaacacaataacatcgaagtaaataaaaaatatagtgattcttattccatcaaacgactattttgtttatctcttgcaattttatgtttttcatcacttcctttttttttctccttttttgatgcgcatttcttcttcacttcctatttctttttttctccttctttgatgcgcctttctctgagccttcttcacttctccttctctgtgcatgaccttcttgatttcttcactcacttctccgcgcctcatcgaaggcccttcactcgagccagcttcctcgcgccgcgtcctctgttgcggtcccttcaccgtcgtcgggcgtccaccgtcgtggtcccttgtcgtcgtggtcccttgccatcgcgatccttcgccatcgcgatccttcgccatcgcggtccttcatcgtggaggtccttcgccgtcgtagtctttcgtcgtcgtggtcccttcgccatcgcggtccttcgccgtcgtggtcccttcgtcgtcgggccatcaggttagttattttccctcttcctcgcgctagtagttgatctaaaacgcatttctctctcctcaagtttgcgttccttatataagaaacacatttctcccttcaagaaccaattccgccacataagcactctacagtgcaagacttcttcacgaaaccggttcgtcatcttaaggaacgcttgaagataccgtgttggagatgctcttaatgttagaattttgtgatggttttatctttcaaataattgtgtttgtgatcataaataaaggaacagtagaagatatgagattgatttgatgataaaatgtgaacgaaaggagagataagttggagattcaaattctttggctgataaaaattaataaactaataattaatatttattgataaattaaataaataaataaaaggtagatatatcaaagaagaaaatgaatgattgagaatggatgtatacatggaaattgacggataaaaaagaacaaaacatgtaatgtatgttttatctatgatattgataaaatataaatttttaaataagagtgttcgtgggtcggtttgaatcggttttggccaaatttaggatcaactcaatcaaatttgatcggttcggttcggttttcagaagaaaaaaaatttgaaacacagcccattcatgaacggtttggttcggatcaccgagttacctatttaattttttaaaaaaaactattattttatatcacgattctttcaaatatctcatacaattaacataatattatcaaatgtatgaaagtagtaaaattgattcatataataccatcaacataatattctaaaataaacttataatataaattaaaacaaaagatttttgaacaaaatttagtataatagtctgaatcacaattgtttcttacaaaccaaattttgttataaccaaatttattgtaaccagatttgctaaaacaaacaaataaacaaaatatgattcattaatattataaacatgataaataaaatatgaaaaaaaagtgaaacaaataacgatatacctgaaagttttttaataaaaatgtagatggtcaatttaagtcaattgatatcctagctttccagtcagaagtaacacgtctcaattcatcaaaaacagagacaaaattggtatcctagtttcccatatgtgactttttctaaagtcaaaaaagaagaatacaataaaatagttacatttacgtttctattccttaagcaaataagtatctttaaatcctgatggagagttgaagaatcagacttgtcaaacgcttctatatgatctcacaacaattctctcaatgatgcaaacataaactctctaaactctaatattatttggaatggaatgcatacatgaacaccaaaatatgtttctatttatactaatttaaagaattttttaatacaatcctaaatatattctatcatagcaatcttaaaaatattctattatattatgcaatgcaatcttcaaaataatctatcatattttttaatgcaatcttaaacatttacaataccacacctttttttattgtcaaatttttaaattttttttaatatatatatatataaataataaaatttatattattattatgggttcacaggtttggtcatcaggtcaacgactctgtaaatctaaacacgtgacccaacccgtacatgaacggttttgattggttcgattcggttttgacctaaatatataaataacccaattcaaacggttcggatcggttcagatcaattcatatatacaagtgacctatactcatgaacacccctatttttaaacaacaaagaagaaaatatattaagaatatcccatacagcacaagttgtaccaatattggagcaaaagttacagaggttagagaaagctgaataattgaaaatagagtccagcgaataaacaaacattcctatcaccggcctatattacccggtaccgattccatcatcccacgcctgcaactgaaaacccattgatgtgtgcatctaatacaaatacttcattacagaaaaaaaccaccaccagtagatacttagcattgaaaatcttatacctcccacctactaccaacatcataagcatgtccttgcatagttatgtcctaccgatatttaaacagcactttgaaccttggagatttattcctttgtgcaataaatattaattttactaataattaatctttattaaaaatttaattgattatttttagtgaaatctttatttctattatgttttttatattacaaggttcaaattcaaaactttaattaaatatatcaaattcaattcagtatcactcaaatcaaaaatttgttagtaaaaatttagtgttaagtagatgaatttaaaatatcacaccgaataaagttaataaataaataaagcttataaaatagtaaaagccgacgaaagaaatgttatgtgggattgagggagtccattccaatatgggaaacgaagtaacttagaggtccatttgatactctatttgttccaaaataattattattatatgttattttatcatacgaagaaaaattaagaaataaataaaagcagtaactttataatattaatattataatatcattaatttatttataaattttgttgtacattattggtcttataagggatataaatgagaaaagaataattaatatcatattaaaaaactagaataacaattattttttacatgataatcataatgagacagactgaaagagagtattacacttcctaaaaatgtactttctccattttttatctgtcttttaagattattatgtaaaaaataataatttttttaattctaataaaatagtcacgtgatttcctttttgccttttttttttcttatttcacaataaatgcatgagcaaaataattaaagattagaaataagtatgaatataattgataaaggataattaatgtgatattgaactttgtagataagagataaataaaacaaattaaaattttccataatccaacaacacttgaaaagaaacagagggagtagaatatgtatctcctttttttgttgtcctgactcttcataattcttatataatagcatattatttaaaatagtatgagaagaaaaaaaatagaaatattaattataattttaaaataaaacaaattaaatgaagagactggttaaagtgtccaaagttagaattttgggtgcgcatataatcgcattaaatactcaatataaaacttttcgttcataaagattttattcaacttaattattattaagatgatcttcagtaaaaaaaaatatatgtgattaaaaaaaagtgtttaaagtggtgataactatattttgtcaccgcatggttgtcatagatggcataaataattattatattaattgaaattaatatttaactcttgctatagaagaaattttagtttttaaagattttaaaagaattttctttttaagtactgtgtaaaaaaatttgcactaacaattattagaaatcatcatcggtataattttaagataatcattataaaaattaacaaatttaactaatcatacctgatcatttgtaattaaatgataatctaaagactatttacattatatagactatatatttttaaaaaattaaaaataattaatttcagtcttaaataatcaagtcattactatttaaaagagacccgtgaattgtgaaaacatcaaaaccttacggtattcttaatataagatattatttagaagaaatagataatcatttttataagacattttacagtttctttgaagcatttttttcttattaaatactctacgtatctttgtgttttttattgatgtgttctattattttataatgtccttaaactttaatatttttatatcatccataataaattaataattattaataaggataagattgatatattagtaatattttgaaaaagtaatcaagcaaacttatgtacctatttttatcggtgtcttatattaatgacgggagggagtggtaaataaaggcattggaaaagtatacataaagaataaaagtatacataaaagacattggattagtgattatgatccaaacacgcaagtgtcttcttagaatgttttagcgtgtgaattgcaaaaacttttgaatgggcatcttaagatatggtaagatttgtctttcattattaaaatttatcatacttttagacatctaaatagtagaaattaacacttgattgacactttataagtataatgatgaaattaggagagagaaataatatataggtgttagttatgtttttgaaaaaaaacaagtgttcaaatattattgttttatgagattcttcctatgtgtgctctaaatttttacttttatacatttaaaggaaaaaaaatcaaacaaaccattaattattttaggtcttgaagacggacttctgaaaaactattcttttgttaaaactacttctgatgagtgaatcctattttgggaggttgatatatttacattaatttttctcgagtttaactcatgcttcttaatcaagtcttattcttaaaatcacacctgacaaatcataaaccaaaatgatatatattatattctcgaatttaactcatgtttcttaatcaagttttgttcttaagatcacacctcacaaatcataaataaataataatcttaagtcttgaagacatagaattacttcttgttaatttgttattattgaaactttattgtataaaattatttgcttcctcttttctctatctttatgtttctttttattttccacctaaatcttatattattattacttttactacagattgcttaaatgtgttttcaaagtacgatgactttgaaaaggagttaactaagtcatgaaataattttcttacaatataaaatcataaaaagataatataaatttatgtatattatattatttaataaaaagttatatatatgaaaataaaatgaaaactattataattctttttcaaaaaaatatataatcaccaaatttcaagttctcataaagtagttaattgcccttacataattttgcattatccatgagttaaaaggtaagttctatcgaacatttttaactaattagttaagcatatcaactttcactggacaaacttttcagcttttaaatgattaactgctaatttgacaaaacattgccaaacgttcactgagtgccacagcagcggcatctaatttgattctataaaagttatacacaacatttttttattttttttttgtgttgggacacaacatatatcgtgcaaaaagacgcaaatagaagcacatatggtagtcaataatatccataagtatagtgtagaaacacatttttattagaaaatttatgagaataaatattatatgttgtttatggtacatttttcaaagaaaaagagatttaagattggttgagtaattaagaaagaaagaagaaggaaaaaatttcaatttgatcacttttattaataaaaataacaaattaataaaaaattaatatttattgataaaaaaaaattatcgaaaggagttgttaccgacccgctagtggacaggaataaaggtgtaaccatgcaaattcattttcaccacccacaaatccaagctcaagttaatattattcaaattccaaaaattattaattgcaatggctattgacagtacaccaatatgaagctcacaaattggttttgaggatgcaaccctgaacttgcatgtcttccttgccacgttgtatgtaccttgctatttatttcctgcacgcattgaaatgtatcatggtattgccaagtttagaagacaacaaagaagtctcatcaacaactactaaagtctttttgcatgtatcaacttgtgatctcaactctaaaaacacagtaagtgagtgcttaccactagactaaaaatactagactaaaaactataattaatagttaggacataactttttatgctttagagcattagcctaggtgtcactattcagtgtaactcaaactcacatctgaaggcaagaagctgaattgttggaatatagtgtaaaatgaagttccacattaaatagaattagaaaaataagtacgatatatataagtgaggagaaaatacataaaatggataatgcaaaatttgggagcctcatgtataatgaaagcaaaagaatatgcatcaacacttctatcaattaaaacttcatcttttgtaaatctttataataatactatatcacaatatttcttgaaatgcttgtccattttctttacttattttttcaagtatggatttttaagtattttctttgctctctaagtgttggttgtaatttgtatgtgaaaaaagttaaatatcataaatttttggagctaatcaaaagacatggtcatggaattttatatgattgtgataattttgtatgtgtgtggttatttggtacacatatagtaattttgtacgtttgtgcatcatctatcatttaaagattacagaatcatctatcaaatttaaatcataattgatcatattctttaattaagaaaagatagaaggagaatctccacaatattatagataagaatgaacttctctctttgaaagtagtttaatctttagttttattcatatctttttacgaatttgtgagaaatttgaggcttttgaaagctgaatagcggaacaataccgttaggatgaatcatgatcattgttcttgctattgtatgtctatgtttattttttataggattgttagttttgttctaatcatgagtgactagccccctaatcaaagattatgatgtaaatgtccaaatgtattcttatccttgttcttaatgaaatttttcatcattttatgttaattaattattttccttggttaatgtttatttgaaaccggtcatactaatactcaattaattgtataatagtgatcatctgcatgtaattggtagatctagaaaatattttttgtaccaaattgcatgatcaaactgttttgtaatatccgataaattagttaatctttaattaaacatacataaattaattttatcatttgacttaattgataatatatgatcattagagtattgatttaagacaaacaacatttctgatcttgacttagtttatttttggaatccacaattaactaggaaagatatttcattggaatgttgatttaacgcacgtcaacttttagcttttcatccttttaactaatgcatctaaaaataaaaaatggataaaaaatttcaaaaaaaatttataattagtaactaatggaataatagctaatttgaccaaacacattgctaaacgttcgttcaccgagggccacagcaaaaagcatctagttgactattgaggacaaaacagattccatataactaaagtcacagcagttggtagacataaaaagcaaaaagacgcgaatagaaacacatttttataagaaaattctagagaaaatgttatatgtcatttatggtacattgtacagagagagttgttccagaccctctagtggacactaacataggacgaaccatgcaaattcattttcacgctccaattaatattatttgaattccaaaaattattaattgcaatggctattaacagtacaccaccatgaagctcacaaattggttttgaggatgcatccctgacttgatgtcttccttgccacgtggtatgtaccttgttatttatttcctgcaacattgaaatgaatcatggtaatgccaagtttaaaagacagcaaagaaggttcatcaacaagtagaacagtaatatcagtctttttgcaactagcattgctcaaatctaactaaatgcccgagtacagacacaaaccacaagggatggttgattttatcatttcaaggtataacacttcaccgtttgaattcctccaagacactaaaattttataaggatatccgtctaggaatcttaccaagggagtttaaaagtatctttccaccatccttgttttgagcaatttgcaacgattttgtccaaccgtgaaatgacctgagaaaatgttggcctgacaataggtgttggatcccaacattcctcaatcaacctgcatacaccatgatactaagaccgttttttaaattaaactgaagcttgaagacataatttaacttcaaaatacactaactctttcaactcggaggataatgttttgttttgatcttgaatgctggtcttttcccttctaagcacatcagtctaactgcctcctccgaggacatgggatggaagggatgtgtaccctctatcatctgggtccataaagataataaataaaatttgttgatttcaactaatatacaataacatatgaagattagagagataaatttagaaaatctaaatgattttggaaaagctagatttttttttttcatgaaaacagaagtgcatcagtaatcttagggaactacaatgttacataacagacaagaaatgtcaagacaatgttgtcaaattcctcatccttcccccagcccatgcccttctgagctctgtagattgagtgtttaccactaggctaaaaactatagctaatagtttggacataactttttccactatagagcattagcctagacatcactgttcaatataactcaaactccacgttctgaaggcaagaagctgacccaaagcaataaaaacaagaatctcaaagaaaaactaattggaaaactaattaatctgatataagaaatcataacatgatgggtgatgcaaaaatctggtacctcgtatataatgagaccaaaagaatatgcatccacacttctatcaaaaacttcatctttgtaaatctccggtgccacgtacaagcctgcaatgaatacagccaaatcattaattgaaccatgagagatacttttagcaattctaatcttcaaatatttttattagactaacatataaaacactataatgcttgtccattttctttacttagtttttcaagtatagattttcaagtaaattgcattgaagggccaagggaacatcatttagaaacagaacgagtatcgagctatcaatggagaaaattactctccaggtgttgagtaatttgtatttgaatctttaaatcataatggcagttaatttgtatgtatacttcattcatcattgaaacggaaattcctattgcattcacaaatctaatatgttgaaccagttacaattaaactgaatcttaacgcaagaaaatgggacactggaaaacaaaaaccttcaaataaacttggaaggagacaaaatccaagaatttttttttaaaatacccaaaaacttacttgaaagatcaatgttaggctcaggctgtaccagctttgcttcatcaggtgacattagtgaaaatctcacagtgccaaatccagctatcttcaattgccctccattattcagcaaaatatttctggcaccttaccaaaatttcatatattaaaggaacagtacgagaaaaaatctaattcaaaatgcactcacagtcataaataaacatcaaattgtattaagtgatcttactttggctttaaatcacagtgaataaccggatctggtttgcattcatgaagatagttcatgcccctgctaacaaaaaaatatcaagatgtcttgtataaacaatctggcagaatctccaataaatttataatcatttggtacattgtaagcttagcaagctaagaaaatgaccaaggcgacttttagaaatcaatgaccaaccatataagatataatagaagtaagaaaggacattaaagtttttcaaagatgattcacagagatttcgtacagcatagttccttgaaatggttacttgcctggcaatatcaagagcaaaccgtagaacttttgatggagacaaacgccctttcttttgaagatagcttgccaggtcaccctgaaaaatcaacattgatatgagcaaagaaaagtgagttagatacaagaaacttattttgcaaagatacagagaacatagagggtaagcctaccttagaatggtactcacgcacaatcatcataggtatattctgggtgacagctccaacaaactggaccacattcggatgtcgcaccctttctaataatgtgagttcatgtttgaaagcatttctgtgtgaattattgaaatggtcaaaatttagagccaatgttgagtaattaagtacagaaaaaaaaaaaaaaaaaaaaaacagctatttagaccataatcaacttgaccagaaatcaaagtgaaaagtagtgatatatgcagtcactcggacaggaaaccagcatcaaacaacccggttgattggcaagaagcatatcatacagacactcacaagtcacaacaaacattttcaattgctaaggtgtatacatacatggtatcaggatttgaataactgtccttgtcaagtatcttcactgcaacctttgtgccattccatttagctacttggtatgttccctgcaaacagattgaccaaagaacaatgaagaactaaacaagcaagtttaacccctaatgtcgaatgtttatagatacattaactcaattcccacaagtatcaacaacttttattatacatgaagcatcagcacattaggtaccaacaattatcactttgctggtattacttgtaataaaccaaaagaacaaaatttaacaggaaaaatgaaagatttggggaaaaatattaaaataaaaataagatagttgccaaaggaagcacggtgcataggtcgcgaaatttggcaaagcaaatatttaatgcacagtagaaaacatcacatgccacattactagtcatgcaaattacattactaaagcaaaatgttacagcacagaatctcaattgaccaatttgaaagcaacaataatgctccctcagagtgagaatagttgtgtcagttgcaagaatcaacatgccttaatttccatgaacaaaacaaataccatgtccaggtggaatccaagttgtctaataagccaaaaaagccataactattgaataaccaatcaaatgtaactaagtgaaagaaagagaaacatacctttgaaataccatcactcttccgaacctgtagctctaacgggttgagttcatattccggaacttcacgaggattcgcaacagtcattggagtcttcctggttttctaaccacgtcaaagataactaatcagtaagtccctaaactgaatccaacatatttacacttacttattgatccataacaaacaaataacgatagaacaataccggcacttttgctccacgagccttcaacatgtaataaatttctgtatttccataatatttggcatcggccgccgcctgcacatccacacatccatcaccacttaacacagaaaatcaaataaattttgcactctcatccgatctcaaagatttgtatgttaaagtttattgatttgtttattgtttacaaattaaactcatcttgataataacaaagtttaattgccaattgccatgcactttttatattagcaaccaatcaaaggtcagatgaattttttacagtaatcatcataggtatagtttattgaattttatgtaaactaccttaaaacttaaaaagttatatctgacataattttttttatcaaatgacaatataaagagtgattattttcacgatgatagtgtcatcgtggatataaacatttttcatcatgagtagaaacactctttaaactttcagcatacagagttgtaaaactaatttctcttttaaataatttttaaaaattaacaaaattattatttatgactataacttttttcaataataagataatatatggcgaggagagaggagagagtgaaattacggtgctgccccagcgatcgcgagcgtcgaggttggccttgcggctgagaaggagcctgacgacttcgacgtggccttcgcaggcggcgacgtggagggcggtgcggccgtcgaggtcgatgctgttgacgtcgatgccttcgttgagcaaatcctcaactcccttgacgtcgccgcggcaggccatgaagaggagctgcatggtggagtccaggttctccggcacggtgagctcggcgttgtcggggccggggctgcggcgaatcggatcgagcgaggactggcggccgaagctgaagcgctggttgatccgccgcggatccagcgaggcctgccgcgtgaactgccgcgagaggttcctccgcagcgaacccgacgagaactgccgcgagatgccgcgcttcagctgcgcggcaatgctttccatgccgccgcccagtggaggagaaggaagttgcaacgcaacaaaataaaacttctcacaaatgaaaacaacaaagagcgcgctctacatgttgatatggaaccaaccctgtgcaggttaggttaggttcggttcagttcggttcggttctgttattccaaagagaaaatgaaatgaatcacgcgaggaaacgcgattgcgagaaagaaggcacggatgtctctctctctctttccatcgcttctgaattgccgcaattagacgagggtggtgtgatgcgtccatgtgtaggggtagtttcggttgacttacggggactatcatggttcagtttttttctttttttttcttttctgaaaaaaataataataattaggccaatatactctgacattataataccccgttatacctgtacgtaaatgcttggacccgaccaatgtagcaaaaacaaaacatttgtaatattttttttttactctaatctattttataacaaattaatgtatatattaaaataaataaaacttttttttcattttataattgcaaaactagctctcattactaactgtagttaatatgttgttaacttccttacacttttctctatctatcttcaattattatatactagtcgaaagatcgaaatattctgtacttttctatattttttaagatttaaatacatcatgtttttaatttagttgttattataaaaaatatcttgttattttggtttaatatatatactatatatattgctttttaatctctatcatatttttgttcgttttacattaattccttttaaaaaataagcacacactaaatattttagtaaagctttcaaacagttaattggatcaaatctctatcatattattgtccacttgtttatttttaagctcacactaaatattattagtaatctctatcatattattgtccacttgtttatttttaaacacaatttcaatcctaaactttgaagtcaagcgatgcatgtgtgatatttttcagtaagattttaagtttaaattttatctcctaataaaacctttaactagagagttgactcaaatgttgtagatcatatttctaactcaatgacccacgcagtttgactcattcaaactatttttcagtatttttaataattcgatcagttcgtatatagataatatataatataataataatacatgcaattacagtgtaaagaacttactctattattcaatcacatgataattatatttgataaatttattatttttaatataattaccttaaaattcatactataaatgttttaatcagttaaaaatatacacacttttacactgaccatgtaaactaaactccataaataatatatttttggtaatttttaaatattaaaataatttatagaatttaattaaaatgactaataatatattaatatggagatgttttgcatttcatttaattatacattttctgatctgttgattttataaaattattttaaaaaatatatttaaagtaatttctaattaattgataaagcactaacatgaaaattaaactgtaatttaaattcaaattaacttgctgcaaatataacaataagtctctaataaaactataactaaacaaactttcaaacttaaagtgaaagagttcatcacaaataatgtgattaggcatattagttacaaatgactcgtatataagccaaaaaaaaacattcttatatttaggcatggcaacagggtggtattgcgttctcttccccgccttgactcaaaaccactccccatctcgccccaatttccgtcagattttaaaatccatctccatcttgtcctcggtatttgattaaaattaaaaaaaatatagcttttttattgaaaaattggatgaaaaggctaattacttaaaaaaaaaaaataacaaactcacattaaaaatatggatcataatttaaaattgcaaaacaaatcaatcaattcaattaaaaattacaaaataatatattttttttttttttttaatattatttattacgaggcgggtgtgggtgctgggcggataccataatccatatccgccccgcttttggctatgggggaaactcgaacccgaattgataaactcgattttttcccgttaaaatcagaacagattcagtggtattcacggattcgagtccgctgccatgcctattatatgttgaacttaaataaagtaaatttaaataattttatcttatttaatattatcattcttaaaatactctttaattaattctaattataatttcagtgactttttttattcatgaaacaagtccaagaataacattttagaaataatttatttttatatgagattagaaaattaaggatgtcaactaaatttttaattagtataaattattatttttgtttatatacaattcaaaggaagtaccttttgccataatcaatttaaaaaaatcaattataaaacgtatcttttatagtttaattggaaatgtctcataattttttttatttaagtaaaagttataaataaaaattaaggaaatttataaatagtttttatactaataatatatttttactttatagaataagtaaagtacagaatttaaaaaataaattatttaaatcaagacacgttttcttttcgatgtagtgtgttaaattcaaaattttaaaatcaaatttagattaagatggaaaaatcttaaatttaagtttgcaaaaaataattatatgttgacagtgtaaaattttttatcatatagtttataatatagaaaggattatattattcaccttcttataataataataataatatattttattaaaataagtaaaaaatatataaagcaatttagacaaacaaactaaaaaaaagtttcttattttattaaaataaatgcttagtcaataaataaatttaatcaaatttatcatatactttgtaatataggaatggattatattatcaccttcttataataataataattatgatgatgatgcttttgctttaaatgtttttattatggtctaatttggtgttttgaaagaaaaaaataaaaatgtgaatttgatacaatgctagctagtactaattaacgtattatttttattaactatatttttaatccctcaaattaggtcactttagttttggtgtcgtaaatttgaattttattttttttagtctttaaattttgaaaattatttttttggtctctttcacagtaaaaaaacatgtcacaaaccataccttcaaactgtaaaaataatgcagaaaggtctaaaaagttaatttttcaaattgagagacagtaagagataaataaaaattgaaccaaaataaaaataatataattttaaataactaaactaactaactgtttctctttggatagctccacatgaaactgtcctcttacaagttttcctaaggataagcctgtactcaagatattttgatgcacaaggccatagcaatttacaagtacatggaattaattggctacccaaagatgaaactaatgaaatcgaaatgtctccatggggtcagcgacgacttcataattaagtacgaattgtgtcgcctctgattagattacatgtgcaaaaatacaattatgtcggcttggaccaacgtgtgtttaaaaataataattactacatgttgataattctgctatacttagtttgttttttgtttttaattgcatcttggtgacctatgtctttggaattggaatacttgttaaggaattcaatttttaatgaaaaaaaatgttttttttttttttttattccttcaccatttgctttttttttctgtcaacaaaaaaaaacagccatttgcttcttcttttttattccattgttcacttatttttgttttctattcttttattacatcatttattttatatgtgactatctttcttttttttttctacctttttcattacatctgctctagtacttaaggtatctcacaattaaaaatttaagaatactgatctcttaagttgcaaaaaggttaaattagtttatcactattctaatttatttttaggtttgattttgtcttttaattttttaaatttattttgatcttttaatttttaaaattaattaaatttaatttggctatctaaattaggtcaatataataacaaatcataatttgtgataacttaaaatcaagatcaaatttgaatgatatgatcactcaaattattttagatagtagtatctaattaataactaaattgaaaaaaaaatgagaggattaaatggaaccaattttaaaattaaatgatcaaattgaattaaaaaataaataaaagaccaaatcaaagttaaaaataatcaaaggaaaaaaaaagctaatttaaccttaaaaaatcatttaagtaacttttttcccaatatatacacgaaccttaaaaccaatttttaactacgcatgcaatacctcaaaatgaggcctacatattaatcacttctcacctaaaaatggaaagataaccacacgatagtccttgtaggccacccatactaaagcattaaagagattgaaggtttcctttcttttttgcaagagacaagaagatggacacctatgaaatgtcattttgtgcgagtatcacatgatcgactcattttttgtgataaaataatatatttagtagtcactctatttataattttgtctttcttatgtctttttttattaattttctatttgcctcgtctataaatgtttatgcgtgtctcttaagaatgggatatatatatatatatatatagaaaaatcttgacattttaaggaaataagttacaaacttttagtatttaaaaagactaaaggtatggattgaattgagattttataagatttcaaaatactttttgttataacaaagctttgcgtatctaataatcttttaaaataatataaacaagtattgtagtataccggtacttaatcacgataaaaataatttattgaaatatcaaaattggtgatatttaattgacacttttataatttaaaaagaagtctctagtattaaaaaccatataaattttaatggattttgtatacttttttagtgatatataatgtcacatttgtccaacaatcacattcaaattcctaagtctttttgtcattgcatattttattttctttaatcacaattttttttccttgaaggtggtataaaatattggtacaatatttgatcatttattttttcccaatagtaaaaaaactttctactatttttgtctttaatcaacttgtttggatgaattaaatgaatgtatcaccaaaaagataatgtaaaaaatatataaagatttttggatacttgaactttttggttgcttgatcaaaacaacactgacaatctttactttgtaggaagtatattatgaatcgattcatttataaaaagagaaatattaactccaacaaaattaaagttgctacttttgacacgcacagtattgaaatttggactagtttctctttccatttggagagcaacttggtaggttgcatttcaaaagtgagttgtcaattgcaacaccggtttctcttacagtgcagtggaccctttgcattatattttattaaataaatgaaaagttgtgtctttaaaatattgtgggattcattttgagaatctttagtgaattttttgattgagtaaattttgattggattgtttagagtaagaaaataaaaaatatgatgtgatattatagagaatggtgaaatgttattttaaaaaatagaagctaaattttgatggatttgttggttaaaaatgttctaatggtagaaagttttttcttgcatttattttaatgtgcatgtcagtggataatgtcagaaccatattgacacacttttttaaatactttatgtaattaattgaaatttattaaaaattacaaaaaattaatgaatctcacattttatttaatttaatgattctcacttaaaatgtattgctaacatcctcttataaaaatattttcccgttgtgcttttttttttttttaatgcaatcacgttgttgtgaatcaccattgtggttgtgcatggcaatttaaaaacattgcaatgaatagtatattcaggataatcatttctcagcccttagtgtcatagtggttgttaaaagatgactttatactcacattggtttttgcaatctgagaatccaacttcaaggtaaagtgtttgaagacacggttccatggtatagcaattccatggaaaattgccagcatacagagcaaaaaccaatattagaggcataggaaaacactacagtacctaaacactcctcccacacccacagcatctttcgtccttcagataagcgtcataattcagcttaaaatgaccagtggaaggatgaatataccgaatgaaaatgaaaatgtatatacgatattggattatgctataaggtgatcatagaagaaaattattgaatatatttaatatatatattaaatattaatatgtttactgttaacattcgatattatgtcgtaatatttcgaacactcaacacaaatccttctctttcaaaccccttttaccttcaacaaaaatgaccagaaggatgaaaatgccgaataaaatgaaaatgtaacatgtcactccaacaactttgaataggggactcgctcacgttgctacaaaatttccgacagccccctgctttgaatctacggtgacaggaagagcatgatgtagggttagagtttaatttttatttcacgttacatcatttattataaatataactggggaggggttgtaattttcactttaaagcaattaaaaggtattcaaaaggatttttacgaaatttattcgaacttacaaaaataacttgcgattcttataaagtagtatttttaacttattttgataacttaataattaaatttgggaacggatacacttattttagaatatatgtttttgacactcatattatacttaaaattaaaactaaattgtaaaataataatattttatttttataaaaaattatgaagttgttttactataaataaattctcaattcaacacttgaattaagaattcaatctttataaataaaataagttaatcaaaatgcaggaaatgattattaggagaatcatattcaatttttttgtaagtataattttttagttaataacaatcacgtaatacaaatcaattaattttgatctaatagataatttgaggctcatgtttttttacttaaaaaaataaaataagttaaacttcctcgtaaatcatttcccattataaaattggcataattgaagcttaataaacactatcaatttgaaataatagtagtaacaaacgatctttttctaacataaaaaaaaaaagaaataaaaatcgccgcagtgcagtgaaagcagtagtagaagaagaaaacacgagttacgcacaaagacacacactcccggtgccgccaccaccaccattgctttcagtctccgaatggcaaccactctaactccaattcaaaccctcaaattccgttctcccaatcccaaacctctctttctcccaaacctccttccatctcacacctcacaccttccgcgccgataaactcactctctccgtctccgccgccacctcctccgccaatggttctccctctccccctcccccgctcgctcaaagtacgtcctcctattccattccctttcactcctctgcgtccgattaattactgttctgttctgttccgattcattactaattgatgattattattgacaatgcagggttcgtcgacacacgatttccgtgttcgtcggcgatgagagcggaatgataaaccggattgccggcgtgttcgcgaggagaggatacaacatcgaatcgctcgctgttggcctcaatgaggacagggcgctcttcaccatcgtcgtgtcagggaccgataaggtgctgcgccaagtcatggagcagcttcagaaactcgtcaatgtcttaaaggttcaccgtctttttcgtgacataccaattccgtataactagcgtttttattgggtgtttttgtgagatgccatgtggagaaagtgtttgatagtgaaattagtgagagaatgaatctgaaggaaactgttgcttatgctggctaggttgaggatctttcgagggaaccacaggtggaacgtgaactgatgctcataaaagtgcatgcggatccgaaacaccatgcggaggtacctgcttagtggtttgtggttgttgtatatgtatgcatctgttatgttatgtgtgtgtttattttgttgattgcttctatttgtttatttttgctggaatattctcagttgaagtggttggtggacatcttcagagctaagattgtggatatctcggaacattcggtgacaattgaggttattgctggagacctttaaatatgttttaatttttaatttccatgttttagtgcatgctctgtatttatatgtactcaaatcaattggatgtatttatatgtactcaaatcaattggattgtacttgtaaagtggagaaaaatatcattgttgtttcattaagataattatttactattggaggtgaattgtgttatgagagtatggtacagtgccttgtaaacagctcatcttgggaatatactacatgtattcatatactcttccttttattgcataaataataatggtgtaattacgaaactaaggttggagtatgactataatgtggttgacttgttggactggctgtttttatgttattttgttcttgataggagtctttcatttttacataaaataggattttgctcatctttaaataatatcatgaataaatagtgtgctgatatgagctgggtagatattttttaaccttatttgtgcaagtgtttgtttcatattttgattattttcttttccatctacctattacttagtcacaacacaaccattaccatatcattacttgcaatatgtcattagatattcttggtgataaaatcaggtcgtaatcttgggtgaattgttctgctaatgttacaggtaactggagatccagggaagatggtcgcggttcaaagaaatttcagcaagtttggaattaaagaaatagccagaactggaaaggttggaaagttcaattgaatacccaacaaatttccttaacttttgtatcttgtccattttgttgagcattatattgtaaggctgtgcaaaatttactaattcattattattggatgatgtaactatacttagattgcattaagaagggaaaagatgggtgcatctgctccattctggcggtattcagctgcttcttatcccgatcttgaaagaagaacacctgttaatgcccttgtgggagcgaaaaatatgaaacctgttgccaaacctgatacacctgtgggggtatgatcttatctactcttcaactctacggtttcctttctagacctatgtttgaacacttcaacttgaaaatttaaatgttgtagcttgaaattaaataattggcatatcctatcaaaagtgttaaatttagaaatcacaaacaagcttagtttcctgaagtaaaattatgctagacaaatattgcaaaatggttttaacacttatgcatatctcaaacactattgatattacagctaaaggtcttttctattgaacatcttttgtccatgtgctttggaatatattcttgttacatttaggttgtctttgactctttccttaacatcaattgttctaatttttaagtttatagaatttcaatgattggctaaagaagaacaaatcagtaactattgcaaagaatgaagctaatgctgacataaatgcactccatcactacatgattgatattttccctcccttctgttctttgatttgtttgctcattattaatttcaaatatagtctgactgtttcttttgacatgtttgcttgtgtgaagggagatgtttatcctatagaaccatcagatggttttacagtcaatcaagttcttgacgctcactggggtgtcctcaatgatgaagatgtaagtggtttgtagtttcttattgtccttaaatgtatccctttttcttgtttccttctaatacattgtagatatatgtacattatcttcattagtttctatttgagtttttggttacatagttgaatatatttgttagaaaatatatggaaatatcctaaatattttattgagaataacctcttttggaatagtttcccaattccttattacctcttaggattagttaccatatttctttattttatcataatatgtttccttaattgattatgattatgatcaatataaataaggcttagtacttttaggtttatgaacatgtcaacacatcaatacattataatacgtctcagttactatcaaccattgcttcattctcttttatctttcttcctcccttaatacctaaatccccagaatcaaacatggtatcagagagggtaccgttctctctcttctgtgccttcaatactatgtttattgtacattagcatgtaatattcatcaattttctgaatgacatgcttgtgactgtcttactgttggtgggataattccttcagactagtggaattcgatcacacactttatccatgcttgtgaatgatgctcctggagttctaaacattgttacaggagtttttgctagaagaggctataacattcaggtttcctttttattttattttataatatttgtgtacaaattgcaagcacataagtccgatgttttggtttctctgttttctcatcttgaatctgctttgttatttccagagtttagctgtaggacatgcagaagttgaaggactttctcgacttacaactgtggttcctgggacagatgagtcaatttgcaagttggtgcagcaactctataagctagtagagctacatgaggttcaaaatgtctttgaaaaagaatgcatcatatcctatacataaattatttgctttgagtaatatatattgttagtgttgctgtttgcattgtcctgtagcactttgagtgcctgtttaagttttttttggagaaatattcacatacttttgccagttccctgagagaagtttaaaataaaaatgcttccgaaaaaaaaaaaaatcccaaacacctactaagtgcagatctcccatcagtgtcctagtggatacagaatttgacatatcaggtttagccaaacatgtgaccctgatagtctacaatgtcacacaactaagtttttttttttttttttttttttttttttgcaatttgtgttgaaacttttgaagtggaggaggaaaaggctaatgcttgattagcctgaaactgtaattccgtggtatgatcctattatattgtaaaatcagcagttatattaggtgttctaaattgcagctacagtaaggatttaggtgtattaggttaagcaatttgtcaaagttgttaggttatttctttaagctaccgatttcaacattgagtatgtaatccttgaaatcttcattgatcatagtgaccttcccccttgtttttgcccatggacgttagcctatagtttactgtacaaaccacattaaattcctttctttttttgtttgtgcaccttgacatgactactagcacaggacatttgtcttgaaagcctttgttggaacttgaatattagcagattttgtgtttcctaatattatgtgaataataaaaagagtattctgaaacttgagatcttgcactggtcttatttttagaatctttactagtttttggaatctttagtatagttccagaattcctatcaaaaaacattctatcaaatctcttacttgaagcataaatccttatcttcctatcttctgtttctttcttatgtattttacctttgagaatgagattgatatagagtgcataaatatttgaccatttttaatgtttacaaaatctggccattgcattcttttctgtatttaaactgatatttcttcaggttcgtgatatcacccacttgccatttgctgagcgagaattgatgctaataaagattgctgtaaatgctgctgcacggcgtgatgtccttgacattgctagcattttccgggctaaagctgtagatgtatctgatcacacaataactctggaggtgaattttatgcagacttttcaaccaagtgatatggcatcgtatttaatgtcaacttatgttgatactcataaacatggtggatactggatacctctatatgtggagagaatgttgaatttagtgactatagtgtaattacaaattgcactaaaaccaattttgtttagctaaatgttacattgttactgtgctacaagttcataggattatgcatttataccagtttaatatctgttggatcatgcatcaagttttgttcaacagccaacgaaaccaccacaaattgggcagggtactagagccccaatggtcctcagtttatcataaagattttttctcggtcatgaaaataaataacattaagctatttatccagcatcctaacattctaagaatcctgttatgcccattgtctgcagctttccacatccatttttttcattgacatgataagctatcagcaatagaattgcttttcttctcatgttaacaaatataattgtagatttaaataagaattgtaccctaacctttgtaagtaactttatttattcttcttccacattaattaatattaaatacaaaagtggggcactgaaatgacatttttcctcaaaaagtgtaatgtagtagaagttaacaactgatgacaccatattggtgcaaattctcagcttttcttctaagtcattatttcttccttccaactacgcctatggttattaaaacaacaggctactgcttttttcttaataaggttatgctgatgacaaaaaattggaaatttgattttatatttatttatttgcttcaaagtatttgctagttttgaaatgtctgccatgatgacgtcagatttacagatcctttattattttgatttttaactaattgatttgcttttgaaccagcttactggagatttggacaagatggttgcattgcagagattgttagaaccatatggcatttgtgaggtatgttttataaatttttttcacttaccatagtagatattttgctagacagtgacttgtttaaattccttattccataaacttccagagtcgaatttggtgcatttacttcctcaaatgtatctcctgattctgtccaagattgtttactcagttgctattattttgttctgaggttttcctttgttttatgggtcagaatattcatactggaggaaagaactcagttttgctggtcttggctaagatgtccttgttttcttttgaagctctgtagaggataagaataggatgagccccctacacaggcagttagctgagtcattcttacacgtcgatgttcattttttattatctacaaaacacaccagtagccattattttaaaaaccaaattagggagtataacagtcaaagaagagggttaagaattgcgtttcaaacagaatttggagtacatgtattttattaaaatataaaaataacaaaatacatcagaaaaaatgaaaaatataccacaatgaataaatataaatttataaatattaaaatttagttttttgaataatttttcactatatatgaaatttggaaaatccttctcaaagtataaacgagtttctctgtagaacaagcagaggtattcacctttaaattttactatattatgatcatgatgcactttaaattcaatcaaagagtgaatattctggcaaatgtttactttgaaccttttccttaacattttgcttccttttagcaaaaggaaaaaaagctggccaccgtgcatgctatacttggtttggtttcttagtgtgctgtgcttcatcctaaaggttcaagattcaaattccattaggaacaagtgggtgtgattcctctaatggaaaagactgttaaacagtcatttaccaaacctgtgctggatcacactcaacagtttagtgctgaaccggccagttgtcaccagttcaaggctagtgcagttctaacatgtaatcggacacaactggctggttcagtcttgttttaagactggtttttgctcatgctcctattgcaccggcactctttactttgaatcagtctttctgatgtttcttattgtttcaggtggcacgaacagggcgaattgctctagtccgtgagtccggtgtggactccaagtacttgcgtggatactcttatcctttgtaatcactttcacctgagtggaagaaccatcaaagtcttaggattttagagcttgtactttctcttaaactttgcctacggattcttgctttctgaactataatgttaagtctttcagtgatttgcaaatgtaggcttgggatgacattgagattaaaaaaaaaaaagttttcctccttctctcaactttgcttcattttttggttgaattacagtctactgttttgtgtagggacaaattttttacatgtcaaaatatttatgtttcgtacttggatgttgtctgttcaaaattaaattccttatattaatgctatcgagtcctatgttgtatgcattaggacattaattttattgcttatgcaattgtgatgttttaaacatatcagtaatatttctcgtattgatttcttatgtttttcgatgaagaataattgtcttatgataataccaagttattaacattgtgttatttatatctatcaatacaaataatggaaggttccaaaatagtcgatgtattattaccaagagtaataaaaattattaattgatagtgcaggattttatgaaactaattgaaattcacttgacattcattgattgagtcaacaatttttttcagagtttttaatgtgcttttattcataaggtttttaatgtatattgatcaaatattagattttgtgtgatatataaagcttaattgtaagttttatgatcaaactttattattttacaaattttatcataaacttttcataattttgtgaatttttactattcaacttttaatattttacaaatttttctatccaatttattatttttatgtatcttattatcacggtaatgatgttttattttatttttaatttttatttgtgacacgtgtaaacatgtaaaattaaaaaattgagtaacaaaatcataaaatgaaaaaatttataattaagcctaatataaatattaggtgttaagttaaccaatgaactaaaatatgatcaaaagtgaagagataaaatttacaaaaataatgataataacagacaaaatgcaatcaagtcaaattaaaaatgtaattataataaaataatgattaaataataaagttaacagtacacatttttactaaaaagtataatttaaccctttaatgtttgttattttaatattattagtcttaaataatctttttggctaataattaagttttaattattattttagtcttttaagattttaaatttaattttagtatctactatcaagaaagtaacaacattaattcatacataataaaattaaaataaaatccattgacttatcacatcacaagacaattatgtaattttgttataataacgtttttaaatcctggtgagtttatcatcatttaacactactacttaatagaaactaaaaaaattaaaatcaaaacaaaaatattttaaatgactaaaatcaaaacctctttttataaagactataaaaagtttttataattttttacatatttgaattaaaatgaagattaatacaacccatatgaatttcaactaacgaaagataaaagtttccaaacacaaattgccgggggatgaaatggttggagagacgtgcaattaacatttaacaacatgaaaataacactacattaccaaactaaaaccactgcagcagaaggcaatgtatgaacacacaacagagcttctagacgggaaaaagttccccgccacacaaatcttgtttaaaaaagaaaatatttattataaacgttaataacattcgttgtaagtccatcattacggaacccatcagcaacagatcatcaccgagttttctttactcttctgcagcactagcagcactaagatccacactgaggtcaataacctgttcaacattaggagtacaagaatcagcatgttacccaattaccaagaaagttatccaggaatatcatcaatgtttttcaagatttcccatgcccaaacaggttgctagtccacccataaggtttctgattactcaatggtattaatacaatagcaacaaatacaaaatcaactagaatgttcaatatttttcattcaccgccattcttcaatcaaattattaacgagtctacacttagtttatttataagaatcagaattcacgaaaagcaagcaaccgattttggaatatataaattttcatattaagaaaatgattggttaaagaataataaaagatcattttattaataaattacatcactgaaactgctaaccatcaaatttccagtgaggcatccattgtataaggaatagaaagatgagaataaatttaaaattcattgtataactctacaaaacgacaattagatatccaactcattctaaaatgatcaattaaaatttatcttagccattttagcttttgggagtggggaagaagagaatctaaggatatttttaatttgagaaaatgttctgttttcatttcttattttcacttttaattacaaaaattaatctaaggattcctacagtatgtagacttataaatatgtgatacaatattataaaatacagtactattgtagaacaatctcagtcactatttgtggctcacaaattaattcaagaagtggaaacaagtggtaaccaaggcataacattacctttccagttatcaatgtatacatgttgagaacgtcatccacagtcgactcaaagtgagtagtagcatcataactctgtcaaaaagttttaaatgcggtattgtcaacctatcaacatatggcaaaaatattaataccaccgagtaaactcactgttgatataaagcagttgtccaaagtgggttcgttgaccggttcatatctgtcatagatatcaaaaaatatctcatcaacaggtcctagaaggtcaattccaggttttagttcaattgcggctgatctgtctctgcctcggttgatacaaatgcaataaattttccttttggagcaacattgtgagtatacgaacaacaaaataggtacctgaccagaacagaatagagcattcaatttaaagaggaatacacaatttacaattgattggacatcgcatgcacaaaatattagtaattttttcaagttttaaacatcaaatcatcttagaaattttagtataccttctgtattggggatgattacaaaattaacagtcctaaccagatcatgagtttatggtattgtttactatgtttaataagaagagtttaaaatcatacatttatattagtatagctgaaaaaggagaaaagaaaccaaaggacaacatgacgggagattgatattgatatgtaaaacataacacatacctaatggtcatttatactaataggtctaggtcaatttagtaattaataatatacaaatagtataaccctggcccaataggactgttaagatcatgagactccgaacatagaatccaaatattctaaaatccgtaagctaaagcttgttaagctttaaaataaattagaagcatacttgtatttttcacttgtcagcttgacagccagtgattttatctgtatcattaaatttttgaaatttcttattagaatttctaaataaatgaaatagaagcaaacttatttcatgctggaaccatttgataattcagatgagactgaacaatttagcttcagtcaagaaaccactgcccacgctaattaatggtcccagtagcacgatatatattgtatcggtattgcaaaattttctacaaatttaactatatagatatatatatatatttaatatgtgcatgtaaacttacatgtctgacttccgacccaactgtttctgtggtaaaataatttgcaccgaatgggaatcatcagtgctggggattgggtggctcatgatggctattgcccttgcaaccctaccaaccttcctcacctgttgaaatgattacaattttgttttaaagaaggacgcagttccatcaagagtcatttaagaattaatatcagttcaccttcgccaataatttttttatcaacagtagttaaacatccttcagaaacaaaactatttacatagcattactcctagatttagaaggaagcaattattcactttcaccatcatctgaactggttgcaaatatcaaactacaggttggtttctaataccttgccggcaaatatgatggatcacaaacaacttttttgcacttgcagttccccttcagatgtgacaccaacaacctttccttcctcatcaaatctacctggcattcaagcaaaaaattaaaaatccacaagagtgtatatcagcatacagttcaaacttcaaaacaaatcaaaatcacatggcaattatagtacaaaaatagggatggaaataaacacaagttcaataatttaagaaggtatatatattgggttaggtatactgacagtggtgtatatcaaattcacaatcaattatacaccaatgaataaatttttcaaagttagcttaattcatgcaattaatacatttttcaaagaaactaaaacatcaactacttgatgacaattgacagcatgattttattcaaattttcaaaaatacgacattcaagatctaaaaataattatagttcgaagactggattaataaaaaaatcctattgaagttgtaattatgcaagtgtgccaagtcttacactagtgtcaattgagagatataacagagaaatgtgtgtatgtatgtataatagagtatataccttgcactcaggcttattcaacatatatgttccaccgtaaacagcactaagccgtgcaaatgcctgaagaaaaaaaaaataattaacgaaccttgagcaaaacaaactccaacagtatattccagaaagagatgaagcagatgggtagacatgggagagtgagatacctggggaagctctcctaaaccatacaaaggatatatgtacggtgaccctccttgaaagcgtgcaagagactctgcatataactacaagtaggaaacatacatatgaatattaaatagggaaacacaataaagctaatgggaaccaaatggaacagaagaaattttcaattaagaagatccacgaatgagcatgaattacaagtgcatgataacccagtaaacttaccttcattctcttcacagtgtccagtgctggctcagccaagtagcgatcatcctatgaagcgccaaagcatgaccaatgaagtctatagtgttatcatcaaggccgtattttctgtcacacgtcaacaaaaaaagcaaaagaatcttaaaatactcctttttcttctcattagtcagtacagggatcaagagatatagggaaatgtatgatcatcatggatgcaaaataaatttgacgtgtaactacattatatatttacaacaaaaaatgccaaataagagtaaataatcaaatgctaagaatttgaactaataaatacatattgactccctatacaatataagaactacagaacagaccataaaccatacacttacattttactaccaactttacatgactgactcatgtagcagttcagcaaatccattatatataaaacacaaatataaataaatcaaaatttcatgacattattgataaggacagggaaaaggcaaggtaattactcctaaaccaatttctacatgtttatgcagactatgaaggcaacacaaagctgagcctgagatgttaaatctgcataaataatggacacggcaagaaaacaagtgcacacatacgctatcaactctttagtagtcactcttgtcaagtccatcccctcgtgggtcttgggatcactctcattgtagttttgcacataaatgaaaaacttgcgtgcacggcgtttttcaaatagccccataagtggggacttcaatgcctccatgtcgtttgcaggcaccttatgaacctgtaccaaccccacaagcaaaaaaaaaattaaaacatctaaaccaaaagaaacctcccattaagataacgagcaacactacacaaacatacctttcctttattaaacacatagctcccatccacagctttgaaatagagatacttggtaacatcggtatgatgagaacccgcaccaaattgccattagccataataaactagaagaaaacaaatcataaataataatgttgcacaaattgagaatcatatcatatgcatccagatttagtataccaaaatataataaataaaaaacaaataaataaattataagaccttagggttcatatcgatgttgtagtccctgctagcgcccaaatgtggaggaggcttgtcatctcccctgaatctcttccaaagctgaagaggaggacagagaaaatcatcatttcgcagttcaaacttcataataacatattcttaatctaatattattatttttgcagaaaatgaaaataataaagaaattattaaaaaaaaaaaaacctgaataagattgagcgaagtggactctcctccgtaatagtcttcctatccatatgcagaacctgaatcgaacaagaaatagctattagcatgcgaggattggatcgattgagaagaaaagaaaaacgaaagtgatgaatggaaatagtaccttgaggccatcgacggagagaagccgctgagaatgcactccttgagacccgtgcccaacacgatcacatcgtactcctcatccatgttcgatcgatctcgatctcgcccgaaaacggggtttagggtttccgaaatgagaaagaacagcgatggatagacagaacaacacaacacaaaagtgtgatttgattggtacgagagaagagacaagatgggaacaaccgcaggaacaagtaaagaaccggatctcgggccttgacctgcacagcactccacacttaaaaataaaagaataatagtaataattaatcgctgtgtaatgaaatgatatcgcgcgacactttcctcatccctgttactgttattatcaccgtgcccctcaattttgccatgataaatacagtatctattttagtgcctaagaagccgttccatacggggagaaatttttcatatagttgagaattatgattttagaaaatcatgaatcctcaaatatttatttataagagtttataacaaatcttaattttttcatcaaaaataaataaatcatgtgattttttttcatattcgatttaactttttgaacataataaattacaaagcaaaatataatacttagttataaaaaaaaaaaagcatagatgatatgtgcaccttgagaaataaaagatttctggttgagtctcaattttatgtaataattactttcatgcataaatttcaatagacgagataagtttcatataaatcaatatgatattcctcaataatcaaaatcttccaacacgtttcttagcatgtgtaattaagtttgtaaatctttagtatggaagcaaatccttatttgactagtgataataattatatttgtattaataatgaaaaagtataagacataatgagtgtcatacacaatgacatatacaaaaaagatatagtcaccatgagtcaaaatttatgtgtccataatatatagcaaataaaaaataataatgaaaagttacaaaagaagcatgaaaaaggagaagtcacttgtactaacaatattattaaaggttacgaaatgttatacataaatgtctatattgtcttaaaaacaaaaagaaaaaattataagtaataggaggaaaaaaaatcaaaaaaggcaaaagttttttttgaattgtttatgtatattttttattgaaaattatatcaaatcgatccaaatctatactatttttttatcaaaatctttatatttttaatattcattgacttttttaaattgtaaaaaatcttaattaaatattattgaatttattgtactttttaaaaattataataatcttaattgaatatcacaagacttatttattcatttgaatttttatttaataccttaaaactttttataattttttaaaaattattcaaatcctaatctaatatatccttatttttttaaacgaatatcaaatataaaaaattaagattctcaatattcctaataaactcaaaacgtctccctattaaatgtttcctaaaaaatgagatgtaatatgaaacataaaaaatttaaatttaattcttaaatatgaaaaaaatgtgatagactacaaacaatttaatgacaaattaatcctaaatttataattaatattaaattgatcatcgaaaatataatttattatcaaattatttttgaatattacaattaaattacataatcatctcacatatttaattatataaccaaattgtcaaacttttttaacatttaaaaattaatttaattttttatcttttatgattaatttattattgttttactttcgtgactaaaataggtatttattcattttcctaaatcaccgaatatattttattcttattttcttttctctccgtttttttccaagccaggcagaaagctagaaatacaataggaaacaaaattcacttttttaccatttaatactcgaaacattgattaggctagaagcctaaaacagtcaccatcaattaatctatgacttaatagctaattattataaatgtgaaaattaacatgtattagtttgaccgaaactgtatgtaaaaaaagaaaacagagtttgagcgaaagtgaatttatattcttaaatagaatcttaagttgaaatcttataaataaaataaatagaatgaaaaactcattgaatcagttagccaattttttaatataaattcgtgatttgtaaaactaataattaaatactcaaattaaacattttattttaaaaaatttatatgttccattcatattaacataacattgtcaatttttttatatagaaaatgatatgtgtgatagatttattaattttataatagttatttcaaaaatctcagttagtataactttttattgagatggtaactgtgatttatatattttgtgtaaacaaaattatccagaaaatatatgaaaacaaatatttcttcttcttttttcttgatccttctagtttattaacagtgttcgaattttatggaaatatacacccattcaacctctgtcactttcatggacaataaacaaatctacgacaatcctaattattttttgaattgaaaactctgtaaacgataattagtatccagtacctttcttttattttacctggtttgtatagttaagattacccaaaaattaaccaaaaatctaactagaagttttacaagtaaaagaacaagtgttggtttctttaaataataataataataataattattgttattattatgtgaacttcgttgttaagggttctaacaaagtaaatttgttcccttttttagtttagagtatcttaagttgcctttaaacaattaatggtatgttggagtgaggtgtcaaccagatggaatcatatcttacacaagctatcgatatttgtccaaacaaaagaaaatcaacttaagttatactattttggattgaagtttataatttttttttatgaatttcaatatacaaaagttgattctaatacatcaagtaaaaaaaaaaaaagaatattaccttcaagataaaaaaaaatatattttaaaaatctcccaattttaatctaaacatgcactgcacttatatgatcaatatcctaagggttacattttagaagtttaagttgaatatcaactttttattttgacccatatagaacatcaacccgataattgtcttgatcgaaatttgttagatggtttgaactttaaattttgtttaggtaatagtcatttgtattattaatatgtaaagttgataaatctattaattaaaatatgaaaatttaaattatagtcattaaaagtgaaaaaaatgtgataaatttatcaatttgttaacttctatactttactgttaataaaaaagtgtacatgacacatggagaaaaaatgtctcaaattattaccaacgtgactacggaataaataaaccaaaagttagtaagttttcatttgatcaatttgtcatactccaaatttcgtttcattcaacgataaaatataatttaatttcatctctccattttttttatcgttacaagtataatattacaataaacactaaaaaatagagaaacaaaaataaattagaacaacataataataagcataatattaattaataagtatagtatgtctgatgctttgaagtttttaatgagactcaaataaaaatgcaaaatcattaagttaatccttaaaaaatgagatccaacttttttttttgtcagtatctaatgttgtcacaatatttaacatgaacagtatatcaatcatggcaaatttttcaattacaaaagggggaaaataaaaattatattatattttacctttaaatgaaacgaaattgaagtatgataaattagtctaatggaaacttattgatattttggtctaatgaaaattactgcattttgatccaatggaaacttattgacattttgatccaatctattcagcaactatgttgataatcatttttgtgacattttcgttcttctatgtcactaggctttcattaatgataacttacgaaagtcaacatataaatgaatttgtcatacttttttactttgaaaattaaattttgaatttttatctttcgaagatgaatttgtcagcactttacatatctaagaacgaaaataactacttacttttagcttatttaacttaacttaatcatagctcattctagacttaaacctacaaaataggtgaaatataatgatttatttgaaatatattacggggaataaagtcataattatctaaaatatatttacaagtttcctaaagctagtcatatctaatgaaaaaaaaaatgttagtgtttccatggaaagaaagcaaatgagtccccttataattactccactttgacctaaaaaatgtcaagaaaagtgaatcttcgttgttttcgagcatgaataattgttgttgaatactttaacaagaactcacattaaaaaggaaaaagaaccaaaaaaaaaaaatgcttaagatactataaaaattccaatgctaaaaacgacagccaaatatatggttggcatgataataaaaatcaattctaataattaaaatacaacttgtatggccattcgtagtagtaaatcacaatcaagagatgtaaaattttatccaataaaatacatgaaaatgcatgtcatgtgagacatctccatgtagaataactaatacatatcgaagcaacgatcaagataacatgttcttatccaacaacccaaatcataatgcaatttttttgtaacctcgtataacgcataatacaattgtatcataacactttaccactaatcctgaggaacatgactgttagattgttacgagaggtttcaattactattacacaacaaatgaacctttattcacacgtagtgttttgtacaatgcatcctcaatgtctgtctcaatttatcctactttttccatcttataataaatgtcgtgtaaaaaaaagttttaaaataactattattttaattatttaatgtaatattaatcacttctttctattaatattttaataaatgtcattttagtttttcaatataatattaatatttacactcaaatttaatttatttacatatttttaattggtctaggtaattagttagttagtttttagttcagtaaaaagtgaatacattgaaaataataaaaattaagaaaaaaaaaccataacgatagatatggtaacaaattttgatggtttaaactttaaagtgttgtttctcataaaaagaaattgatttaagtaataattattgatttgagtaagcaaaaaatgaactgaaaaatagagaagttgatatcaattagaacatgcaaacaaaataataaaaagataaaaacacatcagttagaagaattgaatatggataataattaataaaaaacatgaaacttatggtgaagtttattttaatatatataagtttataattaattttggatttgcatatagttcatagccagaattccttattctattccactttttattggtgttttgtggttttagccccttccagttccacttccatcctacatagtaccaaagcatgatgaaaaagtaggaatatatgatagaaaatcttcccaaaagatgtataggaatcagttttattataaactttttcagtcttttgaataagcaatttgtcataattttgatttttataatctttaatctgaatttgtatgatcaaaataaattcaaaaaatattatatatatatatatatatatatagattttaatttgtccttccattaagtatatattttagtagattttaatttctatacactgtttgcaatattttttacattattaataattaaaattataataatataaattaaaaataattataataaaatttaactaacttatttatataaaattgtatgattacataatagtatgaaaatacattttatattacaattcatgcacttttattcatactttaatacaaaacttatgataaattacaagttatattcgaatacacgtttagacaacttccaacaattcaaaattacttaattcttaatttttttaataagagttatcgtcaaatttttattttttatttttataatgtaaaagaccagagacctatattaaaaatacaaaaaacagactttttattatttatttaaaagaaaaacagtgtcttcttccattaaaattaacccgcgatatcgtgttagtgaagagggagagaggatccaaatccaagtacggttgggttggagagaaaatgcgtccctgctgaaaacaccaaaccctaaaacgcgaaaaggttctaaaatttgcgaaggaaagagctagcggagatggagattcactacagtaacagctatttcgagaggcgccccatcctcaagtccaaggctcccgctgttaaatgggtcaaagaatggtattcccaatttcttcacgctctcatatttgcatcttatgttttagggatttcaatatcgtggaaaattgtcttgtttgtaacgaggctcaatttatagtcatagttccattattttgttatgtttcaattactcatataagagtaataatacgaaaatattgtttacaaataattagaattcatgaacatgtttttattaaaaattaaagcagtacacatatatattggagttaaaatttttcctcgtgaatttgtaccattcaaacagagatttgctgttaattaataaattaaataactaaaaaagttaaggaataaaagacaaatcaatcagtaattcgcgtgcattagttttctttgttaagtgttagtttgttagtttttttgtcaggagcgatcaaatctgtgaccttttcctccttcccttctttcttaaccacccaaccaaccttatatctactctgttattgttaattactgtgcttatcgaattagctttgagaatctggttggtttttatgtttagatggaggagtatggaggggaaggagggggagagtcactttttcatttatactaaagctttcttagtaattgagttttttttttttaatgagtggaatgaaattgtaatcagggattatcatgggaccttgctaccattcttattatttttataaacgttttacaattttctcgatttaggaatgtgaatgaatggatataatgtgtttaaggttagtctttccatgttgctgttagatggagagatcaggttataatgttttagctggccatgtgcagtttccattcttttcatatttcattggttaagtgttatgctaatcatcagatgctgccagggttccccaagatcttgtgacgacgggagggaagtgcatgatcttaaaatgggtaacaggttggtcttttttactacccagcaagcttacatctttgctcattcctgccccatttggccattctttgtctgtttacatctgtgtattttattttatttttttaaaaattgattaatgctactgtttgttttagcttctataatgatacaaaacttggtagaaaataaggggaaacaagatttgagacagaatttaacatggtgtaacctaatgactaatatgcattgttgacatgagataatcagttgtttggctgttttttgctgaatttgggtgagaggtggtaacagtttgtacgtctggagagatagaagttatagtatcttttttaatacttaatactaattcaataaacaaattgttgtaaacatgcaaaaaattgatgtttaggtgctttgctaagagaccactgtatcatatgatgatgttattatatcatgttttgtatcttacatttctctttgttttactttcctaagaggataccttgaagaccttgaaagaaaaggtgaaagagccttcagtgccagagccagaacctgagccaactactgaagtactttttctttgcagctatgatggctgtggaaagacattcatagatgctggtgcattgaggaaacattctcacatccatggagagaggcagtatgtttgtcactacgatggatgtggaaaggtagtggttttaatacttacagatgcacaccatacacatgtattttatatatattatatactatatatttgccattgtattgccaagttgtgaaacaatagttttcattactgcatgctgcaaaagcagatcaaattacactttgttttaccagtctcttatccagtgattagcctaatagcctatagctttaatgaaacattgtgttgatccctctcaagcataaactctgtttttctttcatgccatgaaatagattttgcatgtgtttgcttttggattgaagattacatgtctatcatggggggcagggttaggtaaagtgatctaagaactgcatttatttgcagacttcaggtattggcatgttatgctgcatgattggagcataattaattaaaacaaatcattaaacctttttaattggtttatatttttttaattacactttatttatttatttaatgctatgtatcaagttgcaatagcttgctgtggactgtggtttactcaatagcaggtctatttagcagtgctgaaagtatttgtttacattgcagaaatttctggatagctcaaagttgaaaagacattttctcattcatacaggggagagggattttgtgtgtcctcatgaaggctgtggtaaggtgatgatttgatccaattaagggtttgttgttttctatgacggcttcctttccctagttggtgttgcatgttctgtgtgttgttctttatggtttacacatttggatttgtgacatagtcaaattagctgatgctttccatctatttcttcctatcacaaagaccaacatgaattcagtcttcaactgtccactctgaatctgttttggttggaatgtttttctcaatggaaatttggaattaccagagatattcaagcagcaaagcttgagttcttaattgtgagacctatgtgtacatagtctttaaattgttgatatagagggtaaccaatgaagttgtaaattttcaatttgaatcaatatagaccaaatgttttttatagttgagtatattgtgattttcataaatctgtcatgaactctctctctatacacacacacacacacacttttgatggataaattactttatgtatgatatcatcttcaattattatccactatttggtaagttattattagtcttttctttggagtttggataatgtctttatgagtgtatgtttgtaatcacatctgctgcaggccttctccctggatttcaacttaaggtctcacatgaaaacacattcccaagagaactatcatatctgcccatatccagattgtggaaagagatatgctcatgaatacaagctaaagaatcacattgcatctcatcatgaaaaggttggtaatgtttcctatttgtgtagctggtacattttccttatttttttaccactcagtgtattaatattatatgatgcatgttattatgtaaagcatacctgttgttttagtccatccatttggtgtttgtgcggtagtttcatttggtttgttagtatatctcaatacaaatatgtattatttctctcatgtatgtcgtgaatatctgtataaagatgtctctaattcaaactgatgaattactccagtggatgtgactccagaaactgtaaacatttcttgaacagtcttttgatttgcaatttcaaccttatcttacagaatgcatccgtggatgtgacaaagtacactactccaccttcagagaagcaaacaaaaacttctaaaccatctggaggggcatatggttctgcatcatctgaccgtccctatgcatgtccctatgatgggtgcgaaaaggcatacatccatgaatacaagcttagactccatttgaagagggagcacccggggcttatggctgatgaaaatgcagagcatgctcaggctaatgttgacaatgaaatggatgaagcaagtgaccatgatgcctatgttgcgaaacgatcaaatggtaaaattcagaagcagagtaagcctaaaccaaacctcaagttgcctccttccaaaattgcaaaacgcaaagtgtccactcccactttaactgtaaataaaaattcttggccgtgaaagatgaaccttttgatgaagaagatagcgaagaaacagaagaggatcgtgacaatgttgaagatggttggagatatgcaggaggaaacaatgaagatgatgatgaggaaacagaatatgaagactgaattagttatggcatcctctacggaacttaccttttccaagaaatatattttctcttcaacaaaaaaatttcagttgtctcttttttatttggctgaggaaatgacatcttgtcaactttgtgttggttgttacagccttaggaagaatttatataaataaaatgcgatgtaaaatgctcttggttcaattgtcatccgttgtcaccacaagattctgactgaattttgttgactttggataaaccttggtaggtggtctattcatcctgtcacagctatatacttcaaatattttatcattagtttgtttttaaatgtttaaaaggtcacaacatcaatcttttaatagattttaactttaaattagttaagtaaaattgtcattcattcttatttaagaccaaaagagcgatacaaatggataaattttaagatgtactgagcatgccgttcacgattctccttgccgaccatggcaccaagctccatcaccctttcgagcttagggtctgagtagttgtgtatccctagcaatgatcttaattttagactgaccattcaaggtaaagagaatacttaaatgtttttagactaattcaatgtttaatggtggaattgatattaataaaattgtaataatataatctcagattttaataggtcacacaccttgtgccaagtatgagttttaatgaaattagtgttgcttataggaaatcatatttttaatattaaaagtatacatagaagtctaaattataatatttacttttaagttttaataatatacaacaatattcattaataatgggttcatatttaaaataataagaaaataacataatttaagttgattttttatttgtgtaagaaaaaactaaaacaatattatattaaatgtttttcaaggacaattgaattgttggttttttctaggttagttttttggtataggattaatttcatttttttttctttttttcttttataattatcgaagtaatttatgtaaaaaataatgataatcttttcaaaaataatgaaaatgtataaaatgaatattattcttttattttatgatttcgtacattttgttctttaacttttatttttaagtttgaagtaaggcaaaatgtataatttaacttttagaaatcgataaacacattaaaggtgagatttaaatctttacgcattctttacttgacaccaccaaaatcgtgaagttcgttaagttatttgtatttttgatttattactacatttgttaattgaagttttaatcgactattgtgcaaatttaattttgatttaggataaataattattattttaattttaaagtaaaaataatataaatattataatattaaaataaataatgtagtataagtgatgtcacagcaaagaaacaaacagatgaaaagaaagagaaaaagttagtactatatgtttatatctattagtatatgacaaaatattaagagttaaaattataaatttatttattaaatgttttttattttattataaaaatttaagatttttttgttgatatatttacataactgtcgcattaacagtaacatttaataaataagaagatgtattatccaacaatggtaatcacatatactctacgggtttatttctctcctatgagattcttcattcaataaatgagagaatattcttgagtcctaccacagatcataataatgtaaataagatctcaaaacagatttttacccaaatctacggagcaagtttagtttggtgttgtgttgcactgttactgttgttttaaggtaggaagaaagaaagagcgggtgaggagtgaggaggaggaaacatggctacggcgtcggcgtcggcgtcgtgggaggaactgacgctgaaagtgaaatggagcggcaacgagtacaccgtccgcgtctgctgcgacgacaccgtggcgagctcaaacgtcgaatctgcgagctaaccaacgtcttaccccttcgccagaagctcttgtaccctaaaatcggttccaaactcaacgacgactctctcttcctctcccagcttcccctcaactcctctctcaagatgaccatgatcgggtacgccactacgctgtcgtttcgtttcacacacttttatttttagggttttctttcattacattgctcacgaataatgaatgaatgatttggcagtactacggaagaggacttgctcgtggatcccgttgagtcccctgagatcctgacgatttggagcttcccaaagatgaggctgttgacatcaaagatatggaagtcaacaagctgaaattgaatagacgcattcatcaattcaaggttcaagttgttctttttccgcattttcattttgtttctttctattgtaactaacaatacctatctacataatatcctacagattgagcttcaaaatccgtgtcgccaagggaagaaactgcttgttctggatattgattacactctcttcgatcaccgctccactgctgagaaccctcttcaactcatgagaccctgtaatttcatttccccctttcgttttcttcttttttcactcagtggatggagtttgcttaaaattacaaaaatgccatttttaatcactcaagttatcgaaccttggcaactttagtccttagttttgtaattttagaggctaaaaggttgttggtttggtaattttagtgattaaaatgacattcttcgaattttaggaactaaattgatcaatgcagatgatttcagggactaatttgattaatctatttttttactattattattgaacttaattgaaaggcattgatattataaatgtctttttacactgtcattcaatcacatgttgttatgtatggtaaatttgtttgccttttctaaaagttatctcaagaatgatttctaattggttgatagtacaagatttttcacactgacagttaaacttggtattgtttctttcctctctcttgtctgtaacagaccttcacgagtttcttactactgtttattcggagtatgacattatgatatggtctgcaaccaggtactgtcatcttactttatctgtattctgttctgtcaattttttattcttttgggacgataatttgtaatggaatcaatgctacattcacttcctgcagcatgaagtggattaaagtcaagatggaacaacttggggtgttggacaatcctaactacaaaatcaccgcacttcttgaccacatggcaatgatcacggttcagacttcttctcgtggggtctttgattgcaagcctcttggtttgatctgggctaagttccctgaggtataattatgaatattatgcaataaactaacatgccatttattttcttaatgaaagttaacggaattatgttggcatatttgctcaatcatacattaccatctacagcccaatgaatagtatacttcttatatggggagaaacgggacacccagaaaatactattgctgtaacttagtcttcctgaaaaactaaaaagatgttgatgcttgtgagtatagtcataagtgagataaacctaggtgggttatggagttattgattctagttaaataaaattgcaaaatgaaactatttgacattctaaattgctgtaatctatacctggttttcatttatttctgtattgttttcaattttttgcatcagttaaccatgcccttgatctagttgtcttgatgttggtttcttattctatttcagttctacaatgcttcaaatactatcatgtttgatgaccttagaagaaattttgtgatgaacccacagaatggtttgacaattaaaccattcaggaaggctcatgccaaccgagatagtgatcaggagcttgtgaaacttacccagtacttactagccattgcagagcttgatgacttgagcaaccttgatcataataattgggagttattcacagaggacaatgctaaaagacgtaggcacagataaatgataattgaatgcaataactgaatctggtaagcaagatgcaacttctagacttgtaaaagtttgcagttttataagagacattgttcagccagaggatttcagttttttatatcaagtatttatgtttggacggggtgaatgacagaaaggaaaggatttcttgtagcagcttttggagtatctaagatgattaatattgcttatgcaatttctatctagcaattcctgaacagaatttgatttgatgcatgaaaattttatcctttcataatttgttgggaaagggtataaagcatggataaattgcaaaatgatgattagttgtgtggcacctatggctgcaactattctccaaagtgatcaattgattctaattatagacaatgtattacatggaagttcaatcttctcctcgtgtttttcggcctatcatgtaattaacttatcattgttcttggattttatgcttcatgatctatattgtctttttttagtgatcatcttctaagtgggtaattattgtgtgaataactccatttggattaagtggggaaataagagagaaaatgatagggagaacataggtgaggtccaatttggttcgtcttaaagtgactgaagaaaaaagtgtatggttctgcttctgttcgttttaataactcaatgatttgttatggattctctaagcaaaagtatcggattagttaaaaaaaaataaaaattgttaagtcagatattgaattagaaatgtttggtaaaattagtctttgaattagttgattaattaaatataaagtgacataaaataagacgttatatatttttataaaacttactttttgtaaataaaatgtatgtttcagctaattatagttttatgtttcacttaatattgaacgtagtgatttttgtttgaagtatttattaaaaattaaaatgaatagtataataattaaaataaacactaaccatcaaccaactcacctattttacatattgatttttaaattctgattggaggtttaactcgacaccaccggtttagttcttgactacgtccttcacactttgcctttaattcgacactacccgcaagtaaaacggtgttcaatatataaacgtgaacatgaaccacaaacatgttgcccaaatagtgtgggctttattgtgggttggattcacaccgtgggcaacacgttaatataacaacatattagctcatcaaatgaaaagttaagttgctttgacttggaggaccttctaagatgcgatttaatataacaacatattagaacatcaaatgaaagttaagttgtttgacttgtaggacctacaaaatttaaaagcaataaataacctttaactagacttataagtgaaagagaacttgtagaaatcaatgacttaataatatcctaaatcaattttctcatgctaccaaacatgttgagaaaacataacttcattaaaatcacattacaaacattagcttaacattatccatacaaataagacacattcaaatggcccgagatatttgctatttgcactggaccaaattccacaatagtggagattaacaagagggggtatacagctacatattcactgaagaaacagtggggtgaaagcttgaaaatgttggttaccacctctggtaggtcaactgacagaaatagaataagatttcggtaatgaccaccaggtgcacattaaatggtaataataagtaaatagaaaacggaaagactaagagaaggctgaaatcagcaaagctggcaggcagagagagggcatatgatggaaatctctgcacaatcccatgcatgggaagggaaggaagcaattctatcgtgggtgtggcaacaccggttgaatgtagaagcagaacaaggctacagctactgcaaatctaaattctgagagcagggtcttgccctgaattggtgtccttgtgttttagagaaaggtttgcgaactgagattcgaggtctctactgtttgtgcgtctgtgacttccagatggttgctgttgtggctgtgtctgtggttgctgctgctgctgatacaatgcacgtaatcttccaatctctctttcagtacttcctgctccactgaatttcacattgcatagattttagtgtacaaaacatgttcctgtgatttctaatgaaaccaatcatgcttaaaaaaagaactcatgggcctaaagagaactcaggcaaggatttcagttcatgttttctcggagtaatattttcttggtctcctgcatggtgtccccccacctttttgggagccagacaaatccccactcactcatctgaatatttagtagcacggctcaggccacgtgtttccaggggaatatgaatcctgcaatgcaggaaaagtctgctacccacatgccacacggtattaggtggccaactgagccccacctcatttcttgaactcaaatgttaattcctaatttccatcactatcctatattgctagattcttctaatatagaaaggtacacaagaatggatttttccccatggttttgaagtccttgagctacagttttgaatttttcccaaattacttgaatacaacccttaaaagatcaaacctgcctttcttaatctcattacagtaattctcttgcaaccatgctctagcacatagaaaatagaacctgaactttctacttccttgccacttatatgatataatcaaacttagattaaccttatgtgttccttttctattaatttatactatataatatatcataaatcacaaggaattcactagctgaggtatctaaagcatatatacgcaatccaagttaaaaaaaacttgtgttacttgaaaatggccaaacttatatcatagaaacttacaatatttgataagctgctcttgtgctatattttctaaacgttgcttgagtgctttattctccatactcagaataagattctgctggttaagaaactcgagctcagccgagacttcagacccttctgcctatgttgacatagaaagaaatagaatcagcacttacataaaatgtcactctgcaaacatgcacgatattgccttgtgcagaaacctacctgtaaagcttgtacattcctttccagctcagctatgtattgaagtttccggacccgtgaacgttgagcaaattgcctgcattacaagtgtttcagaatttttttcctttccatatatgaattgattggttccaaaaaaaaaaaacttctgtaaattaaatagaaaacaaaaagagaaaaacacaccacattcatcatataataagaagcatggtttaactgctttctctacatgacaattagtataccagcaatagtgatgcagacatcactttgtaccacaaacaattgttatataacttatatcttttcccttctacgtatattattaagatgccatatggccacaggtagtatagtctagatttgatattataataatgtccagcctatttggtaaggcttaaaagggtcaataatggggatgacatgacttaatgggtttgccacaagaaaccattcagaacttgatcccccaagttagatattagtggcataaaatcaagcaatcactgtaataaccataaaatcaagcagagaaaataactacgtactgtttagcacgttttgtatcagtttcagaggcagatgactttgcatgtgaactgtcctttttttcaggaaatgattttgcatcctgtaagcctgattctactaaatcgtgcttttcacttgctgctggtggaagaccatctgcatcatgtggtgtacattgcaatcctgaactctgaaagcagcactgtctttgcctgagggaacaccaactggatttgtcatggcatttgaaaaagagtcccatgacctatttttctgttttacggagttcatttctgcataaacaggtacatgacgaacatctttgctgcggtcaaagtcttgagatgaccaagacggaatagacatcatattcttatatttatactcgtcctgattagcataattaatgttagatgcattaacagtgtctatgtacgcaaaagaatcacttgatgaacgccgatggccacctcttcggacaggtgtctctggctcgttaaggagatcatcaagccatgaaggctgctcctctataacaagctctcagatgaagtacgttggtggtgtgtgtttccatctctaggtctgttaccatcctttaaaccaacaggggatttgggacataatcagcatatgcttgggaaacactaggaagcggacttttaggaggaagtagaggatgctttccaggatacataaaatttctgaaacctgatgagccctttgaatttgccatagaagcagaatgaacaatacctgtcgaatttaaaattaccaaagaatgtgatcatgtgaataaatcaaaagataaagacaacatagaaaattttatatttaaacaaaaatccatgattcaacaataaagatctgatatgcatgtgttctcgattataaaatataaaccacaaatcagtaaaaagatcctataatgcgaatagcatagtatccttgaaaatgttccaaaaattgaaatttggtttatatgcaaatttactcacagcaccaaaagagtaaatgcgctagtatcagagaatccacatgtaatgtaaccaaggcagtttgggagagaaaaaaaagcatctcagtaatctcaataaccataaatgataaatctgcatacttcatcgagaaaaaagcctaagaactaaatatctcagatctccatgatactatatatttcattggataaaagttcacaacatattggcagctttacggatttatctctttcttttattagtccaaaatacaattctaaaaattgtccacccatctcacaaaaatctcaaattttcattttacatatacattattatcatttcagatagttgatcaacattgtcaatcctttcctcacggtacaggagcatcacatcagattgtccattacaatttcatcataagcaatgcacaactcgtatgaaatagtaccaagcacaatagcaatcccatcacacataaatgacataatattaaccaatgttttaagtaaaaccagcccataatgataaaaaaattaccagcttaattttcttcaataaaaaatcaaacccaaacacatgcatctaacaagcctggcatcgcaacagtaaactaccaatgtaacagaatactcaataacatcatttttttttaaaaaaaaggagaaacaaaacttcaaaattggaagccacaagaaactagctaggggaaagaaaatccaatccacaaagaaaaatttaaccacaataagttaaaaaataagaaaaataaaacgtagcacccaattgccaaactttctattttatactttcattttctcaggaccagatgaggggaaaaaaaacaaagatagaaacttcacttttctacctttcccaaagaatctgcccaaaacacgcactcagaaaacaagaggagaaaaggatcaacacagaatttgaaaacattgaaaacccgacacggtgcaatgtgcgacactgtggcatcaacagcgcaatgatttcaagctgatcgaacgaattgggaatgaaaattgaaacagattcgtttttcgcaagcaaacaaaaaattaagacaacaccaaaaggaaagaaagaagaagaaaaaaaaaacctttgcagattgaagattcgagatcccgaaatgcaatggtaaaggagcttgaaatcaaagcaaagactctctctctctctctctctctctctcttagggttcgtttcttcaacacctctctctctttctcttctctctgtcttcttgttgaagctgggaaatggggcttaattgtaaaaccatgataagtaaatactgttcctaaaacttttctatttaacgtttcaccctttaagtttcgttattccaaaaaaaacaaccttgggttagcaacttaaaaataatactcgttgttgtatctctgtccaacttgtctagagacatggcaaaatagaaccataaattcgttattatataaaaaaaatccataacatggaaagattccagtaatagattttggacattggactgaaaataaattcacttttccttagttgactcacactgggtcacccttgataccaaaattttaataatgttaatgattatgattagaactattgatttttaaaagctcatccaatatctaaatggcatatataaatgttgtttattaggaaaatgacacaagattttaatataacgttatcatataaaaatttataaaaatattaattatacatttttaacacactcttttgaatatattttattattacatgaaatttattaaaaataataattttatgatcacacatcttatttaattaattctctttcttaattaattatgttattttctataaacttaaatcaataatataatatgtgttaaaaatagtttattgctataattcttaaaataaattaagacttttatagccatgtagacgggtcgatgtaaaattcaaaatttatgatgttaaaaataattattataaaatttttaaaattattatatatgtttattgtgaataaatgaaaatataaaatatggttataatgttaatgtatattttttttatcgttttaaaatttagcagggaatactattttttttaaatatatttataaatttttaaatgattattatatttcaaatataatatcatgtggtaaggttttttagcattttgaattcactgtgaaatcaaaatggtgaactatattttaaaatgaaaataattattaagttcagatattaaataaaaaactttttgatatgtgagaataattattgtatgtcattacgaaagtttatatagtatatttatatgagttaacggaaaaattaacaatttattgtattttttacaaattcaaaaaaaaatttaattttttatctttaaaatctaattgccataactaacaaaatcaaatacgtaaaaataagtatttatcccatattataacattttccgaaaataaaaaggtatattcttttgttcgaatcaggtaggtgtgccgtatgcgcatgccaaaagtttcgatacaagtgtcatggctcaaatgtcttatttcttactattttaatagaaaaaaatgtatttttttagattaatttagttctaaattttcatcgcataaatgttgaggtgagacctgacatcctatttgaatgaaaatgtacatttaaactttttagctagaattttttcaattaatggctatgacagattcggtttaatttagaagaaaaaaaatcaaaacaaaaaatggaacaaagtaagtatggaaaaaattgatcgtatatacttattttatttttaacaatcatctaataaaaagtagaaatattttttgcaaagtaaatatagtagttgaagcaaaaagaattatcgtaggaaaaataatttcacctctaaattaattttaaattttgtttaagtcttactattatattattttatttcgtctcataattgtttaaaactcattgtttgattgctatgcatgcagcaagtgttatgttccatccattctagtttgtttttatcctttctaattgataaaaaataacattaataagtactcttaagatattaattaaaaattattattattttattaaaatacgtaaatatgttatatataattcttttacattttattataatttccgaattaaatatttttttcattaatcaatactctaagtacattaaaaaaaaaaaaaacctattttagttcatctctattactagttactagtaattaaaaaatgatatacttaaatcaatataactttttttcactaagatcattccagtttattaaattaatataatttggaaacttgcttttaagataaaaaaattaaatataaatagtttattccaaacataatttcaattacaatagattttataaaatgtatagttcaaaaataagtttaccaaaatttaacttaaaataaattttgatatttttagtaattatttaatataaatcaaatctatttataacacagataattaatatgaagtttaaaaaatatattttgtagcctgattagtttttagtttgagttttgaagtttttagaattaacaagtagttttttagctttagtttcaaaaaaatcttaaatcagtttttaaaatattattaattttaaaataaactcatttcaaaagtttcataaatattaaaattatttttaaaacattttgtatagtggttatgataatagtaatatcagcaacaactctgataatatagatacaatggtgattacgatgaaataacaatgacaatattatagatacaatggtgataacgatgaaaataacaataacatagtggtggtagtggtggtaatgttgatagtgacgccaaggataaaggtgatattagtagtaatggtggtgaagacaatgataataatgttggtggtgtcaatggtgatggttgtgacattgacaatgatgggatgattgtgatgataatgatagatgtgatattattggtagtggtgacaatgataataatattgatgataccaccgacaatgataataatactgacaaactaaaattcaaactcaaatattttttttattttgaaaatgaatgtataaatatttcaacaaaaataatctaaaaatcatttcagttatatgtccagcaaacacatttttttaaattacatttaaaaattaaaagccaaaaacttgtaaccaccacaaaactaacccataaaatattatgactacagagtatatgtattaacaatctaaagactctttatactataattcatattttacgttattatttattgtaaatttaaggttaaatatattttttgtttctttgtaatttttttttcgttttagtccttacataatatgttttttgttgtccttaaattattttaaataacatttttttagtgttcaatacatttttcttgctgttcaaaatgctaaaaaaaactaaattacaaagataaaaaatatatttaaaccataaatttattattttttacaataattacctttaaaattataactaccatgatttataattaaattaaaatattttttatgctgaaataaatattaaactcaattatttaacaagaaaattttgatccaactaatcgtaattgattttgatccaactaatcgtaattgatgaccaataatatagtggctgtctcgagacttcacattaaccgtgtccatctaatgtcatgacaaggaatataaacgtcacattaattacaaaataaatgttatttacaatttcttgacactttttcaaatattttttattggttgaaatttaataaaatttatcaattttttgaatcttgtttatcatttaaaagattatcttttatgatttaaatatgagatctacaaaaatttatagtttttttaaaaaatcagccaatcacacaataactatttgactcatgcataatttataaacatatttttaatctttataaaaatattaccgtattttgcttttagccacagatttggtttcacaaccaggttccaaacagatttagcataaacataatctcttagagatgagcattttaatctttattttgctggacttaggattgcatgtttttaattcagttccaggctccagcttttatattcagcaacagattttagctgatgtagtctcggttcttttgttgggcttttagttctttgggctcttagcccctttcatccaactaaaaaagaacaataaggataaaagtcgaagaaaacaaaatacaagcttctaaggttgttgaaataacttataaattaataaaaacaagttgacttattaagtctaagctagtcaaataaattataagttagtttatgtttatttgacatgtcagacatacttataatgtttttttttcatgccttaagcattttttttctttataatatacttatgtttttattttagttcttttaattttttttatattccatttaacttaattaatgtcttttgtttgcattagtccttatcattactcaattattatcaactgctgaggtgcagaaggccacttcatgacttccacacattaggacgtaataaagtgttattacttagtttcttttagtctctctaaatatgttttattttattttaatctttgtctctttaactctttccttcctcattttaatttctctaaattattattattattattattattattattattatacaaagataaaatcattaacttggtaaaaaaagtaatacatggaagcaaaatcaatacaataatttatttaattatatatgatagaatatatgaacgacatacaattgttaaacataaccaccaaagcaattaaacaattaagtgaataaaaaatcctcattctgaaaggttctttattaaaccattttagttatcaatttaaacattttcataatacaagtattcattatgaggtcccaattttgctatcccaatacacaacgtatactctaaaaacacacacatacagctcatttttttcttctttttgacagaacacacaacacgcttaatagcatggattttggaatctataatattaaatttaagacttcataaacaagtttggatgactaatgtcaaaatcagacacatatatagagatatataaattatatatttaaaataaactataatgaatttgtaaattataaatctaaaagaatataggacatcaaattggaaaataacaatgtccaattttaaaaccctaatctatccaaatcaacttaggtcaaacaaattaacagccaggtatcatgctcaccataatgttttatatatatatattattatatatattatatatattatatatcttttcattatcgatttatttttttaattttatttgtcgtctattgcaaaatttaagaagcattcatagtatagaatacaattcatttttttataccaaatataagttaaatatatatttatgtaaaatatatattagagattattgtaatgtttgtaaaaatctaatgcatactagaagtattgaaatttgagagacacacaaatacaacgactattctaccaaaagtaaaaaaaaaaaaaaaaaaaaaaaaaaacctcattagaattgagaagatccaattttcttgatagttgtcgatttgtctgcttacaaagatgtggttgactattcatataaatcaagcccccacaatgccattttttcttatgcaatttcatccgtcatgctcatatcaactgaataagccgaaatacacacggggacccataacaaaatggccaacacacacacgcatgcacgcgacaccataaagttggtaaattaaaaatgatggtgtgaatagtatcagctataaaacacatgatgctaaaagcaatgttggaacatcctatacatcaactattacaattatcgtaagaaattgagatagctgcttcataagccacttctccggtgaaacgtttgtgtctgttattcagatcactcgcggctgagattcaaattgccaattgtcacaacagccttgccttatgatcccagcaacttcttccatcttgcatatgctaaaataagcaagaaaagcaatacgcaagctgcagacgtgatccaaacgaagggccaaaataatccatcaatgtgatataaattacaaggaatgttcataccaaatgtaccagcaatcaaagtttcaatagcaatagcaaatgatgcaatagtcaacgtcaactgcagctgaataagttcatttcggtggttatcaagttggatgttgacatagtcttcagtgtcatcaatatactccctaacctgcaaatcagtcaaattctcacaatatttggcattccagaaacaataaccaaaatcagctgacatttcaacagcacaaatgctccctaaagcccaaatcttggtccatgaaacacagactaacttcctccccctcaacattaacaatatagacttcctaccattttgttataaacaagaaatgaaaatcaacagtaggttacaaccgtttgtttttaaatcaacagggcaggcaataatatattttgtaaatccagaattgcaacaaacttggacaaatctaccattaccattatcctatagggtgagcttaaattaatttattggagcttgggaattcttaaggataagctcccaatagtgtcacattgaaactagcaaacaattgagattccctccaccctcaagacaagagaaaagtaaaataatgcaatattatatctctggtaagtatcacaagtcacaactaagtttatgtggttgagtcacgtatgcaaatgaaacatatgaaatttatcatctaaaagcacaagtgtgtgatataaataagatagatgatagaatccaagtagaaaacgacagtttcatccttcaaaatttgacagactcatgatttgaccagaatatggttgttagaatacttacagataatattttgttacggttccatccaactgcatgaaatatgcatcaagcaacatctccaagtcctccacattgttataatcctcataatggctggtcacaagactttcacttctgttagaaccaagtcggcgaacaaacgtgaggtattaggaaagttatttgaggttgtggcacccaaatgagcctcctcaaattgttgattctgcaaccacttcctcgtcaaatatagttgtgccatatcttcgttgtcatctaacagatgttcaatttcatctcgcacctgtgaaagagggtcatacacttcttaagtatgatatctcaaagatgaggaatgcatcttcacatacaaggtaaaaccgcctgcaataaattttctatatataaaagagtgaacaaaaacctcaacttaagagcataataaatgattattgaacaatgtaacaaaagaaattaaacaattaaagagtttggcaagaaatagcctttcattctttattcaaagactgcagaaatggatgcagattgcagtccaattacatgttatttctctgaaaaatcctcaatcatcacaatgcacaataactaaaagaatctgttggcacttttattagcttgcacatttcatgggcttttaactggtggcttgaccagtccaacaaactatattaattaaacaaattggacttggtacatctattttcccaaaggttaatcctattctcaatttccaatttccaagtcatctataagtaatgaaataactatccacatcaacttagttatagcaacaatcagaggaagaaccacatggtacttatgcaaaaacataccttctgcactcgtgccagcaaccggtaagattactcttcaaactcctcacatgttcaagattcttggtgctaacattccgagccaattcatccaacacagggtaagcacctcgctcaaggtccgccacattcgagtccagataagtacacacagcctccaaagcaatctccagaacttgaaactcaaacggaagctctgactgcaaaccatcagcgcctctggcgtaggcaaccattgcctgccattagagacctgcatttcgccttcctgttcctccatgcgccgagaagtttaggttgacttttgcaggaagctgttgcctgagttgctcaacaaagggaagaacctcctgccgaagaggatcaagcaataacacttcttcagcagtcacgatcgcctttataaactccaaattaaccaccattgctttctctctagctgcaattttttatataaaaagacaattataattctattcttcattcttcattaaatcataataccatccaagaaaagaaaagaaaacacagaaccacagtcaagttaccaaaacaaacacaatttaagacatgtgattcaattcattagagaaacctaattttgagaacacgatgaaaatgaaaaaggaaaattgttgaagattgaaatactgttattattcagttacctattattttgtgagttgttattctgtttagattagaggaaagttgttattctgttacaaattattctgtttaggttgttattaatacttgttaaatacaccttttaagaggtagcagatatgaaggaaatgatgaatagttctctggattgagttttaatatggtatcagaagaaatttaatccaaagaactcaaatcccattttttttttttaatctgattcctttttttagccaacctgtaacttcttttccctctttgcacagtctccaatccctaatttccctaatttctccaccatggaaaaccctgatctcctgtccatcccacctccctaccaacttcttccctgttccacagtccaacatcatcatacagcaagacaactcttcctttcctgtcaccgtcatccttgatgatcaaactaccccctttggtctcaattaatggacaagcacataggtgcccgtaacaagtctgggtacctcactggtgcgatggccaaacctccgaccaatgatcctaattatgctacctggtcactgaaaacaaacgagtgaaaagctgactcatcgaatccatgagcccctctctcatgcagtggttcatccgccttgaatctgcaagcgaaatctgggatgcgctctccaacgttctacgacggatctgatgaaacttgtctgtttgaactcaaccaacactccttctccaccaaacagaatggttgtcctctctccacctattataatggcttctctccatctttcaggagattgatcaccgcatggcttcttttgcaaccaccgtcgatggcgtagccagacgcactcttccatggtcggctgcgtgtctacatttttctgagtggtttagactcagattttgaccaggtacgtggcgaaatccttcgtagagattacaaattggatcttgagagcaaatatgcatttgtccgtgcaacatcagcacccatcacaatgggacgccctgcttctacaacggattctctattttttatctcatactcctgtgcttcctctgcttctacaatggatattcttactcaaacataaaatgaagtcttctctgtttttcaaaatttcataatatggtccaaacccaatttcaaagttcaatccaaatccttcaatcagataatggacttgaatataattttttttttttttctgaattctggactctaaaggtatcaaacatcagacttcatgaacacacctagcaaaatgggttagctgagaggaaaaacaggcacttgtagaagtaacgaggcatctttatttgacatgaatgtgccttccaattactgggggagcagtcctttcagcagcttatttaataaatcgtactccctctagttctctaaattttcttactccacagcaaaaacttgaaactttcttttctatccctcatgtaatgaatcttgaacctagagtctttggttgtactgcctatgtccatgttcccaaaactctacgaaacaagcttgatccttgtgctaagaaatgcatctttgtcggatactctgaccttcaaaagggatatcgttgttttgatcctacaacccaaaaaatgcatgttgcccttgaagtatcctttagggaaactgaagtttttattcaaggggagtttcttcttctcagggggagatccagaacaatagagaagacgaattctggctatctacttctacagttcctactccaataccttccaccacaaatgatcagctcacaaacactaattctcctcaaaactcttcacctgaagtaacctgtgaacctccagaagcagatctcaacgatgcaagtcatcctttatcccatgagacaccatgcctaactgaatcacctattgtacataattctgaaatacattctgaacccagaactgagtcgattcctgtccctagtacagatcattcaatttgtgctgctcctaatagtattcaaatcaaaaatcagagagaccgaataaaggcaaacccaaaactgtttatgaaccagaccctaaagtgaaagtaaagtatcctattagtaattatgcgtcatctcataggctatctggatcatatgctctaacagttgatcaattatctactgtatatattcctaagagtgtgcagtttggaagatcctagaaggaagcaagcaatgaacattgagatggaagcacttcagcacaataaaacttggagattaacttctctaccgagtgggaagaagacaattggatgcaaatgggtatacaccgtgaagctaaaagcagatgggagtattgatagatacaaagcaagcttgtagcaaagggatacacacaaaggtatgaagtagactatcaagacacgtttgctccagtggctaaacttaatacaatcagaatcctaatatccattgctgcaaatagagattgccattgaaacagtttgatgtaaagaacggttttttgaatggtgatttagaagagaagtctacatggaggttccacctggagtgaagctaactccttcaacggagaatgtagtttgcaaactggaaaaggctctctatggccttaaacaatcacccagggcatggtttggaaggctctctttagcaatgaagaagtttggttaaaagcaaagcaactcgaatcataccatgttcataaagcataacaaagggaaggtaacaatactcattgtttatgtagatgatatggtgctaacaggggatgatatagaaggaatgaaattacttgagaagaaattagctgctgaatttgaaatgaaggatctgggtcctctaaatattttcttgggatagaaagtgcaagatctgaacagggtatatttctaaaggaaatacattttagattttctgtccgagactggattgatggcttgcaagcctgctgatacccgatggaagtgaatcattctttgggtatttatccggatcaggttgaggtagataaaagcagatatcaaaggttggtaggaaaattaatttatttatcacatactagacctgatatcacatattctgtaagcattgtaagtagattcatgcactctccgatgaagagatatgaaggcagtgtatcatattttgagatatctcaaaggttctatggaaagtcttaaaataatatagcgtgcattgaaggaacacagactcagacttggtaaaaaaaaaaaaaaaaaaaaaaaaaaaaaaaaaaaaaaaaaaaaaaaaaaaaaaaaaaaaaaaaaaaaaaaaaaaaaaaaaaaaaaaaaaaacaaacagttggtggatgattttcagatttcccatgttcggtcccaggagcaacttgctgatgtattaacaaaagctgtctcagaaaaagtgtttgaggcatgattgatattcatgaacgagtggagtgttgaagattgaaatactgttatattcagttaactattattttgtgagttgttattctgtttagattagaggaaagttgttattctgttacaaattattctgtttaggttgttattaatattgtataaatacaccttttaagaggtagcagatatgaaggaaatgaatgaatagttctctggattgagttttaacaaaaataaaggggaaaattataataccgaggatgttggaggagtgggagaagacggggcccaagattctcaagtctctagcgggaatcgctgcgtggcggatgatggcgttcttctccaactcacaagttctgaccggcccgatcggtcaaacctcatccacaagcgggcgccgccggtcttcttcttcgccttcgtcaaggcgcagctgccggcggcggcggcgataggacggttgttgttgtcgtcgggtgaggttgcgattccggccgcgtagggaggctgcggcggagacggaggaggaggcggggcggcgttcttcttgggtcggcggcgagaggtggagcggcggaagaagggaccctttcccattgtgattgagaataataattggtaaacaaaattattattgttgttaaatgattaaattgaataataataataataataataatagaagagtgaagattgttgttgttcttcttctccttcaccttcaccttctctgctttgatcctccataaaggagacgacactccttctctgccgcacactccctatttgtttttatgtttgggacggctttaattattgacccaccgaccaaagcaaatccaaagtcaatgggtgtggaaataaaaaagtttgttattacttattagtaactgcatctccatcactcgattatcgttatttgtatttttttatacattagaaaacaaccatttttatattaaatttcttaaaaaacttatcgtttaatatcactttttatttattatattttacagatattttattttgttatattaaattttaaatattttcttttattcttttatatttttgaaatatatcattttttatttttattttttactaattacattaaacaatttcaaatttaaaagttaacataataataatttttttaaggaaaattgaaaaagaatcaaaatgatatatttaaaaaaaataaagatcataattaaacttttaaaacttaatatacaaaaataaaataattatgaaacatatgaattaaaagtgactttaaacataaagttattattacatgtatgattatttattaatttataatatttatcttaaaaataatattaataatgatttatctttgatacaaaaaaattgtatgatgacaaaacaaaataattgtttttttattatctatcctcagaattttggtcttggtaattatttttaatattttaaaataaaataaaaatatagcaaagagagaataggttcattacataaaaaattggaatatttttcataaataattgagtgtgagaaccaaatgaatagaaatataagaaatctagacattttgaaataaatgaaaaagagtctatttctattaaataatttattagataattgaaaacagaaaatgtcgagaattattcgcaactaagaataattacaataaaaaatcattataatactacatctatgttagtattttagtgccacgtctgtattttaattaaatattaaactaataaatgaattaaagttatacattaaaatggtggatggactaaatttataataaaaaaataaattttaaaaataacaataataaaaagactaaaaatgttttaacaaaaatttaaaaatatattatgagtattatttttctttaggagaattaatctttatgactgtcacaaataataattctttaggagaattagattttatgactgtcacaaataataattgtttgtcatgtcatcttggtcacactcactaatgaaattaataaataagaactgtaaagttatattttctaagagttcaagaattaattcattagtttaaaagcatagaaattaagatattttttgactaaaaatatacaagaactaaaaacacaaattttcttagtttaaataggatagtttttttcttcgagaaaaataggattgttttttacatttacgggacacaaatttatttttgaacaactttttctaccttaagaaatttctcaagttttctttaatattttcaaagttttcacttactttaatgggttgttaaactccttaatcaatcttagacaattaatctccgacgtttctattttcttcttttatctttctttaaagtcttgatcacatttttagttgaattgacatgtagtaatttcaaatatgcaatatgcttttagttcacaatctgattaagattttagtcaagaaaaggaattactcgatttgaccattatatgacatgcgtggtgatgtagaactgtggtgtaattatgggttaaaaagggatcaaagttccaaaaggaatgtcagagttttagtattaaaatctaacgtcctaagaaatttatatagagttcaaataaaaaaataacttaaaaatatatccttctagtattaattaaatacctcaatcatcattttattgttactgttgttatataaaatgatcaactaaaaatcaacatagctactgatagaaaaacttttggtacgaatccttacgtattaacgtcatagtattttttggatacatattaagaataaaagaaatcaagaaatttgaaataaatcttgcaaaatccttttgttgagtttgtgtgtaaagatttaatcatttattgacgcatttcacatttccctcttgttgaactacgttctatttttaaaattaagtaaatttaaacctatctattattcttccacctttttttgatacattctattttacttccacctaaaacacctactatctaggaatttacaaatgattaaacatttaataattaaaatttagtagaaacatgagaaaacttgaaaaaaatttattgtaaaattaggattaaagaaggagaattgagttatttattttaagtaaaacttgttgaatttaggaaaaatcaaacaatttaattgatttaaatattttaaataaaaaatataataagggtttaaataaaatgaacagaccaactttgcttaattttaaaaagtgaaaaactttatttgacttgaaaaaccttaaagaaacaaaaccatagataatccaaactaaaggaaccaaatataaaaattaactcaaatttatttaagagaaaaatgttagcaacacactcctcttataagataattccttggttaaaagaaacatgttgaaaaattttcattcatgtaaaataacattgaattctgaacattagataggaatcgcgaccaagatttaaatcctaacttaacagcttcaaattcttcaaattgaatgaagatcatatctaggttacagtataggggacagaaatacaagaaccgcatgttatgcataatcaatgatgtcatgtatgcagcaagaatatcttaagttcccaactctttttccattactcatgttgatcccgtatattaaaaagccaccaaagtagcaactaaattaaaattaattgccacacgtgaaaggaaaatccatgatccaaaaaatacatttcatgcatcaactgaatctactactctgcttacccttggcattatatatgcgcatatgctaacacattataaatgttactctcaatgcaccagccaaccaagtacatcaaaagcagactcaattaggaaattagagcactcatgcagaatgtgaccacatcatctatattttccaagctccatcttaattcctcttgattgttctctgaccataatgtatctattattcccgcaatggtaaatataactgtgcaggaaggttggaatccatttctaatcagttgcgtgagacaaaaacttacatgtccttaatgtacagacaagtcgattatgaatagcaaaagcactcgatacatctagttcatactagctacaaatttaaattatactactttcatttagagcttaattttgatacattgtcagtctaaagatttttatatgacaattagggatagatattaattatacccagactctatgggtacccgctcaatggaatggatcaaggtctgggtatttacagcaaaatttaatgggatggatgcaggaacgagtactattagtctagtacccagttcatcccacacccgcatatatatatatatatatatatatatatatatatatatatatatattaaaagagatctatgcactcactatcaaatacagaaatttacatacaaaaggtaattttaagtctataaattggctttaccatcattaccaattttttgagctgcaattcttagcagctatatcagtaggcgaatattctaagacttcctttggttaatcaggtggttagtgcatccggaagtgaatttggtgatccaagaattttgccaccaacatcaggaaaggattcataatcatcaagtgcactgacttttccatccctgctgatcttaactggatattgcatcaagtgtcccctcatccgattctcttcctcagacacatatatgtcccagtttcgtttggcaattttattgacatgtctgacacattccaggttatgaggttcagcaaaacaatgatcaagactaccaaggtgctcagcccacagtgacattctgtatccatacacctacaccaacacaatctttgagggaattgccaattactgagaaaagaaaagatgaaattacataaccaagatctattcacagatctgagtttatgctacgagtccactagtatgagagggtgtcatcaattatgcttacaatgatttattctgataaaatagtatacatgatttatccaaaagatataaactatttaatggtgggttggctctataacactttgggctgatacaaagattggaacctcaagattatactttcacacacacataaatatttagttaattaactttttttggtagtgtctaattatttcgtgtgtttgcaatatgtgctatatatatatatatatatatatatatacatacttttatcttagattaatatgctcaattcctatctagtacaactattctagctcattaacaaacgtagctggagcttcaaacctggccacgtggatgagcattcttttctgtccatgtatattttggttgataggcacccatagctatttctgtgtcccttgaaccatctaaggatctctggttaatatttgctgatccaataattacgtattcgtcatcaactaccattcctttggcatggacataaatcataaaacgtctgaattttttaactgatacctgattatagaaagggaaaaaataacaataagatcataaactatcaccacataaatagaaaaagtctgcaaatggatcttgatgcaccaactgattacttctcaaatgtaaatatgtaatggccattatataatgctgacacttatataatttattcaaaactaagtaaatattcatttggtagataatccatgatcatttggcactaggcatatatttcattgacaaaactaatacaaacttatggaatatctgtgtgaaatgttgaaaatgataaaatcagaaggaaatattttcttttatttcatactttttgaagttgtattttccgtccaaggaatttgatccagaagaccaataaacattttataaatttaacttaattatgtttaagttaacttttatactaataagtgacacagatatagatatgaaggccgggactttaatctccaccaacttcattcctgctagacgagaaggagccaccttgctcattactcatcacacatgtatgaaacttgctttggccaacataaaaagcatttataagtgttctgtatgtttccagaacacaaatgtataacaccgaagtgctatgtggttgctgtttgatcactctaactctggagttcaagggagtcaatggagaatgacaccttgaaacagaagatcacagagatacaccaatggaagtggggtgtgtgctctgtgtaattgaaagagatagagtcagagtgtgtgtgtacctttcaccaacgagcaagctatatttatagatgaaatacctaactgttggctaactgcattgtgcgcgagtggcttcctatatttccggcctccacctgcacgttcataactacctgagtggactgagtcttggtccacgtacgttgaatctcaataacgcatcgtaactaattgggccttaacataggcccaattatgactccagaacagttgccccccagcccggttgcggagtacactcggtagccggggtgctttctttgacgtcacggttgttgggttgacagtctctccgaccacgattacctgccttgttatagattacggatacgattctccgaccacgtttatccgggttcaccctatccagacattttgtgggcgaccctatgtaattgtcctattcagtcaacatccgaggtcggaatcatatacctgttgaagaaaaagatatgttgccgaccctattccttaggaggatcgtgtccggattttcggcgtaaagcatagtcgacctacatttcatccggatagccgtcctcggacgaaatgcccccagatatctatcccttgggttttgaaaagctgttgggcttccaccctggcgtcggttactgttctttataattaaaggtaatgaatgcatttaatgcacctgtctcttcactgacctggtgatgattgttatggacgtgattttaccataataccctggtgtcgtttcagtttggcaactgagccgtttcttttcttctggcggttactgaaaactgccctcactttttcaaatttgattttcaaaactgcccattcgtgtctactactccatcgcttgtcatttctgcttatttctttttctgtcacttcctcttttcctctcattatcctctcgagtgtttccttgcgccttctgcaaaatcttccttcgtttttcaaacatcttcaacttcttcgttatcaacaggttagtatcttcttctcttctttttctgcattgtttgttgttttggcattgttgtgtttctgtcgatatcatcatttcttaggatttctccacagtttctttctggctattctttagttcttgagtttttcttcacaccttttgggtttctgggtttcgtctttcttctctggtttacttcattctgtgattattcgtttttgagatactatgaaattcacccctgaagaagaggcgaatatacgcaggaaatttgggccgcgttccgcttggctgctatatggccttccgcttccggcgggggaaaacccaaatgaccccctgcgccgccatactggcggttccttttcttccaaaaagcaagggaccaccgcctctctcggtggtccatctccttcatttctctcactacatccgggtcctgtagaccctaacccggaacttccagggccaatagtgtccggtcccatctcctctaggactacgtcttctttgggcccttcttttcttgggcccaatgttgacattggtaacccccaaaatctctctttagtcatttctagtcgtaatcccaatcctccggctagcccttctcctcgttccgggtacgaatcgtcctcggatggagtgataactattgagtatgaggcctgcatgaactgtgtgtccgaggccgttaactttatccaactggggtccgacgacattgcagattcaatccttggaatgtgtcgtcataaccctgttttgcgtcctgctttcaaaggctcgcaatctgggcggcccgctcatgctgtcgtcggcggggtttcggcctcggtttctcgtgattttaatgagttgtctccaggtacgttttactaacttactttcttacttcattttcgtaggtataatgggtgttactcccgacacagtggacgaatctgcttcagtcgagtctcagtccgaggtccccccagcgttagcgtctaggttcccctgggtcacccatgagattcttcgaacctcctccgcccttggtcttcatagtatactgtcgaccccagtggggaggcaggacaggtttgtcctgcaggctcccctacccggcgagccactttgtgctcaacgggagggtaacgatcctaatttcttcttcttttttcaagatgtagtaacccaaataggtattatcttccctttttcttcttttgaaattgaagttttgaaccaccttcgggtagctccttcccagctccatccgaatagttggggttttatccgttgttttgagttattctgctcggatttgaaaatcccgtgcacagtccccctcttcttttattactattctcctcatacccctaggacgggtagggagccttctaaccggaagggatggatttccttccgtagtcagagtaaaaggaaactctttgagcctttttcggattcgttccggggcttcaaagacaagtatttcaaagttgctgcgtcgccccattgtcaacccttcttcctgtccgggcctgagtcttctgatgtggagtgggtctttcctttgtactggtcacaagaccattataaacatgatcactccaattatcgttttatcgaggaggaactgtccgactcggacgcctcctctgtcttcgtaatttctgaatttgtgggtgcttatggtcagcccaagacttctgactacatcggcagcggacgtcaaactggtctgctttggtaattgtattttcttggttcacacttgaaatttatgctaatcttgtaaatttttctgattgtagccggcatgggatcccgacctcccccaaagtccaaaaccgacgcggcccacctttccaagccgactgaggccaggggcaagggcaagaggcccgccaatgacaaccttggcggcgcgcccaagaaacggggtggtccttcttataggacattctttgatggcggccccccagttttgtcgttggatgcgccgtcgactgcacagcctgcccctgcacggcctgccccttccccgacattgaatccggtcacagtgatcgatactgtggaccttactgtggccggagatcggtcgcgtactactcctccttccgactccgagcagctccgggcgcgggatcgttcggataacttgtggaaaaaaggggttactgaagcattggtccgtttgaccaagcccccttcttatatgaccaacccgggtgccccagtgggggaagagctggacgagatggtcaaaattgaggagtacgcgtaccgcagcgcctctctggcccgggctcttacttcggtccgggaaaagtaagtgttctttcaataattttttatctctatttgctcaataaatatgcttctaagtgttgtcgtcgcagatatggggtggctttggaggaaaaggagaaggctttggaggagaaagataaggctttggaggagaaggataaggccttaggggaaaaggacaaggcctgcacggcgcttgtttcccttgaggctcaactcacttctctccaaacgcaatcggcggcggaggccaagctgttgaaggaggagctgctcaaatctcaagccgactcggcctcgttgcgggtagagttggctcgatcactgagttcccttgaagctgcggaccagaaggtggccatgctgacctcaaatttggattctgtcaaggctgataaagaagcctgtgttcagaattatgagggtcagttggctgctatgaaggcgagccttcgtgatgctgccgaggagggtttcagcaacgcccttgaacagattaattttttgaaccccagggtagctatgactactgccgggatgcatttcttggcatatgtcgaagacgggcagcttatccctcctcctgcatccgaagagcctttggcggctacaacagaagttgtgtcgacagaagagcctactcctgccgatgctactgcttctaccgacgccgcccacctgtatccggccccgtttctgattcccaacccccgcaaaactgaaggaccagaatgccggttttatcttgtatttttctcttgaatgggcccggtgcccggaacaatgattttaaattctttgttgggctcggtgcccggaacaattagtaaatttgtatataaattgttcaagttcttcacttgattcgtaaaatatcttgcgcgcgcatctttttggttccaatgaccatttgttatatttgcatgtattgtatgtcgttcacgttatccgaccataaacaactttgctaacgaatctgttgtccggcctgatcagggccgtttagcatatcatttatagtcgttatcataccatgaaaccgtatagaatggctcaatacttatggtattcaaaaattcttgcatttatatccgttgttacaataacaatatgtgtgtccgagtaggatcaacactttaggattacaacgatataacttattcaacaaaatgaaaattttgctcaggaaatgtcttcgtcgcgaaagaggaccatatgggctcggatagacctatccggaatccataccctcgatcacgagatcgtcctgttcgacttcctgatgaatagggaccatacgagttcgggtgttacttttcccgaatccatacccctattaaccagtaggtcgacagtttaactgtaatattgcttcaacttgttcgcattccatgttcgtttgaccggcttaccttgtagtgtttctaacacgtacgctcctttatctaactttttagcaacccggtatggaccctcccagttaggtgctagttttccatcccgggcattcttgtttccgacgtcggcacgtcgtactactaagtcggttttttcgaactcacgtgggacgacctttttgttgtacttatacgccatttgctgttttacctttaactcctgggcatgtgctgctagccggacttcctcgatgattgtcgactccagagctaagacttcgttgtttgtttcctctccggatagcaatgcttgttttcgtcgccatgactgttgtccgacctcgactgggatcatagcttcgtttccgtatgtcattcggaatggtgtctccccggttgatgactggacagaagtccggatcccccataggacatagtataattgttccacccaagtcgatccggcctcatacatccgcttccatagggcctccagaattgttttgtttgcggcctctgcttgtccgttggattgaggatgctctactgatgcgaaccggtgtcggatgtggaaattagccatcatctcttggaatcctttgtctatgaattgggtcccgttgtcggtgattacttctccgggaattccaaaacgagaaattatatttctttcgaagaatttttgtacccgggccgacgtgatggtgtttgacggggccgcttcgatccatttagtaaagtagtccacggtgactattagccacctcatctgtccctcagccggcttgaatggacccaggagatccatgccccacttataaaatggccatggggccgagatggattgcaattcttctggcggggataataaccttggcgcatgcatttggcagctttcacaggacctcacatgttttgtggcgtctgcgctcattgtcggccaaaaatagccagcccgaagtgcctttcttgtcagtgcccggctccccatatgctgtccgttgattccttcatgaatctcggataggatatagtcgacttggtttggggccacacataccaacaaagggctatgcaaccccttcctgtataattctccatcgaccatcgtgtacatggccgacattcgtgtcaggcgtcgggcttctaaatcgtcgtctggcaaattcccctttccagaaaatttactattgggcgtcgccaatcctggtcggtggtaatcatcattacgcacgtcggttgcatcgtttgctgttgaattactgttcggttgttcccgggttttttggtgctcgccagctttgataggatatctgcccgggtattctcttctcgaggaatgtgattcactgtaatgtcgtcgaactcggacatcaattcatttactcggctcaggtatttggccaacaaaggccctttcacttggtatcgtccttcgatttgtgccgcgactagctgtgaatccgtgtaaacctttacgctcttggctccctgttccttggcttgcaccagtccggcgatcaaggcttcgtattcggcttgattgttcgatgttgggaagcctagttgtaatgaaatttcagttgctacccctccgagttctcgattataatcccggctccactccctttcttgttggaagacccgtccacaaacaaggtccaccactcgtcgggcattgggttgtgaggggtgagttctcggacgaagtccgccaacgcttgggacttaatcgcgtggcgggcctcgaatttcaaatcgaactcggacaactggacggcccagttggtcagcctccctgccaaatccggcttgtgtagcacctgtcggattggctgatctgtccgtatgacgattgtgtggctctgaaagtatgggcgtagctttttggcagcgacgatcaaggtgaaaactagcttctccaacttttgatatcttaattcggagtcgcgcaatgctcggctcacgaagtataccggcttctgcgtggactctacttctcttactaaggctgcacttacggcttcttcgcctaccgacaaatacatgatcagtacttctcccatttccggccttgatagtaccgggggtgacgctagtgactgcttcatgttagtgaaggaggcttcgcattccgggttccattctatggcggcctgtttctttagcatcttgaaaaatggcagtgctttttctgctgactttggcataaatcgggtgagagcggctattcgacccgtcagttgctggacttccttcttgctcgtcgggaattgcatgtccaacacggcgcggcacttatccgggttggcttctattccccggtgtgttagcatgaaccccaaaaattttccggccccgactccaaaagtacattttaacggattgagccgtatactgaaccttcgtagccgaccaaaggtttcttcgagatcttcgacgtgtctgttagcatctgtcgacttgacgatcatgtcgtctatgtagacttcaatatttcgtccgagctgtggttcgaaaactgtgttcatcatcctttggtacgtggcccctgcgttcttgaggccgaatggcatgacgttatagcagtaattagccctatcgccgatgaatgccgttttctcttggtcgtccgggtgcatagggatttggttgtatccggagaacgcatccataaatgacaatactttgtacccggatgagttgtcgaccagttggtcgatatttggcatggggtaggcgtccttcgggcacatcttgttcaaatcggtgtagtcggtgcacactctccatttttcgttcggctttcgcaccattacaacgttcgacaaccaagtggtatattgaacttcgcgtatgaaacctgcttgcagcagttcgtcgatatgagcccgcaaagcctgtgctctctccggccccagtttgcgttttttctgttccaccggcttcgaccccggatacatggctaatctgtggctacagaaagcagggtcgacgccgggtatctctgacgccttccacgcgaatatgtcgatatttttcttcagacaacggatcagcctgtccctttgctcaggttctaatgcccccccaatgttggtcacctgaccggctgaggctccgattacgatctgttcgactttcttcacgggttttggtctccattcatctggggcttctcgcatatccagctccacgacgttaacggaacgtattaggttggaaatgttgttgtcggtgtctttctcacttttacgaaccgtgtcgtaataacactgtcgcgactctttctggtcgccacatatagttactactcgtctgttgttacccacgaacttgagtttctgatgtttagtggacattaggatgtcccatttatggatagtcggtctccccaatatcatgttgtattgggatgggaaatctgccacgacgaactccacttcttcggacttgtaagattctctcgttcctagggttaatcgtagacggatggatcccatcacatttgtgttgccgccgttgaaaccgatcagcatcgtcttgcagggctttaagtcttttacatccaacttcatcttccggaacgcagtcaacatgataatatcggcggagctcccattgtctacgtacattcttcttaccctgcaatttcccaccgttgccgatatgaccagcccgtcttcatgtccgggtaccactccctccatgtcctgttcggtaaaatacaagagaggaggttctggcttttcgacccgggctttgaatctgggttgtgcctggaccgacaatacctctttcaagtactttttcctttgggtggaagtgtcgccgccaccacccatacctcccgagatcacgttacactcgaactcgggctccgggaactcgtcattgtcttcccggggtttctttccttcgtcttttcgttgactttcttctcctttgcgtttattctttcttccttgtgttcggatgacgtactgctttagccttccttcccggatgaacttctcgatcgcatcccgcaggtcccagcattggtcagtagtgtgcccgggtccgttatggaactcacagaattgtgacttatccaatccggccttgttgaaaacggggcgaagacgttccactttcttcatttctgtaaatgcaacttccttccaaatttgtgaccgggacacgttcagtggagtatacttctcgtatttgttttcatatcttgctggtcgggattttggttcattattccgagttcgattctcggaataccctctattctttgggggcggactcctcttatcatgacgttcttttccacgtccagggttattgacgacttccatctgttctagctccaaatatttcttcgcgcgagcacgaaactccatcaacgacttcaccgggtccttatatatggacttggcaaatcttgatgaaccatcgagtccggctgatattagatacacgtggactctctcctccaacccctcaacttgcagagctgcttctttaaacctatccaaatagctttgcaaggtttctccgggtagctgtctgactttgcccagagtgaactcggacttcggctgctttttgctggtcgcaaaatttaacaggaacttctgtccgaaatcttcaaaatttttgatcgacctaggcggtagggtatgaaaccacgtctgcgccgggcccgtcaaggtcgtgacgaaaattcttgatattatgggctcgtcaatcccccggacacacatttgcaaatcgaactcgtcgatgtgcacttgcgggtcctgtgttccgtcgtattttgataggaaagatccatcaaaatcgtccagatatcgggccttcacaatgtcgtccacaaaaggactgttattttgatgcccccgactatacttccgacggtatatggggcccgtcttctgacagaaattttgttcgcccttcttatcgtgtccgtcatctcgcggaatcttctcattacttacccgtcgactaggattgtcgtcggggatctgtcctacgtcgacctcgtcacgtagctcgtctcgactccgattcggttcgtcattcctcctttgatctcccgggtcggcgtcgcgtcgatgagttatctgagttctcaaatcttgtggctgctccatccgcctttgaacctccgagtctgtattccttctttgattcaggtgcgtcctcaaatcctccgtctcgccctcaggatttgagagttgcacccggtcagctatcattcgcagctgttgctccaattgcgccgttcgttgcatctcggcacgtctccattcttcattatgttcttcaatttggcgagtaatgtttcggatgtcgtcttgtctttgtaaattctgccgtttctccatgttctcaattcgggttaggattgaattgaggacattgctaactaactgtcctccgagctcaccctcctggcctatcctccgtgctataggagtcttctgttggtctgtctgggcgggagaggaagcttcgtcggaaacagcctcggtcacgtgtacttcttctctccgcgccacattctggttctccggtaggtaaatctccctgttcggcatctccaaatgcggtacggaatgactgtttcttgtgttaaccattgttgaaaggtgtgagactcgaaatttaacgttccccacagacggcgccaatgttctgtatgtttccagaacacaaatgtataacaccgaagtgctatgtggttgctgtttgatcactctaactctggagttcaagggagtcaatggagaatgacaccttgaagcagaagatcacagagatacaccaatggaagtggggtgtgtgctctgtgtaattgaaagagatagagtcagagtgtgtgtgtacctttcaccaacgagcaagccatatttatagatgaaatacctaaccgttggctaactgcattgtgcgcgagtggcttcctatatttcctgcctccacctgcacgttcataactacctgagtggactgagtcttggtccacgtatgttgaatctcaataacgcatcgtaactaattgggccttaacataggcccaattatgactccagaacaataagtaagaatctcacatttataagtgcagcacttaacctcccagacatgtgatttccaggacttgttaatccatcaagattaggtgctttgaattcaaacttcgactatgttgtaatttctatttagtgctttgtccaatcataggtgggtaatgaatgggtaagacagaccacccattattgaatcatgcactatggggagattttaatacttacatgtagccagacatgagacaccatgaccactgtaatgcttacaattgattagtttgaattcgctcaagagaaaaccctagggatactcatagctccattcactaatacacaatccaattacaaattagggatatactcaatccttgggattggttgaatgaaaatacagactatataatgtgaatgaacacactttttcaacaatatactttcaatattttctttttctttttttaatcctataattaccaatacaaatctttttcattcatttcaaaatattattagtatacttttatttttatttacatgttcgatccttttaattaataaatatatttttgataatgcaccaaacattaagccaaaaaattataaacagaagagacaggcaatggtgcgtccaaagcgatcccaatccattacatccaaatcatcctccaatctgaaccagcgtcgccacctccgtcatcgagccaccgacggactccgaccgcgccatcgccttcgtctactactccccctccgcgccgtctgcttcacctacgacgattgtcacgtcgttcgatccatcctccgcagcttcttcgtcaccaacgacgagcacgaccgtgaagagctgcagcacatcctcggctgccggatgaagcaacaacgcaaccaaacgcacaggatctaagtttatttgttcagatctgagtttctttgcacgcacattgccatttgaacttcaaccgctcatactttcgcaaccttcgtgactctgttttgtgttcattgttgttcttgtgttcatagctgttggtgggtatagggggttagggttgcgagcggaattggtgaaggtggctgtggtgcgtgcccgcgacggtggtaaggggtcaggatggttgttggtgtttaggaaaggaaaaaggttagagattacgatttttttttttttaaataaaataaagatagtgatgattaaaaattattactgtattaaaataattatttaaaatttaaaatactaatgaaattaaatgttttaaatgaaaaactgaaaaaagtattaaaatgatatatttcaaaaatataaaagataaaaatgaatttttaaatttaatggatcattaagtctatttttgagttgtacccttttagataatttcttatgctgtaataactataaattataagttgttgcaggattttctgcattatgatcctaagccttagtacacaaggtaaagcaggcacaacctattgtcgaagttgttatcaatttgtagaattcaaatgttgctataactattctgatgaatgatgaaggcattattgtgacaagaattaaattcttgtgttttcataatgagcacgtcaagaattctaagtgctgttcaataagtatttcaaactgcatgcaatgcctaatttggatatggaaacacaagtgtagttaagtttagcataccaaagcccggttttcagatgtatttggtgttggtgaaatatttgtggattgtggttctctctttccaaggcagtaaaaattgagataatcttgtggatgatactgataagagagacctgctttttcaagggcatcagctacaatctggtacatcatagacattgtctgtccctatagtcatccaaatttcaaatacatgggttgtgataagtacacttcaatcatatttgttatgccaaagaataaacgaaaaacgcagagataaaaagaaaagaatacatatattattgtggttcagctaatgagacctacatcacagacaatgagtctcaaacattgaaacaatgaacatccctatttttactctaacttgcaagtcgataaatccatttacattctaaggaagtacataaaaaactggcctcataattcaggacaactcgttaacaaaattccaggcctctcaacgatattcataaatttgtgtcacttatgttatgtacatctattaaatattggaatatcaaaccccagattcatccttccccttatggtttgtgagttcattttcttcaaccaattgaaggcgaaggaaaaaaataagtctatgccaatatataaattgaacgaaaaaatgatttaggatggcagtagaacagtttgaaggaatttttttttgttgtttttttttttttggtacatagtagaattttaatgacaataagtctgttgcatttgacaagtttgcagtgattgtggattatcattaaccacattgcactcgtttccctcaaaaaaaatccattaccaggtaataatatataagtttgtggaagaaacacgttctaccaaactgacttcctaatttagacagactcacatgaaaagtactgaaaatgttcatctgcaaattttaacaagggaatatacagaatagaaattggtctgacctgccagaacaatatttcttgaacagcagcacttgttggaacaccctctggccacattggtataactatatatacacaaaaacgttcatttgcaccaatcttaccggcaattttcaaagccaactccatgggaaccaatggtttgcacctgttaagataagaaataaaaaccttacacttgcagtgtatttgtaaaaactacagcaatgtgtatctcacaaattgacttaatattcaaatgctactgaaacttaggatcaggagagtgatatagttcccttaaatgttagcaagaaatatgaatttgtataatgtatgcaggcatttgaaaacaatattacaaaaagagaaaaaataaagcaataataagcccttcaaggtgcacaccatatttacctaataaactctaagataagaaatctaacatggaaatgaatgcaaggttgcagacttatgtctttatctcctccttttatctcgcacatgaaccatagactttattgacttttactgaaaaaaacaagtgtatccttctttcaattttcaacttcctctcttaacatccaaaactccctctaatgccaagtctttatcttggatagtgacacttaacaggattaatatgcaaatgatttgttgtatattcatgcacctcccactaacctgtcatggttattccttcatagatacacaattatatgttctgggtctgagacatatatataggtacattacctaaacgccagaattttgattttgtaacaacgcaaaaactagcaaatgccttataaagttgaagatactgaaaaattaagtttatctacctgcattgtttttatatgaaggccaatgataggaggagcccaaaaaatactgattctcaatatatacaaagtgctcagcggatcttattgctctcacataagcagtatggatgctttgatctactttcaaattttttccacaaaaaagattctgaaacaaattaatattaaaagttaaggactaatttatctcaatataacttgaaaccacaccccaatgtgaaggtaatgaaaataacaagaactcatagtataaaggggcatcacgtataactttgttctcacctgagccttagctttgtcaacatccttaggaaatcccttcacggatcctgaatctatggacctaaatatctgtattaaatgtaaattctagttcaaatctttacttgattttatcaggggcacgtgtacatcacagttctatcaacatatttccatacctgcacattccaactctcggatcattttcatcggttacatgaacagatttatcgccgttggaacaaggagaaggtttgacaatccatgaaatccggtctagccttagcaaagcatcatcatgccaatttgtcacctttttgagcctgaagtcgcgccattttttggccttcctccatctttgttcaaaattggtcaatatatcatatgcgctggaccttcaattttgcaatgtaagtcatgccatggctgccttggtgcacacgaatttgaatgtaactgtttcatatagcacacaatttcagcaaattcccttatgttatttttttctcctttatttggtgctgatgtgtgcatttgttttccttctcactttcacccataaaaccgtgaatatcaaaccatagcatatactatgtgtatataaacattgacataattgattttataatgacatatgaacactctcataaggcaaaatcaccatataaggcaacattgaagaccaacagataatctagcaaatgaagtttatcaaaattaacagacaaagaagaagatttgggaaaactcaagcaaaatcagaaataaaaatttggttttgtttagagcacagcatcattctttaatctatttaccaagcccaccccagtgtaaggctctcgcttcttgttgtcattattgttgacaaaaatcagaacacagaaaaagccagaagttggtattagtatctttattccactgtatgcacataaagatatgttttataaaattccctagtagtataataaaagagaaggcatgctatattcttgtgaattcttcaatgtttacaataaacacttacttgaaatgtaggattatgaaaatcattatgaaacactgtatctagatcacgaaaaagccgatgctcaggtgtatcatatctaccatcacatagatccaaaccaccaatgaaagctgttattttccgattattcccagaacctagactgtctacaagaacacatttctggtgatgcgtaaagagggttcccacaacctggaccagatgattcaatcaaattagtattgttttaagttatagctaaagtacacaacgtgacctcattatatctatgactactactaaatgcaagtcttccagggaagaaataatgacattgatggtgacatgaaatagctagtatctttatccaacacaattctaaactcaaatgcaagaactccgtgcctgttgcttgaaaatactgagcttattgcttgcatagcgtggagatagcacacaatgaacagtagaatgtttgaaaaacttcttagtttcttcatcatgagtctgcatgacaccatcctgcaatcaagaaaatcaaatattataatgtacattaatattaaatcttagtgaacaggagtaagtacaaagtttttatgcaaccatatctacattacaataatccatgaaggaaatatctgctaaaacttatattttaggaatcttgaaagcctagcatctcattactgaatgttaatggtgcatatacaagatagtctaagcaaatccaccccataaagaagatacatcaccactatcttttacttcagaacccacccaattttatgctaaataggacttttactttgtattactttatggtatgaaagtaatataatgaatttatttggaaagcagtgcaataattaggacaaataaaaaactaacttccctagaatttgatgaggaatcaatgacatcatgtttatttttctgattagggtaatgagaattactgttttcaaaagaaacttgtcatgtgaagttctgtcatcccaaatcagcataaccactcggagcccttcttgtgacttgtacttcaacagctctccaagtgaaagctctcccccagaaggcaatggttttgttgcctctctcacaagcctcactgggtggtaaactgaccatcctataatgtatatcaggtgatgagcttccaaaattgcatggcatatgtcctcccaacatttattatgctgaaacacttttccaccctcaagtcgaatttcaggtagcataccatcaggtaaatgtgcatcttgatatagagtcacactccctcctttcctgagagggaaatatgttttaggaactcctaatgcttttccatccccactactaatactttctgaacggttcactccaatttgcctatactgaacagaaatatgcaattcaggataaggttttaagcagtttccatactgaccaatgataggaaaccaatcattaacagtatttcctgcaattatcttctgaacaggtatctccaccactccaatgagttcagccccaagaatatcattgtccttcacaaggaactcagtttttgagcagggtgagcaacaggcacaataaattgctcatcccacaaagggttctcacagttagcaatcactctagtctgagcaatggtagccccagcaatgcatacagaaacataagggtcactagttatcatcttgtcttttccagagtgtgtctttagtccttttataaatggagggtggcacatgttgcccatagtgatgcattttctaactgtttccgtggataaatctaaatttggaagagacttggcttctattatcaacagatccaagtcaccatgtaagaaaaccggtccattaaggccttcatgctccctgtttggaaagctttgggaaataccaccatgacaatccatttcaacctgagaactcaaaaaagatgcatgttttctaaattagaacactttgttttcaggtgctaaaatccaaattctagatgcaaaaagcattatggaaaatggtttaaaaatatataacatgcatgttgatcaccttatgatcctttcagttatttcacatcatcatcttttggttgtaaggaaaccatgcctcttcaacaaattctcagaggtcagatctttacaaagagaggagagaagccaatgataagaaataaaagtaaaaaaagggaaaaaaaagaaaagaaagaaatttgtgtgtatatggattcatgtaacaatgttgcagttcaagcatggtccaacaccacgtccacaagaagcaggagaagtttttaggccgaaaatggtggcaaatctcgtggaattagaagtttggaacccatctctctcttggtttttcatttcctgaattggcatattccaaacgaaatccatgcatggagacaaaatgataaacaaatatataaagaaagagattggtgaggtggaagctgatggagagaccgagagattggagacattttgcatggaaccaaggaacttcgtgctctcttctagttacccctctctctccgatacacgtggaaatgtttaataaaaggaaaaaagattaatctatttttaacatcatgacatttttcacatttatgttttttctccttaaactttataaggacacttaacattttcaattttcttccattatatttttagtaatttttatctattttattattattttaataattatcacatttattaacttattttttctttccatctctctcttactcttccattcaatctcttttattttgaccatcataattttcagtctttttcctatgttttgattttaaatccttaattttttttgtctttgctctcaagtaacaacaatttaaatgatgacttaacaagacgttgataatttattaacttgtcatgttatgacaaatagtcatacaagtttattttaaaaaaaatgtgtttgtatgtcctcatatattcaaaattgtggacaaattttatatcataactaaattaactattttttttataaagagtatgaattacttgaaagagtattgtatgacaaaagaaataataatatggtgagaagatgtgaattaattgaaaatatatattaacattgttcctatcacttctcttgttaataattatcagatatggttcacccatattttgttcaattactatcaaaacctatacacaaaacattacaattgggctagtcatgttacttgccaattgttagggattttcttactttaccatttgaatctcaaatgcaccattcaaattttgtctaatttcaacattgtccttttgtacttcttcttccttcctttcgttttccatttcttcttacaccattcagtttctcttcttattttgctgacctcctccttccattggctcttggaggtttgttagttacattgttgtggtggtttgtacatgttgcattcacttcgtcgtggtggtggtgggtgttgcggtgcaacatcagagtaagtttttacatttgcaaaatattagatacatgtcatacattgaatatgtatgggtcatacagattgtcaatctgtataggttcaaacaaaaaaaaattatagttaatgaatttgtattatattaacacttaaattttcaaatataattatatcatttggataaacaatttaattaaagacttattgaatagtactcatgaaaataatttaaattaattgtttcatataagttgtaagatcttttcaaaagctattatagagaatttattgaaataaatttaacatagcttaacatattataatctattttcataaaaactttcagatatttacacaagtgtttgtcaaaaaataagttcaaataaattcttttaaacagactttaaataagagatttgaaagtacaactatgtgatcttatcaaagatacaactataatttcatattaatcttttagttttgttggtacatgataattattagttccattaattaaagattatgatctaggaaaaaaatctcaagaaggaaaaagactaaatactaaagacaattatcttgccacatgcttaataaataattttcctttgctatttttgatgcaattttagagcgagagaataatatttaattaatgatagaaaaagttttcaaattgaaaaaatatctattaaatattttaagaaattaacctaaaactcgtcaaatatcaaactgtattttactatgctcgattaattatttaacttaaacttttttttactacatttaataaatactagtatgttttattttcaatttaagagtattttcttgaagttgtgggttgatttgaagtattagactaatagtgggcaaatttttagattatgattagaatgagaggattgcatcaggctttaggcaaaggttagtggtgatgaggaagaagccctcaacatcgaaggctacaacatcgacacgtaactgttgtgagaatattagcatgtggatcatgctgccaagagcctcacaatccagttacggaagattaggtgttattcataggtttttcaggcggccctaagatacatcagtgttgacatcatatgttgatcatgtagcagctaaagtgtggacatggaggtagttatttctttaattataacatttaatttttttgtcattttaatttacctaattaattataattatttgcagaacatattgacttgaagttggcctctcatgggaggaaggttgagaaattaggaagacctgcacctaaattgaagatttagtggttggttcgagcttaagttcttattacatgttcattggagacaagagaagagacttttgtctgcttttgcgaagagatgacacaaggaaactaatattttcatctgcccatagaagagatgagtattacctcgatgatgtgcatcgttgttacatctgccattataagtgcttccatatctatgatgcaatagatgtagagcaggttgtagattgttagttgagttgctaggagtgactacacaagaagcataagatgagaccatcaatgtagatgagacagagcagactgtggagttgttagttgagttgcttggagttgttacttctacccattatatgtgccttccataccaaatgacatgcattgttaattttatgcatccggttgttccaaaatatatcacatacatcttcatccttcatctatgccaatgaatatatatatcgagttcatgtacttcattaattgttacatttagtattactgtctcttatagaagaagatatgcatatcttgcattgtagaattgcttcattgctgtacaattgttggcattgtggtccttcaaagttaaagaatattttttgttttgaccatcgactttgtcatatcaccaacaataatcttttcatcctcattaatcgaccaacatatagatgtcactcaatgacttagtcaatgcatgattatgagtacacatattaagttgatcatccaccttcacctcccaggattggtttcgctcacagcttgacaaccacatttttagtgctagtcatcgtctgtactaaatctatcatgtatgctctatatttttcactcctctcacaatcaattaaaacaaatgaggtctttcctctctttccagttgatgtgtcggacctcattatcacaaccacaaaacaatatcatacgcaacaatacgaacccattgcaatatgtcatcatgggtagggaacacctacaaaaggacaatacatgtttcgtcttgttaggacatttatttacttactttaactaaatagaaaatcatatcaatacttgagacattagaacaatcaatattgtcaaccacaacagttcctctcccctatcttcattcatattaatttcttcatacataatgttctcatatatcactcatctttgttcatcttaacaaaacattaaaaaaaaaaaattcaatgacaaattaagaaaactaatgaaattcgatactatagcccatacggattgacatataataattgatacttgtatatacatataaaataatttatctcttaataaaatatatccattgttattacttttaattaattctaattattttaaaaaaatccatatattttaaaaacttcaatgtagaaatttattttaaaatcttttacacttgagaaaaaatatcaatgaacaatgaaagatactaatgtaacatgtatgtagatatatcaataaatatatttttaagatatagtatgacacaattttattatttttttggtacatcaaattttttagtttatacatacaatttgttttttttttgttactagaaaaaatataaaataaactattcaaatgtatataatatagtaatatattatattgaaatttataaaaggcggtggcgtacacacacacaccaacacacacacatatatataatgatttatatctaaatttccatatttcattattattttaaatatattataaataactattttatacttttatatatttaaaaatcaatataaaaatttattttaaattttctagacttgaaaatactatttatataaatatttaatgttattatgtaatatatttatacaatatataaataaataaaattttcttatacaatatgacctatttttgtatttaactatttttttaaattcattataatttttttaatttttataatgcttataatattggtaatctgtatagtctttacatattgacaaccatatggactttatggattgtcaattgtatggacaatacgaattagtagtatttcacatatgtaaaaagctatgccgtcgttgtcattgcaacacccccatgacaatgacgatgaagtcaatggaacaagtaacaaaccaccacaagccaacacaaggaggatgtcagcaaagtaagaagaaatgaatggtgtaaaaagaaatggaaaacgaaaggaaggaagaagtaaaataaaaaatattgaaattaaacaaaatttgaataatatatttgagattcctggtgcatgaagaaaattccgatcgccaaaattaaaattaaactcttattccaccccgaccattaaagaggaaagaaaaagataagaaaaactattgtgcataaacagtaagaaaagcatcatcaaactaatgaattaaggtgcaacaatttcacttgttatcgcaaatatgacaaagtaataaactcacacttcatgatttcagctagctaactagccaatgccaaatcactataacaaaataaaaattgaacatatagatagaattagaatagcaatggataagattacatcatatatatattgatcattcgatctctccctccttgtgtgtctcaatgacaacgtctgacctaggttgagcaacacaggtgagaacccagccactttctatttggtcatcatcaaggaagctaccatctgactgatccacgttaccttccacaattttgccaacacaggaaacgcaagaaccagacctgcacgagtagggaaggtcaatgccttcgtcctctgccttgtcaacaatgtaaacatcatctgggcattcaaactccactggtccttctggggttatgagcttcaccttgtacgaggccatgcaagtgacacgaccacctcgtccacttttcagaccaaaaagagattcaccaacgttggggaatgtctttaggcttgtggtggtcataggttgcctcctcatgaaggaggtgctcaccatggttccggatagagctgctgtggtggccattgaatgcacaatgaaatgaaaaacactggaatatgctatgcacttggtttgtgttttgtgacaacttattaagggtgtgggcttgtggaaatagtgtgcttgcaacacataacaaggtgaagttgcatccaaccctatctgccacgtggcagcattgtatgcatgggtttattatctcctttatcaccacgcaaatagtggttggcacaaccctcgtatcattaatgttcaaatggaacaagttttttgtatggttctgacttaaacaagttttagccattggatgcaagaggtctatctacttgaatggttttcaaaactccacttcagtaacaggtagggaattacgtacatatgagagccacaaagttcagaaagcaactcatagttgtcacagcagcaacaagatcgaaccattgttaattttataataataaactaaacggtaaagacactacaaacattatttatcatttaaaagttaaggaagcagataagaatgatattcagatgttcatacaaaattcatttccgagacttcatcccctctttacatatattgaatagttgaaacccatgttgggaattagacatcagtccttcaagggacccctattttataaggggatgaaacagtaaccacaagagttgaatattgtactacttatctaaaattatgaagataatcaattacagccggggaaagaatctcagggcttccccaatatagaaaaataatacatcctcattctcaaaaaccctgtggattctacctgtaaacattgttaggttccctacacatgaccagaggcttcctccaaaaatttattgtcttcagcaacaaacctatggaagtgctcaggtctgactcagaaaaccttaatcgcacttgatatttctgtagatcctcctcacgaacaaatttgaacctagaaaacccacagctcctgcacatttaaagataaattataacccaagtggggcttaatcagcactagatacgatatccaatcacataagcagggtgaaaatctaaatcaaattgaagaagacttaccacatagaattcctagtccaagagaaaacattaaagtgtatccaaaataaaagctggtctggaagaagcctgacatcttcgtcttcacatagaagtagtatattgagtacaaatacacataaacagctgttgaggcagctgaaaagaaagaagtccattgccagtggtagttctcagcatttaacaaaaagtatgtccccacaattgtcacacaaacggtaacgatgataagaatcagaaagactagcagcataaagccatacacatagtacacctgtatgccacaaagaaagaaaaaatatataagccaatgtgaaggttcacccagcttccactaaaatttacacatttttttacttaaaaagaccagtttctagtattattttccttgataatgctctgctcttttgacatgcgaataacttttataaccaaaccaataagtaaaaaagaaactttatcacagaaacaagtcatagtagtgccgtgattcaccttgtaattccagaaggaagtgaatacaaaatacatttcaatgaatatgctgccaaagggtagcagtcctcccatcagagaaaccacagagggtgtaaggtaccacttcttttcaggaatgggacgaggaatagtctttacgcgacagggattattcagagcaccactccagtttcttccaacaactgtgccaagaagtgctagagggaaggagatgaaagcccaaatgacaaaaacaaccaccattgtgccaaatggaattgctgctagagacccatagaatatagcgattgtgttcaatataaatccaattccaaagcacatgaatgggaacagagaagctgtaaggatcatggatttaatccagtgtttacctaacaaacagataaaaattagttacataatcattgaaaaccaaaaagagaagaccgagacaaagccacccaaacacacttggagcaatatacagaaaattaaagaagattcttacccccatttcgggagtacatccccccactcacataaccagaaatgaaagatgtgagagcataacacacaataaagtagtgacaatggctcctcgcctgagacaagcaacgaaggaaacttacatgataatcaatgaaagagaaaggagcaaacaacagaaagtattccaactagtatgaagtagaaatagccaactgtgcaagcactgccacatgcttattacatctagtaacattagtacacaactaggttccaatgaattcattattcaaacttatgcttaagtcagttgaaggttatgcacatacccaacatacaacatcccaacaatagccaacaagacgacaagaagaaccagcaacgcaagctgagcacctgtgccaacaacagctgaaagaataactaagttgcgaggaggccgaaaaacatcaccatgcacaagtttccagccagattcttcactaacatctctctcctgtaagcatggaagaaatgaccaaatatttgacaattagaaccacaatgctttctctaggaagaacggattcatattccacaaataattaagataaaagtcacgaaaccatcaccagactttccaaatcatcatcttcccgagcatactttgcatagtcatttctcagagttcgcatcaatatcattgacaccaaaccagtaaggaagatgaccatcatgaaagagttaaaaatggagaaccaatgaatctagggaaaaagaaaacaaaggagcaaaactctcagtgacagagctatggtaggaccaacatggatgaatacatagcaattcacaaaaccataaacaacaccatttcaattttaaaagcaaagctgtacctgatgctcaaagaaaggatgtccaggtagacatcaaagcgacgcccgaaagtgatattggtagaatcccatttgacagaatatgtcatgtccaaatgttttcctacttccaaaggctttgggatatcctgagtgagattaacatgaataatctgcaaggaaacagaccttaatatgaaacttaaaggatccataacatgtcataagatagcataagatatttaagtaacttctaacctgatcatggttgtatttaacaataatgtttttgtgtgtataaatgacatgcttgccattatcactgttcttatcaggatgtaactctccaacatatccttaaaatgaaaaaagaagtgtcttagataaatcactaacatgttaagtacaaaatcatattaaataaagagaaaggagaagaggcagttctggacataccccacaaaggtagatcatctgaacttgtgtttagtgcatcacatagcagaccaaaagaaataagaacagatgctagtaagtaattcagttaaaaaagaaagagaattcaataattattaaattatttaattaaaaacatacaaggaagatcatcctttggaaaaaatcctcacaacattatgacaatcaagacaaataatatcgatgattaattaacactaagttattgaaaatacttaagaaattacttcacacagagttcttaatttaatactttcagttgtaatagtgactatattatagaaattaacactcactaaagtattctagaatgcttatgaaaaactataagggcttacttggtagacaagataaaatataagaataggataggctaagaccataataagcttatatactattcaatgtttgatgtgcaccaaataatctattatatgatatttatgctaccctttgctatgtttgaggtgaattagaaatgataaaaatataaatgtaaatgacaatattaccctttgcaagatactaatatataatttatatatatggcatatatttaaaaatacatatatatatatatatataatattataatataatttttacaataatttttatatagaataagcataagatattttggaaatttccatatactttaggtgttttctggttgcttctgctatacattttgatgttgtgtttattttattcttcatgttaccgtactgaccaaagaaataattttctgcaagcttccaacatttcttgaaagtacaatcattctacaagttgtcaattgtcatagtaataagtgaaacacacaaagcaaaacatacccatgaagaattcaaaccagtaattattctctattgcatccttgaactgtttcacctttgcttcatcgagatctatctggcaaaagacagtcttatccacatttcctgaaaaacaatagcatccattaaagccagtttgccaaccgactgctcttctatgaaatacatagtacgacagaaaccttcatactttggaacttaatttcaagttggctatcgatgagctcattgccacccaggacctcaccaagaccaccccatttgtgtgcagcacttgcactactagatggatgacaaaatgggaggctgtaatagttgtatgtttcttgtggattgttataaggaccaactttgttcacccaaaggttaactggttcatcatgttgatactgcaatttttttttttttacaaaataaaatatataatgcagtacaataactaatacatacaaaaaaaaacatcttaaaaaacagaagcgttcaccatttgatactacaaatgaaatatacatatttaatctgtttcaccagctcagtggggaaaaattccaggataacaaatatagtataggggtggggataagcgtcacaactgactattatagaaagaaaaaaaagaaaaaaaaaaaaaaaaagaaaaagagaagaacaacatatactaagttattgacatgattaacaatttgatttcgttcactgaatgataatcaattatataatctatgatagtcttctgggagaaatattaagacaccacacattggcaaagcttaaaactctatattttaaaccttctggcaaacatgtaatgggtgtccacatcaattggattcaaatttatgttagaaaataaaatccagaatctttgtctaggaagccagttgtattcagagaaccagataacaatgttattagagtaaaaaacatgcaactcataagatgatgcgctgatcttaatattacttaagtactctaaatcaaactgatccaccattaaaaacttcttatgttagggtagaatttgatttacaacctgcccagagaatcctacatattacatacattcaattatttacaatcaattttttttcatcagaaccgttccagttctaaaaagaatccatcagacagcagatatgactagcaactgttaaatttgttttaaaaactttgaatcttaaaaatggggtacacaaatagggctataattctccacatcaatcttcacaatactgaaaatagtacagatagataacaaaaacctatatagcttccatgtgacatcacaattataaccaaagacttctaaacaacaccaaaatttcttttctgttctgtccaatttcagccaaccctcttttcacacatctcttaatggatccttctatggattcaatgacaatggatgcacacaacaacaacaaactaggtaccaaagcctaatcacaatgtaagctcttcccacttcccacgtcactagtcacaatacagcctctcggtatttcaaatcccctccaaaactagctcagcattaattattataaccttaaaaaaaaaaaaacagatgatccaagatcatgaactagtaaaaggggacaaagaagtcaaattgaatctaattagcagagaaaagccaaacaatgaacagcaaacacccacattgcaaagacacctaggtgagcacaagccaaaaacccagttgagatctaacactaggaaaacacaaccattacattacaatcttaaaaccggaagaaaaaaaaaatccgaagctaagagattgaaattgagtgcaagtaagagctaaaaacgcacgcggtaggcagatccaaatcccaatgcagcaaagagagtgtagatcgaatcgaaagaagggaaagggttttgggaatgaggaattaccttgtgatctgactctgaagcgaaggcgggagaaaggaagagagagaaaaggagcgggaagaggagggatcgggattcgaagaacatggcagtgatgaactagaagagagaaagagaaagaagagacaacagaacaacgcaacaacagaggaagcacgaacggactataatggtaatttacgttgtcgacgacgaaagagaaaataaggttacgttacgactacactgaaatgaaatgaataatgacgatgagtgcaaattttttcatttcattacggtttttggggtaatacggtgaaaccgtgttctgtgactttgacggtgaagttaatcttgggctatttggtttccaatctatagtccagtacgtgagttacattatggcccatgtattcagtattcacaccccctcccccaccaccaccctttttttgtctttccactcctcactttttttctattgtgaatttttcattccaccccattcttcacatttccctcactctctaagcaccctatcaagtctcaaccccacctccttatcttcttcaagcatattctcactttctcttctacaaacacttctcttccttgttcctcattctcttcttcatgtgaggtttcgctaccttgtacttcttcaacaacgttccctttcttaaatttttttacgtgtaattgatttgataaaaactagtttcgttaaatatcttgacaaacggagattaatttcaatcaaggatatttttgtaagaaaaaggttggggtgtaaagattaaaaataagaggtgccaatgacattcacccaaattgtatgtttgggggaaggaaagtgatctctacctttacaggaggggaaagttttttcattttatgtttgttggctattaaaaaaatttagataatttttttaggaatcaaaagagttatgtatattttaattattttaccatattatataatttgtaaaaaataacatgatatttctatcatagtaataaaaattaaacttgaaaaaaacaagattctcgtcttccctaatggattttttttttgagtaacttgttaaaaatatttatgagaaacatcattttctatgaatgttagtcaaaataataaaaacatgagaaactaagtttcccaacctattgttcttagaggatgtttgataaggaagaattttttcatacccaagaaatatgattcatataaatgtaaaatgcctgaaaattaatattaatataaaatatgtaactaaaattttttctccacttgaaaaattggattcttagccccccccccccccccctcccctcctctttaagaatgtttttgcaagaatgagaatgagatgtaaaattgattttcaagaattgtgacaaacttttattaattgtatatcaaacatgaaaaacataatttatactttaagattatgaaaatttttaagaaattcactaccaaacggcctaggaaaacaacatctctagaaatactacaagggtattattcaaatgttataaagtttgtatcaatgaaaaatctaaaattaattgacttaaagtcttgtatcatgtctcgatggaaaaataaataaaaaagacactaataatagtttttgcatcgagtataatttaagtgttaaatattttattatagagaggggagagagaaggaaaagagggaaggagaagtatagagaggagagatgagtgagaggagagaaaaaggcacgtgaggagttaaaataggagataggtaaagaaaatgagcataaaaaattcaaattattatattttgcatgagaattaagatgttataattttaagtaatcaaaatattttaacaaattattagaatttgaaatatttttaaggatctcattagtatgcacgtcaatcaaatataaaatcttatatctttaaaaaaaagtttaagttttattttaattactttaaaaatcacaattatcataaaattttaattgaatgataatataatttttttacacttataccataatgtataacaattaaactcacattttaaatatactatccaaataatatatcttaacaccacaaattctaaattttcacataaattgaattactcacttcaattaatcttatctaaacacagctgattaaaaaaaatctatctaaacacaccaagtatttatagtaaaatttgattagagaatcaataattaagatcgtaactaaatattttatttttatcacaattcttaatttatgattttttatcaaataattacaaatgcctttatcataactttatctttagtttattagatttatctaaaaaatcttcgaatttagattattattcaattgattttcccattatatcttgagtttgaaacaacttcatcactattaatatatatatttgcaccgttttttaataatttagctttataactttgtctcaatttaaaaaatctcacatcttcaataaagttatattttattatccgttttcctctattaagatacgtgattatatcactattatctaataataacgataacatttctatctcttaactttttatttatattcacactttggaagatttatattgaaaagtatctctctaattaatgcgcgcttttcttcccgcaactgatcatttaacagtttggctatttatctatatacatatatcgattagagtttgattgatcagtgatttgtgctagtgcctagttagtagttattggctgatcaagtgtggtgtttgaagtttgaagaagaaacagagaggaaggtgtgtgtgaacatggagaagtaagaggtagtgaatcaggacataggggttgggagatacgcggtcgtacggcttatgcgtcacaaagaaaccaaagatctcattgccgtcaaatacatctgccgggaagacaaggtacgttgctacttatgtaaacacctgtattttgttttccaaatgatttgatggtggaaagggaaatcataaaccctaggagacgaattttttttattattattaataatattattattattatatctcttttaattgtcactaatatttattagaacttactgatatttttaatgaaaattttcctttttaattatattttttttcatccacaatatttgaatctgagactttgtttaagaaattatttatttatttctcaaatatgggttagaaaattttatactcacgtttattagttggtaataaataattattgtttgatatatttagtgttcttaaaatcggtccgtctcgacagtttggatcgaaaattaatggcctaatcggatcgattttcttattgaataaattgtgtagttgacttaggatgactcggtcaaacccgaccaagaaggttaccgaatctcaattggaccggtttaatcctgtcaattttataacttttttattttttaaaaattaattttttttaaaatttggattattatcaattgttattttggattttagaatatagatagacttttcttactcaaataatgttagttatatatttataatatatatatatatataattttaaatttttaatatataccgagataaaatgagtcaaatcaggttaattaatgacccaccgattagatcactggttttctatctggatcaatgactgtatcgggtttcacaactatgagtatattattcatttttaaaatatttaaaataatattttcatgttatatttttttaaaaaaatctcaaaattaaagaaataatatgtgaaataaaatgtgacttagatctcttgcttttaaaaaatacaaacacccattcactttaataaacattgtttttaaagcaaatttaacacttttttgcatattattgagaaggtggcaagggaaatcgtaaaccttagatctcttcgtcatccgaatattgttcggttcaagtaggtatgatctgtttttactctccctctcttctttcaaagtatttgtttggcttctattattataaaatatgagttttaggttaattttcataaaagttaataaatttatcttaatagattgtgattcagcgataaaataaaactgttttatatataatgtctgactataatatattttttcataaaataatagcattgggtaagattacaaataatataagtgaaaagtataacagtgaataagttaaaattttaaaggaaatcaataatacgtgaataatattaattggtcattaatgtctttaaccactcgttgttaatatatgtgtttatacagtacattagtattatgttgagataatttgttctatatggaatttgaactttgaaggtggccttgacttcaacacatcttacaatagttatggagtatgtagcgggtggagagctgtatgaccgacaaatttcacgtaaaatggttatggagtatgttctagattcattttggagttagatttcacaaatttcacttctacaatgctgtttttttaaaaaaaaaagttagaagatttaatatattttggagaattttaaggtgtattttttctaactattttattctgattaaaatgacaaaacatagctcctatgtatcataaagttgaaatcttttgatatcattgaatttcatgtttaatttgacatgaaggaacatgacatattctacaatgtgttgagtgattttgcatctattgttgaaaatgtgtatgaatatcaatgaattaaaagatgacgatttttataaagattacttattaaactctttaaatcctcgtttagctatgacttatagtgtgtataagattgcaaaggagatatgagatcacttgagcactcaattttaaaaataatagagactttctaagattcttctaacataaagttctttgactttaagtttaatatgaattcaaacatcacttctcaattaagtgaacttgagaacatgaggaacaagctaaaagaggacaattttgatttgtctattaatctttttgttggtcttatgttgagtaagttacctgctgaatgaaattcttttaagactgacatgcacagactaaaaaaacatatgagattgaatgaacatatgggattggtcttgtgttgagtacctactgaatggattatcaggtaaatcccatatgttcatccggtctcatctgttcttttagtctgtgcatgtcattcttaaaagaatttcatttagcaggtagcttactcaacacaagaccaacaaagagattattagacaaatcaaattgtcctcttttagcttgttcctcatgttctcaagttcaattaattgagaagtgatgtttgagttcatattaaacttaaagtcaaagaacttcttcgctagaagagtcttagaaaacctattttgtttttgaaattgagtgttaaagtgaacccttatctcttttgcaatcttatactcattataagtcatagctagacgaggatttaaagagtttaacaagtaatttctacaaaaatctttatctttaatccattgatattcatccacattttcaacaataaatacaaaattaattaacacaatgtagaatatgtcacattccttcatgccaaattgaacatgaaattttcaaccatgaaattcagtggcatcaaaagatttcagctttatgatatcataggagctatgtttttccattttaatcaaagtaaaatagttagaaagagtgcaccttaaaatcctccaaagtatacaaatcttctaactttttttttttaaaaaaacaacattatagaggtgaaatttgtcaaatctgacctcaaaaatgaattcgaaatacccaaaaaaccttaggaacgactttttttggtcgtcggtcgctagaaaacgaaccagtcatcggaaaactgtagaaacttccaacgactatatctccttcgtctaacctttgttttacgcaagtgaccagtcaaaacgatcgtctcgacgagtagagcaaaatccacaaggttttaactcatgaaattggctgaaatttttgggatctggattcaaagattgcggagagaaagttttcaaactcagatcctggtcaatcctttcgtcaaaacatgaaagtgatatcacccttgagtttctcttgatgagattttcgaaacaacaccttattctctcaaatccgacacacgaaactaatacttcaagattgttagaggtaaagggtttaagagatggatttagtgttgggtgcttgaagtgttacactaagagacatcaaatatgtaatgctcaacagtgttacctccagcaaagggagaaccttagtgatatagcaaactattggactccagtccatatggacccatataattatacattaacttattatgcttgaatgtgaacatattatttattgtttaaatatatatatatatatattaaatatattcaactaaaagtatattactgtatttcatattatcaatgcattttcataatgagtttcgatattttttatttattaatggtataaccatagacagtgattaacaaaactgaattagaaataatagtggggtgaaaaatgctaaacattcttggattaattaatataaaataactagagtatccaaaaaattgattttaatgggtatgttcggttagaataaaaaggttttgcacagttgattaattagataatttcaacgaataataaagaattagtttgaaagcttgtctggtagcatttctcttctataaaagtataatataataaataaattccaatgttcacaagtcatggctactgttcgtaatatgcaattttttctcattcttcttgtgtatacatatttcaggctcgatatttcttccagcagttgatttcaggagttaattatagccacagcatggtagatgaaatacacattagtacattactctgagaacgaattgtaatttgttttcagtgtgtgttggtagtgatatgtttttttttttttttatgaaatatgtcatcgacacttgaagttggagaataccttattggatggaagccctgctaataatcttaaaatttgtgatttcggatattctaaggttcaattgacaaaatcatatataccaaccttgaatgcttaaacaaataaccaattaaatttaaatatacattatttgataattttttcttctgacaagacaacctttacttttctagtcatacctacttcattcgaggcctcattcaatgattggaactccagcctatattgcaccagaggttctttctgggaaagactatgatggaaaggtaatggaaaggtaatactacagtttctaactttagatcatgaaaaagactagaagattcatgttgtattaattatagactgatacaattattcagcagtcacttagaacacgcagtgacatttcctttttagagtgaaatagaaataacatattttagtgactactatgaagcacttaaaatgccttagagttaactgattctgacttgatgagtttctctgtattatatggtagttttgttcattttttggctgatgtgttactgttttgtacctgttcagttggcagatgtatggtcctgtgtgttggagtttttgtttaaactctatgagttatgaataagaggcggttaacaattcaaaatagtaactacttataaccgctcttgggaaaggttagaaaaataactactcccaaccgctccgataaccaacggttacgatggtttatcgccaagagtcgcgatggttcatcgccaagagtcgcgatggtttactgacaactcttcaccagggttgtttgttgtctataaatagacacagagacagtcagaaaaaaggaaggagaaaggaaggaagtagaaaactgatagttaacttttctgatagtctcgcttagacactagtgcatttcatatcacataactctgtggttcctcaagcattgtctttgttcgtttgggctgttgatttgaagtgccatcaatcttcagacgtgatccgttctatcctgggagacaattgttcattaacctttggcatcaattggagggaacaaattgtcttaaggagacaacattgttgggctcggatcctttcatctctttgcatctgtttctgattcatacttatcatacaggttctatttaaattgtttttgtacagttgtagtagattatgttgttcctcttgactactcagattctgacccttgtgcaattggatatattccaattctaaattaactaatagttccaacaatcttaagacaatttgtttttgaatctgagttcagtatattctatctttgtgaattatatactgttgtctactctctgtactttgaacgattaatctgtgtgattaattagtgtttctgtttgtgtaacagaaatgacttcgacaagtgcaaacttggtcatcaacaacaagactccctctgtttcaactcttgctgaaaagcctgaaaaattcaatggggttgatttcaagcgttggcaacagaaaatgttgttctatttgacaaccctatgtttggaacgttttctcaaggaagacgctccgaagttgaaagaaggagacgaacatgataaagagaaggttgttgcggttgatgcatggaaacactctgatttcctatgcagaaactacatcctcaatggtctagacaattccttgtataatgtgtatagcactttgaaaaccagtaaggaattgtgggatagtctagacaagaaatacaaaacagaagatgctggcttgaagaaatttattgttggtaaatttctggacttcaagatggaagactcaaagaatgtgatgagtcaagtggaggaccttcaagtgttagtgcatgaaattcatgctgaggggatgaccctgagcgaatcatttcaggttgctgcggttattgaaaaattaccaccatcctggaaggatttcaagaattatctcaagcataagcgcaaggagatgacacttgaagatctgataataagattgaggatagaagcagacaacaaagttgctgaaaagaaatttggcaacaatcctatggtctctagggctaatgttgttgaagagggatcaaagtccaagaaacggaaatattccgatattggaaatgctaaacaaggcaaaggtaaaggcaaaaagttcaaaggcaattgctacaattgcggtaatcctggccatcgtgcaaaggattgcaaaaagtcacagaaatccaaaaagaagactactcaagccaacttggttgataccgcttgtggagaaattgaaaatctcaacttaacagcggtggtgttggagtgtaaccttgtaggggacactaaagagtggtgggtggataccggtgccactaggcatgtctgttcatccaagtggatgttttcctcctatacccctgtgaagaatgatgagaaactttatatgggtaactcttcttcttcaaaagtggaaggtattggaaaggtggctttaaagatgacttctggcaaggttgtgacacttaatgatgtgcttcatgtgcctgaaatttgcaagaacttagtgtctggatcccttctgagcaagaatggatttaaacttgtatttgtttctgataagtttgtacttactaagaatgatgtgtatgtaggaaaaggataccttagtgagggcctttttaagatgaatgtaatgactgtaaacagtgatggtgttaataataatgttacttctgtttacttgcttgagtcttctaatttatggcatcaaagattaggacatgttaattttaaatcaattaaaagtttggttaatttagatttattgcctaaagttgaatgttctaatattaaatgtcaagtatgtgttgaatcaaagatttcaaaattacctttttcttctgttgatagatcaactgaattgttagatttaatacatactgatatatgtgatatgaaatctgtaccatctaggggtaataaaaaatattttattacttttattgatgattgcagtagatattgttatgtctatttacttaatagtaaggatgaagcacttgtggcttttagacaatataaaaatgaagttgaaaatcaacttaacaagaaaattaaggctataaggagcgatcgtggggagaatatgatggccccttcgacgaattctgtatagaatctggggttatacatcagacgactgctccttatgcaccgcaatcaaatgggattgcagaaaggaaaaatcggacattaaaagaaatgatgaatgctatgttaatcacgtccggtttaccatagaacttgtggggggaagccattttgacggcgaactatattattaatagagttcctcataagaagacaaagagcataccatacgaagtatggaaaggaaagcaaccttccttgaaatacttgaaagtgtgggggtgcttggctaaggtcacggttcctaaacccaaaaggttgaagatcggacctaaaaccgtggattgtgtattcattggttatgcacttaatagtagtgctagtcgatttttggtttataaatccgatgtctcagatatacatgttaatacgattattgaatcaagggacgctaggttctttgaggatatatttccgtataaaaaggtatatgaaccaagcggcaatgacaatgataatgttgtgagacctcaagagactacaactagtgttaatcctgtagaggaagaacctagacgtagtaagaggcaaaggactaccacatcctttggacctgattttctaacatatctgttagaaaatgagcctcagacgtataaagaagctgtaacgtccccagaggcaccattctgggaagaggctatcaatagtgaaattgaatccatcttgtcaaatcacacgtgggaattggcagaccttcctcctggcactaagcctctaggaagtaagtgggtcttcaaaaggaagatgaaggaagatggcactattgataaatataaagctaggctagtagtcaaaggctataagcaacgcgaaggtctcgactacttcgatacctattcacctgttacaaggattacatccattaggatgttagtcgcgctagcagcgttgtatgggttagaattacatcaaatggatgttaagacaactttcttaaatggagacctagaagaagagatctatttagaacaacctgaagggttttctgttccaggacaagaacggaaagtgtgtcgtttaattaaatccctttacgggttaaagcaagctccaaaacaatggcatgcaaagtttgataaagttatgttatcgaacggttttagtattaatgaatgtgacaagtgtgtctacattcaatatactgataaagggtttgccatagtttgtctttatgtagacgacatgttgataatgggtagtaataatcaaatgattaaaaccactaagcaattgcttgccagcaaatttgacatgaaagatttgggaagagcagatgttattttgggtatcaaaatccatagaacatcaagaggtttggctctatcacaggctcactatattgctaaaattcttgaaaaattcaagagtttaaatataactcctgtgaataatcccatagactctagtcttcgactatcaaagaatactggcaaagctatagcacaaaaggaatatgctcaagtattaggcagtcttatgtatgttatgaattgcactagacctgatattgcttatgcagtgagcatgttgagtcgctttacgagtaatccaaacatgtatcattggaaagctatgataagagttttaggatacctaaagcacactcaaaactttggtttgcattatgaacagtatcctgcagttattgaaggatattgtgatgcaaattggatcaccggttctaatgatactaaatctacaagcagatatgtgttcacccttggtgggggtgctgtatcttggaaatcgtccaagcagacttgcattgcaagatcaactatggaagcagaatttatcgctttagataaagccggtgagaaagcagaatggcttcgtaattttgtcgaagatgttcccaattggccaaaaccagtaccagctgtaggcatacattgtgatagccaagctgccattggtagggctaagaacatcatgtataacggaaagtctagacatatacgtcgtagacatgataccgttagacaactactctcgaatggaatcatctcaatagactatgtgaggtctaaagagaacatagcggatccattaactaaagggattcctagagagttagttgaaaatttgtcgaaaggaatgggtctaaggcctatcaattgttgatcatcgcggtaactctaccttgatgagtggagatcccacgaactaggttcaaagagacaactaagtcatgatcgactgttaaacactgtggagttttaaactcatactcattcctatgacaatacagtgtatatgagggtaagcataatggcttttaatggtttcttaatctgatgtgttcagatgatatatgtggaggtatatcacaagaaatcacctatgtgagtgtgaagtgagggccgcttcaatgagaacttaaaaaggccgattctctacaacacttgcagaaccaggaaggtgtccacggccaaaatggacacaacaatgaggacgagcaatgctagagaagcaattgtgtgactcctattgtctcggtatacaccatacaggttgacggttcaaggcatcacgaccaccgattggcctagtatacccgataggtttacactagagaaggttcaaaggtaacccctacctatctcgatgcaattgtttctcgccgaggaaccacacttgcatacatattcatatgcatttagtcatgttgaattgatctcttattcatgtgggggattgttggagtttttgtttaaactctatgagttatgaataagaggcggttaacaattcaaaatagtaactacttataaccgctcttgggaaaggttagaaaaataactactcacaaccgctccgataaccaacggttacgatggtttatcgccaagagtcgcgatggttcatcgccaagagtcgcgatggtttactgacaactcttcaccagggttgtttgttgtctataaatagacacagagacagtcagaaaaaaggaaggagaaaggaaggaagtagaaaactgatagttaacttttctgatagtctcgcttagacactagtgcatttcatatcacataactctgtggttcctcaagcattgtctttgttcgtttgggctgttgatttgaagtgccatcaatcttcagacgtgatccgttctatcctgggagacaattgttcattaacctttggcatcaattggagggaacaaattgtcttaaggagacaacattgttgggctcggatcctttcatctctttgcatctgtttctgattcatacttatcatacaggttctatttaaattgtttttgtacagttgtagtagattatgttgttcctcttgactactcagattctgacccttgtgcaattggatatattccaattctaaattaactaatagttccaacactgtggagtaatactttatataatgctggtaggagaattgccatttgaggacaaagaggataccaaaatctccacaaaaccataaaggtaatttgctttatttttttaatttaatttttatatactatcagtataaaagtttttagaccgtcaagtgtcaatcaatcagaaattatcttaagtatgacttaagataatcattatagaagtgaacaaatttatgtgaaatctctaatctctttacactatttagtacatatgctattttactttttatttttgaactagctctgttgatagattcatcaatcatcatgtcttatatgtactctttctgactccctatgtgtgtgtgtgtatatatatattatccagagagttatagctgttcaatacaagttccctgacaaagtttgcatatctcaagacagtaaaaatctgatatcccgcatttttgtggcaaatccagcaatggtatgtatatgaacatagtcatttaattattttttggagggaacattataaaataaaaacacttataactgtagcatgatattacttggtgtatgttgttgtaactctgccttataattatgttgtagagaatcaccgtgaaggaaataaagtcactacatccatggtttttaaagaacttgcctatggaattgagagaagcggctcaagatgtttactacagtggagaaaatacaaaatatcctcttaaaaatatagaagagatcatgaacattgtcaacgaggccaaaactacacctgcaacttccagtccaaatctataagagagattgattggggaatggaagaaatgataatgccgaggtacatgaaatcatttatgagaagcgagtcaaggaagcaccaaccatattcaattttttggataataaattagattttttgttcacttttccccctaacttaaggtaaatgttttgcctgtatctatgtatcaaattttagttttatgacataaagttgaactgtacatttttgttgatatggtacaaggtttgtagttgtgagctgtgacagcattattgtgatttataagtaagaggtcttcgttttctccctctgaatatgatgttatgttcagtcttcaaagcaatgagctatgataggaatagatgacacattgttgaattgtataatttaaatttcaaattatcgttaggatttgttaggttgttatagtttgttcagtttgttattatcctgtattattagcattttgttgaatttctctctcttatataagtacctcatgttgagggaaaatatagaagagaatggagtgaatgaatgaatgaatgaaagaggaattattattccgatttatgcatatctgatttttaacatggtatcagagtcatggttcccttcatgaatgagagccatggtatcctccatgaaaaaaatcatgtgttatcttccatgaaaaaaaaaaattttcgctaccttattttttagagtctgtcttcttcacattcccattgctaatcaaagtcatttccggaagagtgtctgaagaaacaattggcaagttgggcatgactgatattcatgcaccaacttgagggggagtgttgcattgtataatttaaatttcaaattattattaggatttgttaggttgttatagtttgttcagtttgttattatcccgtattattaatattttgttgaatttctctctcttatataagaacctcatgtttgagggaaatatagaagaaaatggagtgaatgaatgaatgaaagaagaattattattccgatttatgcatacttcattttaacacacattaacacatcacttgcctctatcttgcacagtgatttagggtcaggttgttatctttacatttatttggccttttcttggtttttgatttctttgagaagaaaactatataggggtctaattactagttgtggatgcaagtattatgattgttctgttaccattttagaaagaaatctttcatgaaagaaaatagaatgaagtaaagtcaaacgaaagaatttcattttttttcttttattttatcacaaaatcttcaaataataaaataacaatttaattatatttcctggtgcattttctcattttcttcaatttcttccatcattaaatatccaaacatagcctttaatgcttgtttgacatctaaaatgcaccattataattataatttcagaacaatttcatgaaattacaaaataactaaattgaattactttcaatttttaatcaacaccttaaaaattgttcattgcatgtctcagaaatagtagaggtggataaaggttcgagcaataacctgacttgattttttatttttttttgggaaatctgacttgacttaaagcttgaaggatagatgaggtagggtaaaaaataataaaactcgtttagtttcagtcaatatttaaacctttccaatgaatattttaaaacctttatttttatgcaactacaccctattcagactaaacattaaaattcccaaaaatcaacctgatcctaacctgcctactttaatttaattggtttggaacaaaatgttcagtctgaccttgcttttgtcccccgaattacttctcaggttcatgcatatttctccatgttagatagcattgctagtccaactatagtactatacctatgtgttcatcattcttaccatatatcaatgtaatttagtcacacattaattctctttttcatggaagctgtaaattgtaattacatacatggtcaagattaatctcaattcacggcaagaaataaaaggaaacataaaaaaacacaagggaggtggtggtacgctatgttaggacatttgaaacgtcaacttcctttggcacatacaatgtattttcacgaaaagtaatcactaatgctcctatttttacaacgcaaatgaagcactttttcacaaattttcaatggagctgccacggacgagactttgatagtgacccttattgataaagacaagcgtattatttacaaatgaatattggagtcgacattaggggattatgcttggatctctttgtgataactgattagagaatatgtcatatctattctttcatgcttatatttgtttttgttatctttaatccaaggtaatcatcatactcctatttttttataacttcttttttatttatcattaagttcattattatcaaattcaattaatttaagttaaagatattattaatgttgatctttaattcaaaattcttttgagtcatttatgcaatttttaaatattatattttttatgaatttttaaatattataattaaaccttcggttattagctttctaaattcgaatttcagcaagaagaaaaaataaaataaaaaaatcactctgcaattgagagttcgagagttctttttgcttcatgcaagtaataattgggaaaagattaactataatcgcgcaacaaaatctttgcctgctaattgttgatatatatataggtgggattcgactttaagcattgcagactctatactagatatttttaacttcgttgtttaacgagttatttatttttagatgttattactttttattattattggggatgatctacttattatattatattagattacttaaaattaagctaagatagtttatgagtaaaaaatattttcttgttatttagagattctttaaggaaataattttagaattgcttaaaattatataattggagtaaaatatgaattgtttattaactatgatgtgatattataagaataaattaatataaagtaaagaatttaaaatgaattatttaaattatatcgattaaagatgttgaaagtaaactatttgacgcactcgaacggaattgaaagccaagctaattaatatcctaatcttgaggctaaaatactaaactgtcttcattcgttgttgttttatacgagttaatttacttttctgtttggatttccagcattatattactaaagtttgattacgagaaaaaaaaattatggcctttaaaaagaggaggttattaaaggtgggcaattattaaaaaatcaataaatatatagtatttgtaatgtaaaagttttgactatatcatttagtgcatatttggttagaggttactattggttgtcttccgtaattttggagaagcatccctttattatttctatgctaaagtgcattggtattcccactatttaggttttaataggaatctaaacatattcttaattattgattgttatgcattataagattattaactcttataatcttataatattacctctagactaaaatataagaaaaaaataatatatgctagaaataaaactatcttaattataaataaaaaattaaagaaaattctaacaaatttatcagtgcattaatattaaaacgtgatttttttccaaaattataatcatttatctacttttttccatttcattaaaactacaattttttcttttttttatcatagcattcatcatatatatgttactttatttttctacctttcctcctttcttccaatttttctctatctactcccaattcattccatattaggatggataactattcttttcattaaggttaaatttgacaaatattttagttagtttttaatttttttactagctaaaaaactgttgattgtcgatgaacaaacttattttaataacttcttaatagattctaatatttcttgaaatgtcacttaagtaatattttttaaaatgctagtttctaatttttattttttatatttttttcatttttatcctcaataatatattaaattttcttataccttttttaaataaattatgatttcattatttttatgttattttacatgttttagctatttcaacaactaattttaaacttagttaaactaacttttcaactaattttgtcaaatataattaagatgtatgtatttttgggaagttacaaacttgcctcggtgataaaagaagagaggaaaatataatttattcaatttcttttattaaaaaaaactaacaattaatatttttcataaaagttgatatttgcatttttattccctaaagtaaacctacactttaaaaaaggtaaatgtagagaagaaattcctttcattccccgaccgttcaccttaaacatgataaatgctatgagtactagatttcccccgccgaacgttattaaactaaattagcactaggccatccttactttaaagtaaggaaattaattgaaaaacagtagaaaattagatatccaaaaaggaggtgaaaagagattgtcaaacaaggtgaaaaggaaagtttgctatttcattaaaatataaatttgttgtctaaggttctccctttgtccagtgagcagacagcacaatcctattttctatgttataaatcattatcatatctactttcttcttttcccagacaatcaatttaactttaacagaggaagatctgttcttgttgttgagttatcaaccacccttgggactagaaagctttatttgaaaggtagatttcacatagtacttcatatttttcggctttatatggctgtcattcttggagaaagtttttctcttttgtgtcttatgtcttaaccatgtctgcagataccgttaacctttgcagaaaggctagattattttccctacataattctgtttctcttctttacaagctaaaaacgacccatttaaagacaataatacaatatagcaacacgtttatttgagtcatgatctttaaaaatgaaatctaacaaacagaaatttctttaacctgcagaatagcatgtatattcgggtaactgggtttttacaaggagtgaatggtttgagtacatgaacgtgcggtgcactatggtttattggtccaaaatttacttacatttaattgatttttattgataaaatctgcattatgatagaatgcaagtgagagtaaaaagtctcatattggttagaacaacatataaatgacaaaaatatatatactgatgcttaaggttttaagtaaataaatgttaagtattcaattatctgtaattgactcatgattcattaacaaaatttcttcaatatttatctccttgtattccgtaacatattctttttatatatctaatgtaaaatacagatgaatctgttcaaaatattgaatatttcaggatataaaatttgtattcaatattggatattgagtggaaattctcccacacaaagatagtagaagcatattgatctctaattattcttgacaaaagattctacttgactccattgataaagaaaaagcatcatttttattatcaaatatcatctagtcttttgaattctatttttttttttatttctttcccatgtacctaatacaggaaaagaatactactactctgtctagaaagacgtttctcttattacttgaaggcattggcattttaaaattctggtttctcatgtatgacgagagtaatgttgctttacttcaaagcaagcatcacattctcttttgcaatttttttttctcttttctttgcttttcattggaaaagcttcttcaaggcctcaacaccatcaactcagcaaataaagaaaaaagggaagaccagaaaaaatttatgacattgcttgcatttttcaacataatttttcctttttattttcccttaaagagcttcattttgctctcaagtattttccacatttgctatggcttcactaaaccaaattatatacatctacttatgactacacatattcaacaacttcttccttccttccacaatttcatcaaagaaatcatcaagttgccctgttatagtctcaaccccacatctcaacaacccaaagcaacgtttcaagttgtcaacttttgcttggatctcatattgtgcatcataacccaccattctctccaactccactttcaattcctccatggcaatcttggcttgtttgaattcaagaagcagaatccctggctggacattattctggtcaatctcttgtgcaactttctgctgcaatcttgccatagaagccataaaacctgagccataaaccacgtgctccacgtgcccctcatacccttgttggtcaaagcatgaggaagaccaacaatatgcaaccccacatagcaaaatcatcagaagcaatgagctaaccctcatcattgcacaaagaacacctcggaagccattgaactcgtttaactttgatttcatacacatgttctgatttagacattgagacaatgcctgaattctattttccatcaagcttttattttcctctaccaatcctagactctccctttgacaaatatttatggccctaataacctgcaatatatgttttctagaagaatttagtgcatgtttggaaactcataaaaaaaacaaaaaaaatcacatcaatttagcttaatgaaagctataactattagcttctgattaaacatgaaaaatcacatctgaaacgtgcaatcaaaacatgctattagagtcattaattaaataaagttgatttagttttgtaaaagcactaagcttttgactaaaaagtaattttgaacagaatttgaggtgtatatatactatataccaacctgatgtgaaaactctggagtcaaatgatggtagccatccactgaggaagctatgttggagccagttaaggaatagttctctattccagaaatggctgatttgagtacatggcagatatcccaaagccttgagctttcatccatgtattcattcagccattttcctccaactgacaagcaaagcctttggaccaaaatggttaactgggaatggaaggattggagggatgagaagacctctgaaatgaattggattgacatgaagtcatgggagggaaggattggtgaagctcattgagtccttgagtgaggaagatgtagaagccattgacagaagagtttgtgcatgaagaactactcatcatgaaaggttgaagggaagttgatggagattgatagatttatataattggaagattaagttgaaaagagattaagcaatcaagaaagtgggtagcttagaggattctaacttcttttttatggtatggtgaaagttactattgggtgtaattatggctgtttcctatagagtggagtggattttttttttttttttctttccaatttacactatttatcttcaaataattctcaatttacattacttttaatttaattctcgaaatacactatttttgagaagtcatgttttcaggacttgacttcccatctaagtttttttttttggtaaatgttattttattaaatttaatttaaaataataattttgttatattatttaatttaaaaatgataatattttttggtttaataattattagtaatcttaaataattaattaatagtgttaaaataaataaaaagaacaaagtgattaaaaaatagattgattaaaaaatagtgaatatatacttatcaaatctcaattatattatataaaaaattaaaatactcaaataacaaaaaatactaacaattagagagataaacataataaatgaacataataaaacaaaataactaaatgtactaagaataaaaatgaaacacgaaaatgacgatactaatcatagtttgaaagatattatgcatcagacatgtttcttccatttgaatcattctagcaagttgtttattatgcacaacatctgcataggttattgcaacatgttgatcgataattgaggctggtttggttactagtttgctaaaaataactaaaatttatattggacaaaacacttctggtagttggattccggcaacatctttaacacgtcttcatcatcattctattatttcatattcgatttttttaatattttgtatggcctaactgtcgaaagaacaattttctaaccacatgtgattggtgacttccataaggggaatctctaggcacaacttgcttgatgacatccttaagtttttgatgttgcatattgaaggaattttaaatcttttggtttgtttcagtgaaggagtaacccaaaaaataccttgtcgtggtatcttgcacttgctattgtattacaacattgcatcatgagtaggaactagtgatggtgaatcgaagtaggttgagtatagtatcgggtgttctattgatgatacataataattctataaggtcaacaagcaggtattgcttattacacattaacattggggatatttgtgcgaataagtcaagtgtagctgaacgacttgattaattgtacaaaaaatattgggtaaccagtatccttggttaattccatgttcaaaggcacaaaaatatttgtctgtgtcattgtttgttgaggagacgtattttaagaccacaaaactttttgttattagaggtcgacaaatccaaacaatgatcaactccggctcgtagtattccaaagtcgtctctaaggcaataaatagcggtcaacatgaatcaaatacgcacattgttaacaaattgacaaacacaacaacacatttattgtaacagagactcaagtcccacttgaaactcctatatcacctggaaagtttagggttatgttataatcctagaattgcgaaagtggcgaatttcagactaagcacttatcgtgttttcatataatgaatgcctataaatctgttaatgttgatcccataaactatgtgccgctatttactttacaaaacatattgcaccgtctacgataactcctttggtttactgtcacacgaattaatatgacaagaatatgaaggagatcaatgggtcatgatccaaggaaaaggaagagtgcaaaggtagttcagtttcaaattacattcccactgaaaatggatgaagaaattgaacaagatataaaaaaaatgtgaaatatatcaacaataatgtcataattgaaaaagttgttattattgttcatgtattttatttatgatgtattatggataaatataaaatattaaactaaaaatattatcatattctaaaattaaataatataaaaaattaattaaatttaacaaaataacattaaacaaaactcaataaagaagttgggttaagcgaaggtggagaatcggatctgaaaacagaaatttttaaaggatagtatagttcagaaattaaattaagaagtaatgtagattgtgaattattaggagataagtaatatagattgataaaaaacctggagaggatgattgggaatctgctgcaattactttttattcctattgaacaaacaaatgtcaagagagagaaagaggcaaataatcttaagaatatatagtactgtggatcatatgtagagcattaaaaaaatatgcattatgaaaactatataaatagttccccccgaccccaatttctcgtacttgatggtttttctatttcttttgttattccatcgaatcgaggtttcagtatgagattggattctgctacttgttggagtataaaagattgactactttggcttaagattctgcttctcattcttctatttggatttggctcgctagctgttgcatttaaagtgcttcccttcggcttcttttctattttttattttctctttcttctcggcccatgttttaacctcttctacacgagcacactgcaccttttcgttttggtattcttaaaaaacgtggtacgtcgtccattttggtttttctcatcctgtagagaagaataagaatgaatatatcaactgtgatcctcaaattaaactcaaaactattgcggcttttttttttccttttcatattcactacaaacaaatgtctaatgtcatatactaataaaaaatattgatcgttaagcttattcccattaatatattttttagttaattaaaattaaattgttaatcaacttaataaataaatatataccacagtagttttttttattcagtgaaaacaagaacggaacaaaccatcacttacgaataccaacaatgcctaactcatcccctaaaagaagggattaaagacctcaattggaagactataaccgcagtataatacaactatacacccataatataaggtctatatttaattttattttctgataaatggatattatattaatggaggtaagttaataactttgtctttgttaatatatgtaatgtttttgtaatgactataatgttcacattatgttcttgctattgacgttcacactttgaataacaatttaaggttgacttcaatttttctgactgagtttttgttgtgtagatttattttcaccaaatcattgcacacattaagaatagccatttgaaaggctaagttttaacgaaaggataatgcaccaaagcataatcaaactaatctatctgaaaggacaacacttatatatatattgctttttcccacagtttatctgattttaagggtgcaggaaaccaaatcaaatattcatagatattagtcatgtattaagaaaatttctcacttataatcactttttccttgagagtattcaagtatattagtgatgttatttctgatattgactcatcgtcgtcctaggtgtgtggctagttctacgtataattgattcgatttgacacataaattaagaccatattcattttatttagatgatctataacaacattcctatgtagatttgtttttgttggtgtccacacaattgacttgtctagatcttatacatgatttcttttatttgacattgtgaagtctgttgcaaggtatttattattcttgtaattgtcactttccatagttcatgagcacatcatatatacccaaaattgcaaaattagatacacgcgttttcgatagtaagataacctttttattatacaagtgagaatgataaatatttactattaaatcttattataagttatcaagatcaaaatatataaatcacgtgagttcttttttataaaaaaaatcatgatttttaaattttttacataacatcaaatcttaatcattataattgtataattccgatttactgttcttctcacttttatataaacatgactttctcactagatatgttcctatacagtcaacattcatttatatttttaaaagtatacatacactaaattaatataacgaagtatcagataatttttaaatgatattaaaatttatagatttgacctattgaataagaatttttaatttaatgattgaattaataatgtttaatatgtacaatatttattaaaattactcttacagtaagttgaaaaagttgactttttatactatgaataaacaataatcaatttttggttattcttcaagagattatattgtttcattatgaatgctacagttatattgggtctgttttcatctgatcataatttctttattaataaaattatgaatataaattaaagtattttaacagtgcgaaagtatagaaaaaggaatgggtgaatgaatagtagaaataaaaactatttttatgaaaaaattgcacaaattaagtccatgagcacaagattgtttgagcatgaatgaaaaagaattcgaaaggattatgacatatagacagatacacaagtcacagaaagaaaagatttagttcgcaataaaagattatgaaagctaattactagatatcagttagctaataacaaaatagtcttgggttgatcagaatgctctgcttcaattataggtagtataccaagttaattttgaaacattgttaacgtagaagttcactttattatccaaatatattgtcttgttacttaacgtgtttgacaatacataaaaatattaaatccatttaagtaatataatagcgtattaatgtgaaaacttttcatcgatattcaagttaaattataatacaattatagatagaatcttattatgaatatttattatgaatatcataagataacataaaaaaagttatgaataacccaattttacatattctaataaaaatcttttatttaatcaatgctatttaatcaagaacactaattagcatttgccttatacataatatgatgtggttatatgataataattgactttcgtcaaaaattggctggataagagaggttgacaaattcctgtaggtgcataactgtataaatagaaatcatagacaattgtttatagaaaaatgctacatagctatacaaatgataaaataaaaccatagaaatttagcaaaattcagtcaaaatttatcaagagtcgcggttaattattagacataaaagcaggaaaaatacattcctgtaagaattagggtgctgaaagcacaaattcagtcaaaagtaacatgtttcttatattccagtctttaccagcaattcagcaccacaatgtgaaacacatataatcaaaaaaatgttgatgctgtaagcaacttgtaacaagttaacactatcactgtaatatttgacattccaaatccagcattcttcccattgaattaaacaattatcctgagaaaaaaaggtgaggttgattgctgtatataacattaatgaatttagatggcctaataggttactatgtccacagtcatcaaattgaaggtacgattcaaattcactaaagtttcttctaatcagatctcctttgagaccttggaattggcactgtttggatggaaagaagtcatgatgctacatggtgacaaattgctgcaaggatcatagatttcttgaataaatttcaacttgcacaacatctgtcccttgttcataactcggccctggattccgtgtcctcatttgatgaatcttcactattgaagtccttggattgattagggggttgtattgattctgattcttgatcatcgcccaagatttgtgctgtgaatcttcttgcctcaaaatccaggtctggccactcagaaactattcgtctagcaccctaatgttccgagataaagtagtaaaaaaatggacatagaagacagaggagtgcaaaaacataagttgtgataggaaacaagtttccatgaacacaacttaaaacagcaaaacatttacctgcagtttgggttcttttgtcatgggattgttgcacagatcaatggtttttgccttgtattttgtagcattaccacaccatgattcacaccatagccattcttgcggcaaagagaaaataggcacggtatgctgagcgtaattaggaagatcctagaccatttcagggcaaattttagcaaaaaggcacctcaaaccaaaaacaaaagcatgcattcaaaagagagaagaaggctacattggaagtacataaagattaatcttcataataaataatatgaaatatactacgaaactagtaacttgattttacagtcctaagtatccaattttagcccttcatacaatttatgaaattgactctttcaaattctgaaatattttttcaaatttcaaatggtaagaaggaaagacctgattccaacttgcacaaaaatgatattgattcaacactaaggtagtgtttggaccagcttattttgcctttttttctccttaaaagctgggccaaacactcatatatatatatatatataaaagtccttaaaattataagtagcttatttttaagactaaaagatgaaaataaggagcttattaagaagctccttggagtagctttttatagcttgtgcggagcttttctagcaacaaccatccttcgaatcccatctaccggcctttcatgtatttccttttctaaaataaattcatttcctcctttcttatatgtgcgtgcccctgcagcttttctgtggaataatgatgctgctttttttattcttcccataacattgaaatccttatgcttaacaatatatttttgttgttgagaaagtttctataagttgtactttcgtttgcaaattatcactgaaataaaattatattaattgaagtaatttcaaatttttaatatatttattttaatattttaatttacttttattatcattaaaatgatttaatatgaattaaattaatttaacacaatatttttttgttttataaatatactttgataattagtttcaaataaattaccatacaacttttaacttaaaaagagcttttagttagaaaagataaaaacttccaaacaacttttaccttttctttaaagttcttaatttagctttaacttgaaagtaacttttaagaaaaaaaaaaaaaaaaaaaaagccgccaaacataccataagccttgccaacaaggacatgctgtacatgagcagtctttaccagtaaattttttacgacagtgatcacacaatgtttccaacaaatacggaaataccatcttgatcaatgggtataaacatactgaaataatcaaattaaaaagtttctattctctaaataaattatacaacctgttataaatttataatatgatcactcatcaatagtcaccaaagacagattcaaagagcatatcataaagttgctccctagttttcctttcatttttggttaacggattgaagaggttacatattctttaagaattcactttgataaggcatatacatcaaaagttaaaacaactattctttggcccttgtttaacagcatactgttttaggttaaccgttttgtttagagcagtgttactaatcctaagtttgttggtcatgggttcaactccagaaacagcctctttgcatatgcaagataaggttaggtacaatatccttcccccttacctgtgcatagcgtgaaacctctgggtaatgggatacgtagtagtgttactaatcgtaagtggattagagatggttccttatgcctccatcttatgaagttgttggaaagtttccttaattgcggtcatccctacgccaaaaagggctacctaagaccagaaaggctgagtttaacatggtagagtgcagccactaggatgcggctcttaggggattgagatccccattgattagagataaggcctaagtagtgcttataaggcttgggtaatcctcaccttgcaagcaagttttatggggttgagttatgccttaaatccaaattctaagagaaatgttggagataccacatcaactagtgataaggccaaagtaatgtatataagtgggggacaaccctcaccttacaagccccggtcttgtgggttgagttaggcccaaacctaaattgttaaatgctattgagtgtatcctagagattatagttaggcctacctagccatctagtccttggtgaggggtgtgtattggagatcccattgtgggattaagttaggtccaaacccaaattgtgtcccaattctatgggaggattttaggagatacttacgtctttcacttagacaaaaatgatgagtcgggtattgatactcatgaccattataattgttataaagcctctctcccatagaaatatcactagttattggagttagttagacttagctgctttgtattaaaatctataactaagggggtgtatacaagttgatttgattttttctcaataatacaatttcctctatgatttctctatctttaaactctctcaaatctaacaagtagcaaccaaagaaaaccttgcatttaccatcaacattgtatctcacacatccacacttctgcttcttcctaccttcctgtgtacgattgttaatgccactgataaagtgagcgacgtttccacgtttatcagctcagataacaagactttgagaactttctcccaaaagaagaattgatttcttcgggatttggagggagttctggtgatggtaatgacaagcatccttctcaggatgctaagtgtcggaaaaattcacgacctctgatattacataagaaacagaggagattgttaccatttgttcctacaaaagatcctgcccagaccttgcttctgctttaacagcattaaatatggaattcagtgatcacctcaaatgcttgcctggaaaggctcctagatctgtgaatcaagccacactaaaaaacggtggcatgaagattctttccaaggaagacatggagaccatagaacactgcattgctatgtctaaaagaggtgaattccctccctttatggttgtttatgattcgtgtgaaagttatactgttgaggctgatgacctaatcaaggatatgacaattattgctgaatacattggcgatgtggattaccttgacaaccaggaacgtgatgattgtgacagtattatgtccattcttagagcagaaagttctcaaagtgttgttagctgtgctgataaacgtggaaacatcactcatcgctccctttatgagtggcataaacaatcatacacgggaaggtaggaagaagcagaactgtaaatgtgtgagatacaatgttgatggtgaatgcaaggttttttttttgtggttgctactcacgacatttctaagggagagaggctttattatgatcattcaaggtgacagttttaataggcacaacatgatggaggatgcactcttcttatgctggtcttggcttagaaatttagaggacggtttcactctcccttttcacttttggtctactagtatgggagaggcttttgtaactaggggaggatagaaatgagatgttttttgtatgtagacctagttttgatagcagaactcaggggcttttatcatgcttcaatggttcaagcttccttagttctgttatgttattctagggtattgatatgcagtacttcttgtaatgcagacaattcttttgatatatatatatatatatatatatatatatatatatatatacacacacactttattttgctggccaaaaaaaattatgatcataatggtcatgagtatcaatacccgactcatcgttttgtctgagtgaaagacaaatacctcctaaaatcttcctatagaattgggacacaatttagatccttgagaaaggagtctatttatattcttgaaaatttcaactcattgttgttgcatattccacaagttttgatataaagcagtcatttataatgcactgggttttcatgttatattgggactacaaaaaccagtcaaacttgcttaacaacacgctcttttaagtaaggattcatttgcaggtaaaggaactattaacttaaacctcttacctgatccaagttggctagactatttggatccctgcttagtgtttcataaataactctaagattatctccagctgcagtctctcggaacttcttcagatcaacaacatataaagcactgaaaaccgaaattgaaacagtaagcattgaaattatatttggcaatagaatataaaagtagctactaacctaatatggtatggtttcccccgcaaatgatcactccagaaaccctatgacacagggaaaaaaggttaacaaatatttatagccaatactgcattaaaattacacgggcgtaacgaacaccaagagtatcatatagattggaattgaacaataattagaatttcgacagtgacatttacttgtctccaaaacctatatccatccatctccttattattatcgcaaaatggggtatatgccaggggttttcctcttatatccatgtcatagagtactcccatgtctgccctaacaacttgatcagcatccacaaaaatgacctgcatatattggtagattttagacagatttcttgtaagggattttgattcttcattatctttgtcataacattgttattgggaaaaacccaagtcccacattggctagagataaacccaagatagaataacaagtgagaggcaacctcaccctatgagctagttttggggttgagttaggctcaaaccaacatcctaagaattgtgtagtgtgacattgaaattaattgtacaaaagacaaaaaccaaaagtatggaacttgatgcagaagaagaaaccatgataccttctccaaagaaagggggaaaatgacatctaggaataagattttatatgcccaaattattcgctgcttttctttctgcttatgcaaccatgtgggccacttgtacgtgactagttcatatttaaaaccatattctagggccatgtgtggaattaagtcctgtatgttaagtcaaccaaaatggttcaggatgtcaggcaaactcatcattctactttacattccaatatacaaatgaattaaaatgtaagcatatataatttgggtggatatataaccttaaaaggaggagagaggtagttctttatgaaccagaatttaactggacgatgagtattctttagaacacttagaatcataatcttcataaagcgttcatatctggaaattgacaagaagcacaaagtgaagattgcatccctgatgacaaataaaataccaccaggctccaactaaatatgaaaaaatattatagaatccaagtatggagtttaatagttaccatgcatttggaagtgtataacatttgtttgaaagattgtgcttagtaaaacttgcacaagaaattaacgtccataaatttcctattaattacaggcacttgaaactgaaattgtattctgaaatggaaccccaaatcccattccacgaaatctgaatcaacatacatgattgaccccattccatgaagaagcataaaacatcagtaaatgatattttctgctgtacaagacaatttttccaacatgatacgtcacatatagtaatcactgtttaaatttcgaaataaaggaccaaacttgaacaaacatatgttaaaaggcaaaactaaaaggaaagacagaaaggaaaattgtaacaacttataataaggaaccacttacaggtgcccagaagcaatagaaaagatattaatagtttttccatgccgtccaccccttcctttctcctatatgggaaaaaggttcaatctgttcaactttggaaatgatagtacaaagataaaaatggaaggacaaagcacagggtaaacacttaataaggttcaatctgttagggtgtgtttggatacgcgttgaaaccacgttgaacggagattttgtgcattccaatgtaaaaatgccaaatcattacatcaattaaagcttcaaagcctaaaagcaacatcaatctgataaaatcttttcatataacattaacttaagtaccaaaagctaataaggttttcaaggaaatataataaatgatgatttttgtaaaatagacaggtggaaaatgttaggaagtcttacatcgtctgccttaattctcggggtgcagcttatatatttgttgagcaactttacttagtgccaattggttttatttcagctgttgatgacattaattctgtcttccgagatgtatttgtgtcactggaacttgcttctaatttaatttcggttgggcaattggtggataataattgtaatgttaatttctcccagactagttttgtgcaggatcaggtgtcggggaaagtgatcaagaagggacctaaagtaggcagattgtttccatccagtttacttctcctatttttcctcattttcttgtactgctgtcccgtcctcattcaaggattggcataataaactaggacatccaaattcagttgttttgtctcatttaatagagaatggtctgttgggcaataaaactcttgtttctgactcatcctttagtgttcagtgtgcaaacttgccaaaagaaaaatctcccatttccccataatgctactcgtgctaacaaatgttttacaattatacacactgatgtgtggggtgtgtctcctgtcttgttgcattctaagtataaatactttgttatgtttattaatgactatagtcgttttacttggatttacttccttcgttctaaagatgaagtttttcctatgtttaagaatttttttgcttatattgagaaccagtttcagacaagcattaagattttgcgcactgactctggtggggagtacatgtctcatgcctttcaagaatacctacaacaaaaaggcatcctttctcagcgttcttgtccttgtacacctcagcaaaatggcattgcagaacgaaaaagtcaaaatttgcttgatgtctcacgctgattatttcttgcagcctctgtcccagccaattttgggttgaggctctgtcaacagctgtctttctgataaatcgttttccttcccaagttctcgagtttgattctcctttctttcgcctctttcaagttcatccggattatattgatcttcaaccctttggttgtatttgttttgtccacttccacctcctaaacgtcataagcttggggcccaatcagtcatgtgtgcgctcttaggttatagtatcactcacaaaggattcttgtgttatgttatgatgccacctctcgtcaatttcatttctctaggaaagtggttttctttgactattaaattttcttcccatgttttaagtcttcatctaatgatttgttaacctccctaatttttctgatatttctcattctatagaacgtttcaaaccaggtcatgcttatgttagatgtcagccttctttgtcccttttggctgctgatctgccacctgtgcctgctccactgcaacgctcgcctcaggtgtctcgtgcccctgataggtatgaatttgggcctatttctcttacagctactctatcaggcacatctgttcctacatgttattcacaagctattaaagatgcttattgggtcaaggcaatagatgaagaactcactgccctccaagaaaatttcacatgggacattgttcctcaaccccctagtgttaagcccattggttgcaaatgggtctattcagtgaagctgaattctgatggtactgttaatcgtttcaaggcttgattggttgcactaggtaacaaacagaaatacaggttggattatgatgagacgtttgcacccgttgcaaagacgacgtctattcgaactattctttctattgctgcctctcaggcatggtcactgactcaaatggatgtgaagaacacctttcttcatggtgatttggcaggggatatttacatgactcctcctccaggcctattttcctcgtctactggtgtgtgcaagctcaattgttctctctatggcttgtgacaagctcctcgagcatggtttgaaaagtttgactctactctcctttgattttcttttactcagagccggtatgactcctccttattcattcatcgcaaaaatattggtattgttcttatttatgtcaatgatatgaaattactggttatgatcatgccgccattcaacgtcttaagcagtaactcaaagcctcctttaatatgaaagatcttggttgccttaagtatttcttgggccttgaagtttatactgattctagaggtatctttcttcaccagcacaagtatacaaacgacttaatttctttggctggtcttgcttcagccactccaattgatactcctctagaggttaatgttaaatatcattgtgatgaaggagatcttttgtcggatcctttattatatcgtcagctggtgggtagtcttgattatttgacgattacattcctggacatttcatttgcagtccagcaggtgagccaatttatgcattccccatgtcatcttcatttggccgttgttcgccccatcattcgttaattaaaaggcacttcaactcgtggtttattttttcctactgggaagtctcctagtttggttggctacagtgatgcagattgggccggttgccctgatacacgaagatctgtcacaggttggcgcatgtttcttggtcctgcgctaatctcttggaagagtaaaaagcaatcacgtctatcgaagtcctccattggatcagagtatcgagctatgtcaatggcttgttctgaaatcatttggcttcgtggactcttagatgagataggcttccctcaaattgcagccacacctctctatgctgacaatactagtgccattcagatagctactaatccagtttttcatgagtgcacgaagcatattgacgttgattgccattctattcgagaagtattggacgctcatgttatatctcttcctcatgtcacgccacaacttcagcttgcggatatcctcaccaaggttgtacctcgtcctcgacatcagtttcttagcagcaaactgatgcttctagattagccgcatcaatttgaggggggatgtcaataagggattctgttattatgttgtttcttgtaatcagcaaatctgtctattcattgtatattattagctttcctgatttaggttgtataaattaggaaatagaattattgtgtcttaatggctgtaaatgcgtctttaatgacagtaaataaatctgtattatttatggatgaacagcagaatgaagggaaagcattcgagacagaaattctgacagaaaactaatggacaagtaaataaaagacatacttgcgaacttttttcagcctttttagataatttgttgccgccaatgaaaccagaagcccattttaagaagttggaattcaagccacttccctataaaaatatcatgaagatatctgttatggattgcactagctttagcctttaaataataatgtttatcattttatgcttcaaaacatgtttttaaagaacaatttttaatagaaagcactcactttcttctcatcttgtgcattgtcatcaggaagaagtaattcctcatgctccttgcccttttttttcactacttccatatgaaatactttaccccgtaaatcattaatagtaatgagttttgatgattgtttatcgtaacttccatcaccatcttcctttaaaatgtaaagctcggaacttcttccaggagcaagctgcaagtaccaaactccaggtgagactttcatttgccaatatcccaggttggccatcacaagggtatcaactaaatggggagtagtctttgtcccaaggatcagctgaagtccccgaggaggatcgtgatctttctcagaacagtgacctgattagatttcacaagagtgacaatagattagtacacagtgctcattaatgattgttaacatagaagagagacagaattaggaatataataattagagagattttaggaaaattgatagagcctctattagttggtttgggtatgtttagtgaagactggtagaaacaccaataaagatgtttaaccagatggaacatatttcattagttagaggtagaaggagaccaatcccatatttacagttaaacatatgacagtaatttatggcctcgtatgatccctttagccaatccacctagtgggaaaagctttgttgttgttgtgtttgtaattgtaagctaacaaggagaaaacagaagctaatgttatagacataactacacatattaaacatcctaattgcacagaagtgtttaatagaaatttaaccagtgacatgctgctggttcacaggctacaaatggctatattcattttcccttactgtgtaatgagcagagtaggttccccattttcttgttcttaaattgttctgcatctgtttcttcatgaaattgtttgtttcacatttcagtgttgggtgtgcctaggtccatggattagattttgttgactagctttaattgttatggtagaagtaaagaagccaaatttttatggtaatgtgcaatctatgctacactttgatgattatgcaggagcattatttttgtttttaagggatccctttggacaagcatattctttgggataagattaggcatttgaattgtagtagttgtagggacttttaaaagtggtgtcaattacaggaatgttaaggttgggaaactttgcttcatttttttgttgttgtcatttcttggctgttcttttttttttttttaaagagggcctctaaaagaaaaatttcttatataactttttttcttaaaaaagcgttaattatgctaatgaactagactactacacaaatagatgtggcctagcattctaacaagtagcaatgattatttaataatatcactaactaacagcttgtatttctaataaacaagatgcaatcttaccagtgaggacaagagcttcaagctcaaaaactgcttgcaatgtcctcgtgtcaccaaggttctcaagaagaatgttatccaggtcatggctgcagcatgagagatattactaaggactattaaaattcacaaaaagtagtcattacatataaaaactcagaaatgtattacatagacctccctcaaggcatggaaaaatcatatttatttcccccattcccgaaatatcaaagggaatgccttcgcttgacagaaaaatacaaagcattcagagtttataatttaattcaacaatttaagttgattatttatctaccagagttggtgtgtgtcactaattatgagattcattcaaatttagatgccaaaaactttattctttttaaatgttcaccccatttttacgctattaattcaaatttataacatgcttctttattaacaaagacaagggtacatttggactaacataaacattgacattagaatggtttaacgagtctaacagctacttaatggaataggttacggttactataaattttaaatgaggaagaccagtgtaatttattcacaataatttactcgtctccagttacattcaaacaaaaaattgataaaagaatcagtatattaacaaattctaaaataatacatacaatgcaataacgggctcaacaagccaagactcaggaacatcaagattcatggtgagagtcttagacaatggcatgtttgcaaagagtgcttgtgggccatttattgcagagtcagtgttgctaaaatcatcctgcaaaaatcagaaaccctgtgagacctagcatcaaatatcatgtctggaattatcttagagaattaagagttaaataaataagatataccattgttggtaccacatatctgtagtagctcttcagaggaagatcagcaagagaactctgtcataagatgaaaacagcattcaatacaaattagcaaatgtataaagaacttggcaacacattttgctggacgaaaattaaaagaaatatatcttgtagaaaatctcgcataaactatcactagaaatcaggagttcaatccttgttgctccattcttctaaataaaggctaaatttcgatacaagatagattgggccttcacattaatggatcttgcaagagggagtgcaatggatatcaaactaatcaagagccttcacctaaacagttaagcatttgggagagttggctcttggcaggttacaagctaaaaatatttagagtagaacagatgagggatagatgaattaactcctacaagcctattgatcataatgtgaatggactaatacatgcacatttggtttaagtgtaactattgcatcaaggagttcctttggataagcagctactttgggataagataagatcagacaattggttttacttggtgtaaagccgacatggttttttatactaagtttcatttacaactcagttgagggattggatagattttctttctttgttctctgttgtctgtatttcctttttattttaagaaggattttaacctcctgattctttgtaatcatatattctgtgtcaaaaataaaaggcctaaaaataaaaggcctaaacataagactgaataacagaaggccttatgaaagccaaattaggggaaattcacagttccacaacacaagggcaacactttggcttgtctcatccaatcacaatgagagagaaacaatttttttccatcttcttttttattccaaatgcctaaaaagaatcttattgaaggaacaatttcagttgcagaaaaaaaattattatataattatatatgtttgcagaacaataatagatttgaaccaaccactggattcagtacaattctcatgctgggctgaatgtatttccacaaaactcgaagaattccagacaacctctggctggttggacttaaaggatcaagaaccgcatcaatatgaatacttgaatttacattatttagaataatgacactgcacagataaatgatggaaaaagaaatactgacatcatataatacatataaatgagcaatccaaaaatgactaaatcataaggaaaaaaatgtttgagtgcattgtaactgataaaaataacctatgctgatcattcagaatctcaaaacgagcactttcagaattccgctcccgcatggccattgaagatgataaggccatgacaatatcactaatgaatttgctgcaaacaacataggcaacattaaagaattgttaaatattcagtaaacagaagtgattgaacaaaaaatctgtttaagttactataaatcagaggacttatgcacacccaacattctccaaaaatttcaagaactcaacaaatcagtagtagcagaaaaatgtaacaatagatgagcttgcacagcacataaacacatatgggagtttgctatttaaaagaaaagaaaatcataggcatattgaactgaaaccgtgtgtctgaatacaccatggatgagagtttatataggcttatagtattcattgcacataaatagaggatattcagtttcctataaatcagagattatatgcctataaactacaattattacaatgaattcagaaattatattctgattcccacatgcttatgtgacctatcacctatgcactttttaattctttaatttcttgtttctaaacttactttctattcaactgattcccatattcatttgcttgaatataaattctgcagaaattggtctatagctagcatggtttctcaatcaatcattgggaaacaatacttatgattatctcatcactttattctttgtatgatctttgcacttgcgttgtgccaaaaatgtcatgtaacacctcacttttaggctttggttttccagaccctccctccaacattttttagttaaaagaaagcatgtcataggaaggtgatatatgtaatgatccatagagaaatcaaacaaaaattaaaggtgaatcaaacagaacagaaaagttcaagaaaccttgttagcatgtcggggtaaacatcatgccattccacctcttcaataatttccacaatgtgctttgtcctttgtttaaattctattgattccagaagatgcagatcagcactcaaaaatgtgctttcgtcaattggataagttacctattaaagatagatattaaggaaagaacacaagattaataaggaaatttaaggattggtgaaaattcatcagcaaattttgagagagaatatttgtaaacaagcaatggaacaattattcatcagaaatcgttatactatgaaatagctgaagacaccaaaacaatattacccttccattagtgaagacagcattgacaccagattcaagcccaagcaccctatacaaagaattctgcacctgataacaagacgtctaattaatacaaattatcatgattaacagacaaaaaaatattagtgaaaaactctgaaattgtttaacatagtgcaaactaaaatgaaatacataaaagaggagcagaaatggaaaaaaaaagcagcgggaaaccatttccttcaggtattagtatcaaatagaaaaagtaaaagtatgaggcacagggttgggttgttaagaactaaaagcaaatgtccaaatggcaagataaactagaagtaccttagtcaaatgctttctcacttcaccggcaggaaattctaggagggcagacctatagcccttagatggtaacccattggcttcaccaagctcgcaaaccatatcaacaaatgcttgagtgcttcagcttccataggaggtgtaaggatgtaattcttctcatatagtgagcaaagctgatccaagaagtccaatacattcgtcttatgactgcacaccatgcgttcaaacatttgatataaaaatggtgcttccactttggaaaggaattgacaaaatcacagaattgaaattaaacaatctattaaaattcaaccagcttttgaattaaaagcaaaatccaaacacatacctatacaaggatgcagtaatttcaaagaccttaacaaataggaggctaaacaaattaggattccgattggcattaaatagaagacctacacgagcatttttggatccttctatctgtagcattatgttcaaataacaaaaacatcaaatatgcttaaaagcatcaaataaattgctccaactcataataggcattaggcacaataatttaaaaagaaccaagaagatttaaaagaaatgcatattggtattaaccagataatgtatgccttgttgaagtaatttcatcccattccttgaagtgatatcaacagcaagaagatgtgtcacagccttcgtatcatccattgctggtttggatcaaaacaatccacatgtgacaacaaaagaaacagactgtacaaaagaaattaaagattctaatatttaaacaacttacttccaggagaatgcaagtagacaatgtcatttagtatagattcctccccaaaagtaaacattgacagagatatgaaccttggtttgctgtcagaaataatctacaccaaacgattagcattagaaactggttatgagtatcatataaatgttcccaaaatttaaattattaaattaactactataccttaggattataacgttgtataccagcttctgatagaaacttagctaatacatcagtgtcagacattatttgtccaaaatatattgttcctgtattcttggagtctcatcattcaaggcatttataagagcttcctggtaaacacaattgcatagaaataagtagaggaaaaatttattctactaacactattaatacatcacagttatactagacaaagaaaaattgggcacaacgcaccttaaactaaagttgagcacatgcagaatatccaaaattaaacaacacactaacgaaaactacaacagtatggataagtgcaagtagtcaaacaatgataagtatacgaaggggatcttacaaatttatagatagctgtgagtttattagtgcattgtaagagactcatctgcattttactacataaagtgtatccagtgctatttattttattttgttttgggttgccatcattaagaaaaagcacatataaaaaacaaagagaaagaactcattttacaaagaagaccacaatattactgttagatattattacagaaagtagtattagagatcacctctcatgcttgcactgtaattttctttttctgttttgggcttcagttagtggtctgggtcaagcttatcagctagcccatagtcagcttctatcagttgtaactgatttttacaagtgtcaaagatgatatgttttaactacagcagtttagtatgagattatttccattattactcattattttgttttcttattttgtaaacctccttcattataaataagagtatttcgtgtggtctgatacgacaacacaacagtaaataattcttacatggtatcagagcaggttattattgacaaagaaataatgaaagtcgttcttcattggggacctactatcatcggtggacctttatgctcactgcccttcttttgatgaccctttctcctttcttctacacgccaaacagttttggttccattatcactgcagtgtgccttcgttctcgcatgaacagtaccagtaccgcaagctgctgcaaccctctattggcagtcatcgcgccttctatctccgacacaaccatacccccggagtctccacctcccggcgaccagcgtgcaccctgtcatgtcgccgttcaacgacgcacgcaccaccactctccagcgtgtgtgcatcacatgccagctacagatctgtgcatgacacctaccgccaggctgtccacatgtgcaaccaactcaacacaccgccacagcaaccccacgcagggcccttttccagcgagaaaagttcacgcacataacgtgtgacgtgtcacactggaaccgtatccttctgcctcagggcatgctattttcaaaggtgaacaatacccatcaccactacaggctttcattggttgcctccgaggtttattcggcacaaccccatgatcggaatcgtcttttgtttctgttgggtttaccacatttgtaacaagcttggttcatatgatatatatgctccagcttgaggggagtgtcaaagatatgatccgatatgttttaattagagcagtttagtatgggattatttccattattactcattattttgtttccttattttgtaaacctccttcattataaataagagtatttcttgtggtcagtatgacaacacacaacagtaaatcttacaacaagaatcaataatacagtttactttcagttgcacaaatcttttttctctttctctgaattctatcagaattaatgtaaacagagtgattataggtgattatgtaattagtgatatcatgtaattacagtaatcatgtaactataaatccttgtacggtacttattacactctgtatatataatttgctctttaatacacagcaattcatcacatttttcattttctctttctctcaacacttatatcttggccaaccaccttgtacaatataaaatattgtgaattgacagcagaattgaagaaaaagtacaaaaaaaaagaggaaataaaattttaaggcagtggaaaatattaaaaaaatcattacctcagtgggatcaataacaaggccattcatcaacaatgaacattgaagcttagacaaaccaagcttaaatacaaacttggaactttcttgtgacaattccttcaacttttgattcttatacagctttagtaatatctcttgaggtgggaatttacctttgatctataaaatacagagaatatttaattcatgtttaaaataaattagaacgtaatgttactgctaaaatattgaagcactacattagtcaaatgtcagaaggatactaatcaacaaaaatactataaaacttacaagattgtttccacaaacactccttcaacatggtgcagttcaagagcatcatctgcattgccatctgactcgatgtgtaatttgttaacctacaaaaatgtacaatatagttcctttaattgaattgaaaataagattagttttaaagtctcaaaacaactgctaaaatgtgtttcataaaaatcttagatataatagcatcatctatttgtgtatgctaattccaacagcataaacatttttatttttatcaatataataaaaacctctaaacaaacctttcagatttatttttcccttttttgtcatgttaatggggaagagatgaagccacttaaaaggttgtcaaatgttacgcataggttcatgattttttttaaaataaataattgaattcataggaaagtgattatctagaaatttgcatagtgatagacaaggggaaaatttaaaaagaaaaaaagattatgagtcataaggttgaaattcaaagttaagtcaaatcaagcacttggaaggttcaaattttgaactttaatgaatcaaatagatatgtagttaggttcaagatgggtggagtaaaatgaaagaacaacataacaatattaactgcatctgccacttttctttcctaattttggatttaagtcatgtgcttctggcatatgaagttttaacttttaaaccagtcgtaagtaagttcatggaaagacattgaactgaagatgacactaatgactaagtatcacactcatacattgctcaaaaaccggtaagccatttcagcaccataattctcgttgatataactgaagagacatataatctgaaaagagaaaaaaatgatgtcataaacttgccagtgaaactataacatatagaaaatttctatgacatttatcacacacacattcctgaacaacaaaaggtaaaaattaccgtagttgaaatatctcatcgctgtgtcttttgtagcatgattttctaactgtgtaacaaactcgaagaatacaacacaatcccaaacctcacaggaaaattattttcatacaatgatatgatcatatcaatggactgcaaaattccaaacaataaagcaagtgactaagattttgcttggaaacatatacaatgaataatgtgaaaatgttaagcttgaggaaaaaaaacttgcctccagaccacaacgggttgctggatcaagaacaaagacagcatggaaaaggtttttacggatgtaacgtagctgcccagggaaggctggcatcaagaactaacaaaataaatgtaaaatatgttaggttaggctaaatctttacacaaacagtacttcagtcagaaaaatctcttgaacactttgattctatattttttaattaaaaaaataaagctaatccaaacacactaattcacctcttctaaattgttactccaccatttatatttagcatcttcttccaagttgttgagataatgaacatgactagaatgaaaatcaactcgaaatatactggactctggaggaggtgaagttgagagcaatttcttcaaagtgcttgaggaatctgcaaatagtgagaatatcaacaatacagttcaggtgtatgtacatatcacaaatgagttttataaagagaaaaaaatggtagcaattaatagaagtttaaaaaattaagggcttgtccagtttgagaaaaatttatgtttccataaataattacaaaatgccaccttggtaattatttatgaaaataggaaatgaaaaccaaaacattttcttaatccaaacaggtaatcgtgccattttttctatggaaaaaataccattaacttcttcacctcccactcatcttccctcctttcaatacaaattgttttcttgggagactatccaatgttacttttgaaaacaacattttcttaggtaatatgcatcagatgactatttttcatctgtcaattactaggtcagtgaatagttaaacagaaattagtgcaatagtaaaaatatgacaaaatgaaaattagatggcattcaccttcaattttgagaactgatcagtcaacaagagatcctgacggatcaagtcaatcaacctaataaagaataacaggaaaatagtatcagaaattcaaaaatttcagcactgccaaaccaggatcaaaccactgctaaatatttacattcttagaacctaaaaactattctcccaaacataataacaattagttgacaaagcatttacaattatatataggaaatgactttaatccaacataaaaaaaggaattccatacgataagtaagatactttgaataggctcaactcaaataaacacaaaaccaaaccataggtatataaatagacctgggtttggctcttccaatcttgtgctaagtgctaactaacatcaaaagaaccataaatatgagacagcaaagtcttaatgtgctggaggggattgaaaaatactaactctagctataatagaggcacaaacatgaatacgacaagataatgtataaattatcagtaggaaaaaaagttattacagatagaggtcaacatcttcgacattgactaaagcaccattgagagccattaaagacttgccaggtgggaccatccgctggtttgccattatttcatctcgaacagaatcatcaagctgtcatgagaagcagttccgtaagaataatagacatttttttccaaggaaaatgtctaaaaatatgtgagtgcctaacataaataacaattaacaagattatgtaccttcatgcgagacaaggaagaaactatgctagggaagttttgattgatttcctgcattgactgcagaggatcagaagcacggacaattctctgtacagtttgatgtcctagatctgttaccatcagaaagaaggggaaaaaacatagaacactgttcattgaagccaactgcgataggattcagcttccaatctttccaattatcagaggaaaagagaaaaatattttaaataccctttaattcccaaacatcaagtgtgtctgatacagttgatgacaatagataatcccgaaaagccatgacctcagatgttaagtcaggtttacgttcctgtgagtaaacaaaaacaggtaaatttattggtaacactagtgtctggataattttgaggtggggcaataaatatacttcactataaatattaatatacttttataatgttatgaaattaaccaaagcaaataatgagttgacaaccatatggaagcagaaaaaaaaaattaatcccacaaaagagactaggaaataaatttctgattcaaaactatgcactcttttctgttcataacaccacaagtatgcaaaaagtgggcaatgccaaaggatcttagcttccttcatcctgccaaaacctttcatattaatcgattaaaaggcattaaataatatcctacagtaaatatatcaagctgcaaggcagtgagaaggaaatggacacaactttacattatatctcgcaaagcacataatattatcacatttaacactcttttataaaaaaaaaaaaaagaaatgctagcaacacaatctctaacacacatcttctattattggttgaaatttattgaaaattacaaaattctcattatcatgtgtgtgtccaaaaacaaatgtgagtttacacaccagaagtttagagaatatgaatcctctgacttcctggctaagatcttcagttcgaggatcctctaaagtcacacctgcaatcctcactgtgttaatgagagaatcaatcatttaatcacaagtaatctttcttgatgtatataaatatccaaccattttaattggattagcaatatacaaaacaccaaaagaatttgtgaatccagaaataatttaacactaagaaatgtacttttcaattatctatttcaaagttataattaataaaatcttcaaacctgaaactcattgtaggaaaacaagatggagagtctttaacgaacgataaacttataaatcaatgcattgaggtaaggttggagaaggtcaatgctaactaactcaagtaaccagatggaaagaccataaagggtaaggaaaacttctttaaatagcagaattagaccttgagaatagtacatattaccatgcaaaatgaatgaaaggacattgttggaaactgcaacaaatctattgggaatagctgaatttaaagcttagattcatgaaattttagattcatgcaaggtgctttaattcaagtacttaggtagttgcacttgtgcttattcttcttgtaaatgtaatatgcaattaattaattcaaaagtgtgtgtattaactctgctagtgctaatcactcaagcatgtcacaggtttcttagtccaaatctaaaattgacatcgtaaaaaaaaaaaaatgcaagttcaaagaaaacttacataaagagtattgttaggatccaattgccccataccttgcaattggttcctaacaaggataataaattgtcaaatcctaggaatagcaatgcaagcatggaggtcatgaagtcaaagaaaattaaagaaagaatacttttataatttctcgaaaaatatgacattttaaaaattacaaaaattacaaagagtaaaaaattggaaaggatgatcaggcaatcacaatttcatgtactaactttcttctacaattgactcagtatgcaaagttaaagagaactagaagccttcactcaacatgtgtcaatcattctaacctttttttactgtactgtcatccatggccttatattccatattcttcagtgcaagttccacaccataaccacccaagttcactgattcaccagcaccaacagaactacaatgattgatatttgattcacatccagcaggcaacactggccgtacaacatacttaactttcccctaaaattattcagtcaacatattaatatagttgcatgggaaatatattagataagcattacatttttttttcaaattccaatcttaatatatgggacaacaatataaatctgtttaatgatttcatcgtttcacaactccttgactattaccatatcttcaaaaaacattagtgttgcatacaactaacatattaatctaaacttcacttgaagagatatataatatctgggatattttataacacagaagatggacatctcataattcaggtgcaattcaaataatttacattactcttatcagttttaaaccttttgtttcacattcttctctccattgaaatctcctggggttttatcaaaaaatgattatgtttacatcatttgatacttgaaagcaaatccattttggaggcttgtacagcagaatgctaaatgattataatagctgccaaaaactacatcacattatattttctaaagagttaggcaaacgctctgttaagtaaacaaaagtaaaaaagtttttataagaaatgagagcttttattatattgggtaatacaaaaatcattttacatgtgctttttaagtaaatagaagcatttagaaatgcctaaagggcattggttagcaagatcctaaattcctatagttaataccaaaacaagaaataaaagttaaggaatgtacctctttggcagctttaactaaagcaacatgaaactccttaaaacaattggttccaagtgcaccgtaaaggatagcaactggacttccaacacttaactcataatagacgtggtcaaaatcaaatatttcaggtgtctgaaatgaatcacctaccctgaaggcaaaagtttacaattgacaacaacattggaaaatttaaaaaaaataaataaaaaaaaaaaaaaaaaaaacaaacagaagtgcactaatggcaacaaagtactcacagctcagcagagccctgaagccactccagtaattcataaacatccaaaaacaagtgttcaccggtatccacccaacaacattttcctccatggcttttcaggtttacaccatgcaggggatctaattttctcctttcaatcttttctgttagcaacttttcctcagtctcatcatctgaataattttcatcacctaggggaaaagatgcaagagattcttccgctaattgctggtagagcatcagtctaggggatgctgatctcagcataagagagaactcaaataatgattttaatggttcccttagaagagggcgcccacattccaaaattttcttcagacaatctttagctgtttgagatctaacagcatcgttatcagtattaagccaaatctcaacgaagtcccagaaaaggtcctttttttcgttagataataattcactgtttccaaacaataaatggatgttataacatggaaattttacaattggccaaaaattgtagacagatttaaaaaaagaaaaatagtgtatgataatgtaaaagacaatatgtgctgcagtcgaatgctgcatatgaagtaacaaggcatttaactcggttgaaaacagtaatatatgttgtacataagaataagagggaacgacacaacaaaagtatttcacactcatcctcataagtcataactaaccacatgatgtaaagataaatcaaattccatgattttcagttcagccgaatatttccatatcatccatctatatgaatcataagacgagcaccatgtgccaaacttaataatctgatgatctttttgtcatctaaacaatctcttccgaccacaaaagacttcagaaagaaaaacaatcaggaaaagtatcacataatgcttcaaaattccaccacctgacccccacacactactaaatttgagttggaaattctagttttagacactacagtccattatgtcatgtctaactcaaacaaatgacaatgatatcccatttcacactcctttacacgcattcgtatacttcaacacaatttcaacaaaacattagaaacaagtctaaaaataacaccaccccacattacaaaaacacataaaaatgtttgaaaaaggaagagcaaggacatacgcagcttccaaaagcaggggagttccagaccacttagcacggagtgcagtttgaacattcttgggtctctgaggagtgtcagcaatggctgaaccaatattcacaacaccaacacaatgagaacccaacatcgagatctccaaaggcaccccatttgaatttgtggagcgagaatgaatgtgggttcagaattgatgccccatttgcacgtgcgacagctgaggaagtgagaggagcttcgaaagtttcgatctttgttctcacttcgaggactcgcaggttttttgggaagagacgaccaaaggcgacgactgcactaagtacgttagtgcagcgatcccatgttacatcttggttacttttttagataataattacatttcggttactaaaaataaaaaggattttctttataaaaaaaaaatacttttttgcgcctttgataaattaataacaatattagaagttattcagaaaaatgtagtattatattgtttatactttatatattataatatgtcagtttcttaactatttaaatttttccataaaaactatttagagtttttaaataagttcatatatttcagaaaaaaaaatgaattttaacttataaatattttttaattgaatttttttactccagccagcgatgaaaagttcttaatgttaagttgagtgctgaactcttcaatggattggccacaataatacatgttgcttctcctaatttcgcaagtgatcatttcaaaaattattttttatttaaagttgtataactaaatggataaactcacactagctgttaatttggaatcaatttgattccttagaagatatcataaaggaatttaggaatgtaataatattatttggttgatcattttttgagtcagatcatctattggtaagttattacctcacaaattagctaatcaaacacgagctctttttcaagtgaatttcttttttactcctcaatattaatagtcttttcagttgttgttcctcattggattctattaagtataagaaattgattaaaattatagtttaattttgatatattttttttaaagatttttatattatcaactaaaaaaatattattaaatgtgatttttttagtaattatacaaaagtaaattttattatatgtaatagatgacaatataaaaattttaaattgtcaatgtattttaattatttcttaattttttttaaataattcaagaaacctatgaatcatgtcccttgaatctttattctccatactattacatgcttaactcatgaggctgaactttgatatcaactgcaaaacaagagagggaaaaaaaacataagaaaataagaaagaatttaaattatgtttttgagatctcttaaaccttttgaaattgatcaaaagctttttgaaaaactttagcaaccaatgtaagaatgaaagggttttgtgaactaggagatgattcaaatgcaacaaaacattttataaaagcttttttttcatgaaaaatgtttatttcatataataactccttcttcatttgtaaaaaaagacaataaagataagaataggagaaattaaaataaatgattcatggaaaaatcttgaactacatttaattcttgattacttagtagttcatttacgaaaatactaattgataaaaatcttaatttcttacaagatttaaatatgtttttggttttaataagttagcattttttatttattttaatcttttctcccaaagttgtcagaattattcataaaataaatctcaattcactgaatatagctttttataatcaccttaagaccaaacaacttttgtttttccttttagcttctcccaccacctcaatagccacaaacactatgtaaaaaatctcttgcccaagaagcacttttgcctttgatcaataacatcattaagtactttcttcaagtgtaacacttttgtcagatcttgtacatacatcctactaggagataggtctaaactccccaagccctgtgggtcgtcaaccttgggattagagctatggatgaatttgagcctcttgaaaaaataccaaatctatgaaattcttccataaacctcatgatgtcctccttcaagatatgcaaaaagctttaatgaatttaatgtagattcattaactcggcttttagcacttccacattgccatattgcctcctttacctccttctccccaacctctcaaccaaaccaacactatcaatttgtgtgatttggttattttatgtctttcaatatttacaaaactaaatgccaattaaatcttgaattactatattagtattttagtgttaaaagtttaaatgggagctagtgttaaagttgtaaattatcaaaatatcacgtttacgtttctaacaattaatatgttgttaattagaattcattatggatatgattcatgaattaagaaggtaactgaaatatcttattcttactaggtgatattcttttactagtaagaataagatagtgtcaatttcttaaacaaattaatttaaaatttgaatgttatcttatgttatttttttttttcatgtttttttattacattatgataatgatatatatatatatatataatatatatatatatactatcaaataaatttaatttaattattttataaaatgattatgatgtacagtctatatttatgtaaatttagataaaaaaatgatttttttataattttaacatgattcataagaaaaatatttaattttgtaattttttttatccactaatgatcattattatcaaaataaatatcacgtttagtttagccttctttattagttctctgatacgaccgtttaacggcgcttcaatttattcattcttcttagttctttgacgtgaccgtttcgttctttctaacgacgcttcaattattaatctataaatacattgctattgtgtctgattcttccacaatcctactttcatcaaaacaggctttgcattgatttatggttcaggatttctattcaagaaggaagagaaaaaatctaatagagggaagaagatgagagaatactgattttttcttttgacatgcatgcatggcagaaagcatgttctctgcgtcttccttcttctcttatgttttctcttctttctcgcactctttagaacaattgcttggactgatattgaaggtaaggttttatctaatatgtattcatcttttaaggcagagttcttgattgcattgataagatatattgcaggaaattattaaagaaaatgaccaaggtgacttgttctaaagtattgtttttcaagaaggaagtattgttttgtctttagagtcatttgagtcaggtagaacagtttcagtgggtgcaacatcgaaagcaaaggctgggaaatcaactgccattggtgtttcaaaacatggaaatagagctgtatcttctgcatgttgatttttctttggttaagtacttttagatttgttttgatttctaactatttgtttcatcatctcaaaagagagttgtggcaacagagggtgccaagtctgatcaatatctgttcaagatatagcggtccagtctcaagccttgttaagtaccaaggattcaattaaggtattgtaggctgaactggagtataccaaacgttgcttaaaatcttataaatgtggttggactgtcgtctggattttcttggaagcaggaagatcgagagagattggtggtttgaaggtttaagattgaggaaccacgtattgagtaaaatcaagatcttgaggtgggaattttgcattatcaaataatgtttgaaaaactgtgaattttactgtagctttacaagatcatgaaggagcataagaaccccaaggttcttagtgagggaattttgcggatggtttctgctgttgaagattttggtgtctcacatataaagcttaaggtgcattatctgaatttacaaattttttagatattttatttgttgttggaagtttgtatggtttattgtaaatcctattttgcaggacttaattgatttgcttaatgaaattgggctgcagtcaagtaatgctgctactagaaatgcatcaattaagttcttgggtgttctgcatagatttgttggtcaaggtcactttgcattaactttcaaattttgatttctctcaattttgttttcaaggctctaaggtttttctccttgcagacattaaagggtttcttcttactgatgtaaagcctgcactgctcagtgccccggatacagagtatgagaagaatccattttaggtatattatgtttgttgaggttagttctatgcagggttttaaatagaatgctatagcggtgtagcagagcagagtgatcccttcccgctacgggtgctgctgtagtgaatcagtttagtgtagtgtccatagtgaagcaaatagcgggttgaatagtgtctgtagtgggtgctatgtattgattccaaaaaacccctctgaatagcgacattagggcttgttcagagggctatttgtgggatttaatttcctaaaatcatatttgtagatgtaattatagtgaaatgataaagaaggctttgatttaaaaaatgattgttgatgatatatataattcctatctaggaagctcgtatttaacgtttgttggtatttacttgtatgttttgtataagacgtctagactttttgttgttaatgatgaatgtcattggtttttaataatttttattatttttgagaattgatatgtatacagtatacttatataaactataaaaatttcaaaatagtggctatccgctatatgcaatctcgctatagtgttttttgagccagccgctacgctctgctatccgagatttaaaacccgggttctatgtagtatcatgatttcctaatgcggtcatttattttattttgtttcccctgcttcagggagcatctgtagttaccaagagaattgtcagggaaaaagacccatcttcaactgcagttgctggtgcactggatagcttgcctcggaggacatcagtggaaagatctcaccaactctcctgaagagcttggaaagccctgattggaaggtttggttgataagagctagcaatttgcttttaattttgtattcaaggttgcttttagctttcagtatttgaggaagtgtattatggtgctattgcttctaatgttgcagtgcattacttattataggttgtatggaatctgttgatgctgtaaacaaaataatggaagaggctaataagcgcattcaagcaactggaaatgacactccattagcatttttttttataatttttttaaccttatgctctctctctctttactctcccctttcatcaacttcctccccaaatggataagttgcatggtatcttttggtaattattctatatttctagctgattattttgttaattttcctaactgttttattaccaggtgacttgtttggggctcttaggggacgacttgttgataacaacaaaaacatttcatggcttccttgacagcaattggcaatgttgcatcagcaatgggtcaagctgtagagaaggcaagcaaggtaagaggattctgttctgttttcgtatccccccccacccccccctccccatttggtgctgttttgctgtttgaacatttctggaaatggtttgttgcagggtattctgtctgatatattgaaatgtcttggtgacaacaagaagcgcatgagagaatgtgtgctgaatacattagacgcttggctggctgctgtccatctggttgaaatggtctgtattctgtgctggtcctgtgttctttcattcttttgtcttggtatctgtgtccttagcatggttttcctataggttccatatattgcaattgctttgatggactctaaacttggtgcagaaggacgtaaattttttttattggttatcgaggcaactttctgtgttaagtagttttgctgaagctgcacaactgctgaagcctgcctcttctgcaatgatagtatgatctggttactctgcattctgctttttcattttttataccatttatcgaattagttctaatgttccatattcttggaacaaaatgtatgatgacttcttcttaggataaatcttccgatgttggcaaggcatcagagcttgtattaatgagatactaagagctagtagacatgaaatggtatgtgtataagaagaatgctgctttcttcccttgtttccttaatattcttgtaatatcaagcatcttcattgtttacttatttttagattgaaaagatggttaaagacattcatggaccagcaccgacactaattgttgagaagttaaaaccataaggagcttttcaaggcatgttctttggttcattcttctttgcgaatgttggtgaatttgtgcttatatatcttcccttactcctcctttttatggtctttagagtcatttgagtcgggtagagcagtttcagtgggtgcaacatcaaaagccaaaggctggtaaatcaactgccaatggtgttttaaaccatggaaatagagctatatcttctgtatgttgacttttatttggttaagtactttcgatttgttttgatttctaactatttgtttcatcatctcaaaagagagttgtggcaacagagagtgccaagtctgaatcaatatattttcaagatcagtctcaagccttgttaaatatcaaggattcaaataaggtattgttggctgaactggagtataccaaacgttgtttaaaatcttataaatatgtggttggactgtcatctggattttcttgcaagcaggaagatcgagagagaatggtggtttgaaggtttaagtattgagcaaattcaagatcttgaggtgggactgtttgttgaggaataatcatgcataacttgaactatctataagtattgaattataataaatgtgcctgcaattttcagaatgataaagtatttcagagaggaattacataggagactcttaagtgcagattttaagaagcaagttgatggacttgaaattctgcagaaggtgttgttcttttaaccttctgaattacattcttttgaagtgttgagtgcactagaaattgtacaaactgctattgcatatttcaggcacttccatccattgctgaggaagttatagaagttttggacagtcttctgaggtggtttgtgttgcagttcttcaaatcaaacacaatatgtctattgaaagttcaatttatttttgtttttgttgtgatttcagttttcttcttttcctttccttccttttcaaggagatgtctgctgttagtcttaactttattcaatttaatttataggagtatacttacttgatagagtcttatcttttcttaattgcttaggtgctggaatttcttcctgaactgcttgacactttgaaggacgaggggttctcttgaccgaatctgaaggggcagtgtttcttctgtgcctagtagagaaggtttatattagcaactttaatatttgtggcacctgaggatgttgttattccagtgaatctttctgatggtatggttgatttcagcaaatttttggtttacatagataatactagtttgactagtgtacttccttgggtgttacagatgaggaagtcacaattcatttcttattttaatgttgcagttagggcataacattgagaaagtacgagaaaaaatgcgggagctgacaaaacaatttgttgccatatattctgcgtctaaatgtttcccttatatattagagggttttcgctcagagaataaccgaactcgaattgaatgtgccaatcttgttggatttattattgatcatcatggtgcagaggtattgttactagtgctttttaatgaattcttttcctattcagtattttccttgcatagttactccttgcattatgtggacagattagtgggcagctaaagtcgttgcaaattgttgcaagtttgactgcagaacgggatggtgaaactaggaatgctgcattaaatacactagctactggttttaagattctaggtatgccatacactgtagaactccatctttctggtttccaatgtgcttgaaaaatacttgtgcctagtgatatatatatatatatatatatatatatatatatctttgaaaaggaaacttgttaaaccaaaagtacatctgtgttattttgttgaattgggttgtgtttttgcatcagtgtgtaaatttcaagagttcaatgtcctttctatggatgaccacttgaggaacttatggtagagcagtttcagtgggtgcaacatcaaaagcaaaggctgggaaatcaactgccaacggtttttcaaaacatggaaatagagctgtatcttctgtatgttgacttttgtttggttaagtacttttcgaattgttttgatttctaactatttgtttcatcatctcaaaagagagttgtggcaacagatggtgccaagtctgaatcaatatctttcaagatatagcgctccagtctgaagccttgttaaatatcaagttttttccaaatctttataaaataataaaaagttaatcaatttattcatactctgacattttaaaactatatattacattaattatgatatatatatatatatatatacacacacatatatatgaatgaaggcatccaataattttaaataaatataattttttgtatatataatttttaaaatttaaattcagtaattttcagatgaaattattcaaaaaatattgtaaaagatgtttcccgcgtgtagttttcaaccaagacgctgcacgtgaaagatcccttagatttgtcaaacatgagatgaagaacccatggattggatatacaacaacccccttcgttctttacttttcttttgtattttttaggtagaaagtctgcatttcactgctatcgtgcttaatatatatatttactaatttattaacaatataaaaggttgttcataaccataaaaagagaaaagaaaaagaaaaaaggttgttcataattaacaagtcgcatttcactgctaatgttcttgatgtgtctttgaatggaattgaatcatcgaaccgaaaagttaatcttcctttttcaatatataaaacattagttaagaatcaagttttttttttaatgtctctctcggcgtcttctcaattaaattctacaaactcgttaagaaatttaaaaataaagaacctttactgagatataaatttgtcacaaagaaattttttatagaataataaatatttaattgaagaaatatagaagagaacaacgacaaaaaaataaattaatttcattctataaaactattgtcatgatagcaaagttaatttagttaacaaataattgtgtatctcttgtttataacaactgacttgggtccacgtgacttctaaaattgtattcaggcaagcaagcaagctttggtcatcctaagactaatcgtgatattcttaattaattcaaggtttttgtttcaaagctatactaagaataacgtagcaaaattttgtattctacttctacaagataacattccaatttctaaagaatgaagagaagcaggttggagaaaaggaacaaatgacgcgtcaaagggctgctgctgtagtcttaattggccaaattggcgaaacgaaacaccgttggtttagaagacataatcacaaatttcataaaaaaaaaaaagaagaagacatggtcacaaattgggaaagttattgagactcctatgttgaatggactcaggctgcttcattctaattcttctgttaggactgtagaaaggtcattcgagagtaccctggaaaaggaggcagcctccaagaagacaagaacagaagcaaaagattattttttccaagattggtgctattgacaacagatgtactaattcgccgcaaacatgataaagataacaaaaacaccttcactaacagtttaactaatttactagtattatgcatctgcttcttcaacaacaccaataagcgccaccacacaggaagctcaactagcagatggtggacgctgctgtgaaagaaaaggtgcttccaccactgttcccttgatgttgtcaccgacaattacagtgtctccttccgaagcagctcgcctcttgatgtaacctaatccaaagtgttcagattccttccttccagatgtgtagctggttaactttccaacctgcaaaacttgcaaaaaccatcaatttctttccaactcgttaaggagaatgttaggattacagaaagcaacccaacatcacaagcactgggctactgactcagggaaccactattagttatccattttttttacaagatggttctccagagaaacattgtaactggagttttcaccacgtacctgtcatctttagtttcaactgggaattacgctatgcaaatttccatcttcctttttaacaaatacataaggattgaagaaaaaaatagtgaacatttttcaaaagaaattatatagcacctttttcccatcaactgtaataatgctgccaggttctgcagcagcagaaagatgaaatccccataacctctgcttgattccatcatatgttatgagcctagatatagtctcctgacctttgtaacaacctgaaaaattcatagtcagactaattattcagcaagtttcaacttttacgcagatgggtagcggcaaaagaacagttgcacacccttatttagagaaaccgagttccaaagacaggcctccaggacattgaattcatttgtaagctccattccaggagtgggccttcctaagaaatcaagttatgatcaaattagataaaagaatcatagggagtgaaactatatacacaaaaaaaaaaaaaaaaattactcgcatttcaaaaaacttccagtttcattatccaatagaatataccattcaacccaaagcaaatattaaatgcttacaaatcttctagtagttataaaaaccagtcattcattttttggttttacacaaatatcctccataggaagaaatttgcttgacatatgatcaaacacaaaatgagaacctctcccaatagggactgaaactgtagttcaccacgttatggggactatcttccattacttccaaccctcattggtaatactagctattcttaactagaaggaaattgtgcactccacaattgacatctaaatgcatttgtattctttcttgcaccaaaagtccgcatgggcttgaagcattttttacatacaccggaagaattaggttgaaaataacatgatgagaattcaagtaatgtcataattcctaattccagtgtgcaagtgtgcaactgtgcaacctcaattttcattagtggaaaattggatcttggggaaaaagaacaaagatttatttatgccagtatcattagtctccaagactactcctaaataattcctaaattacgacagaaacaatatgcaggaaataagttagtatgctatattattcaactgtagaaaccaatgacagacatagaaatatgcacacaatctaaacaattcagtacctcgaataatccgtaatttattccatgcattagaacccattgggattgctccttgagtaagaatagctttccaaatggatgcagcagccgctggagacatcaataatgaaaaaccatcttcagaaatgatgtttccaacccctatagttacaggctgcttatcaacctacaaattacaatacaaatatatttgagagaatttgttcacaataataacaaaagactatacaggtctttaagctttcaacaaaagggctaaacaattggaaaaaacaattactaggttttggtattgcagttgaaagtttactactttggaagtaacacatatacacatgagaaatgctaacaatacaatctctagcacactcttttgaatacactctctactcttggctaaaatttaatgaaaatcacaaagattgtgtaggttcactacttcactccttatttaatgaagttcattcatgatgttttagttttccataaattttaaccaataagagagatgttgttagcactccttttcaacacattctaaattttgaagttatgtaaaagatgcaaccacaatccatgggaacttgttgccaaaacaaaatttgcaattacaaaatatatgctcgttaaacaaccaaaatatgcatttctgacagtaagaaagttatcagtgagaaacaaatacatgaagcttaaaactagcaaataagacacgattgatcatgtaagttgtttttggacaaactaaataaataaaggcataaacccatgcagtcatcatcaaacacacaagaccatttgtatcttgtagagagaaaccggtgatgaaaaagacaactggtaattagtacacatacttcaaaaaagccagtttcatccagcttacattaaaatgtagatgtgtgccatatggttttccgacaagatcaccaaggttcaagttctccatcacctgcccattcattatactgaaaattaccaactctgtcattctcaacacaaaataggtataattatgtaacttacttggccacttttgggtcccaccaaaacaaaaaaactggtttgcttagttatgtcttgaatctctaccttatcagcaaaaaatatgtaccttaaaatcattacatgtaaaagatttagttcatgtatttgataatattcatcaggaaaggcaactatttggtttctctctttttccttttagttttacttctgttggtaaatccttacatcacaactaacaagaaattacctacttgttcagcatttcagtaatggatgtacaggtctctggtgaaaccactaatgttatcgcatttttctatcaaaaaccaacaagagaaagtggtcagctacatgataattaattatattgtagaaaagacaaacaaatgaattttgtgagaaggataagaaaagaaaatcaccatgagccatgcatgtgcgatatctattgttcgagctgttggtgttacaaaaacagtgtcacatccctaaggatttcagttagagatccaattacttaatcctgtattataatatgaaatataaaaaagaaattgacaagaacttgccaataacacataaatgtagaaacaatgctactttctttcaatacatacttgtccttcatgtagagattcgaagtttgcagtactctggttgtgaaggaactgaatgcgatcttctccactgactttgtttcaggtgagccaaaacatttgcatgtaaaattaagaaaacattgaaatatgtcaaggaccaactcttaatagcctaagaaaagcaagtacctcttatccgaccgaagtgtgaaagatccacaacctatgccatcagatgtcataaagaattaatttaagcaaacaaataaatcctacattatctaacaatatattaatatacatttataaattggtaagcatgcaattataagacttcaaatttgtattagcttttacaaaaacttgatagcaagctatcacataatattttgtagaaactctagaattacaattcaataatctacaaccttgagctaatccaagcccacaaaatacatgtaggttagttcacatttactgtattacttctatttttttaaaattacagactgaataaaagaagttccagagtaagtaatagaagttacaggctgaaaaattaaagtctgtaatttttatgagtttgtaacttttataactcaaaccaggaaattttataagttcgtaacttctattactcaatgtgtaacatttgacataaagtcttcaatttcaaaaaataataccaagcctgtatcttttactatttaattgtagcatatgatataaagtctactgcaatttcaaaaaacaaatagtacagtactcctttttttagagggagcaccaaagtgaaccaccaaagtaaaagagaattaagaaccaacgaaataagcagtgaagatttaccatattttgtttggccaatatgacaaagcatctctagaaccataaataaatcaattcaaagaagcaaacaattaaaacttgcattgattcttgtggtttatattgtttctaccaaatgaagttgttcaagcagagataatgaggaagcacattaagctacaggcgttaaaaaaaaataaaaaaaaaaaaaacactaaataaattacataccacaaccccgttgtccacagcagccagtgctacatcatcattatgaaatgtctcaatgatcccttcaccagaaatctctgcgcctgcagttttgatagtatcctgcaatgagtaaaattaataatttgacagtaaaaaaattgcacttagccacctgatttctcttctctcaagccatatcataagggtattccaaaaaacaagagttattatatatttttagtccttatatgttacactcattttaatttggttcttatatgacaaactttcaattcagtccctacacatatcctttaaatttagtaatcactgtctgttgttgatatgatattgtctgtcggaggtataactcaatgtagtgtagaaccaaataaaaaatgtagggatcagaaatactctatttttttgtagtgacaatcattttcaactcaattgctaggtaaacttattcgtaaatccataccagtctcagtatgaagtggcaacaaacagcaagaacaacattgaaatatattatacaaatagagactaaattgaaagccttttacaattaggaagccttttaaaagcaaaattatctgttttttcttaaaaaaaattgtaaaatcgagttctctactgccataagttatcaatcacaaataacagcgcatagtggctatttctaaaaatgctatagcagcatggtcactattctgaatttttttacagtttatataatgtatatccatataaattctcaaaactgataaaaaaaattactcaaaattcatgacattcataattaacaataaaaattcataggtgtcttacacaaaacatacaagaaaataccaacaaaagtcatggtaattggtaaccactatccactaaggtttaagcctctaaggttagaaataactaaattgtctaaacgtattcaaaataaaagttttctagatatgaatcatcaatcatcatcttctaaatccaagtcaccgtctttatcattttcactactgttacagctgtagatttcttcctcttactcctcttgaacataatcaatttctaattcttctgctgaaggtgcagcacctctcctcagttttatttgatgcctagtgcatgttgaagtctcacccacaccagctaaattggcaacatctcccccaatcaagttgttgtcacagtcaaaatccaaatcatcttcagcatcctcgccatctcctcatttctcccactaaccattcatcactaccatcaatatcatcaaggacaatgggatgacatcacgagtgtcaaagtgttgcttaagagcttggttatatttaatataaaccaagtcttgaatcttttgatgctcaagcctacttctcttcttcaagtaaatctatattataattaaaacaagttagtttcacaatcattgtatgaaaactctatatatttaaaacttctaatattgacgtatgtgctcaaaagtactccaattacgctcaaatccccatgaactacaagttaagctcagtactttaatggcaagcttttgaagatttggagtatgcaatccctcctccaccagtcagctgtaatgcagtgcaacaccttatttattagggcaactaacttaaataaattgtagtgaaattaaatttcaaaaaaaagaaatgcagttttgcacttaccaggagctactgtagtcctttgccttattgccactttatacgtagacaactcgcttaaaaccttatctacaggtttgttattttcactaagcctctcaatgcacctataaagtccttccatcacttcaggatcaagatcaagtcttggatttttgtagaagaactcgggttttagaaaatgacctgctgcatgcaatggatgattgagttgacatttccatcttctaatgattgcaaatatttctttgtacttttcttcattccctttgaaagaactttgaattgtctccttggctctatcaattgctttataaatgtaacccattgcaggctttttctcattattaactagcctaagcacatgcacaataggccgcatagccttaaggatgtaaacagcatcattccaaaatgaaggcataagaacaatgccagctgccctattcacctcacgatctttagcaatattagttttcatccattcatccgaagtgaacattcttctaagattatttttctgattatgcagcctttgcaaagtaagaaatgaagtaacaaaccttttcactccatgtctaaccaattccatcttgtttgtgaactttctcatcatgttcaaagccaatgtgtggttatagataaaactaacaagatagatgcctcttcgtatagcctttttaacttcagccatcttcccaatgtcctctagcatcaagtctatgcaatgggaagcacatggagtccaaaacaaatgctccctcttgatttctaaaattttccccaagactgaaatcaataaacttaatatgagtaacaaactaacaattaacaattaaaattgtgaaattaattaataataattcttacaagctaatacaaaattacttccattgttcgtgatcacttgcaccacattttttctccaatatcctcatcaaaactttccaagagctcaaatagtctcacctgagtcacctcagtcttcatgcacctagaagcatcaacgctcctcacaaacattgatcccccttggaaaatccaccaaaaaattcatcaaggttctattcattctatccgtcaatgcatctaacataacggaacatccatacactgctcgttcttcttcatgactcttaagaaatcgctttgtgtattccaactcctttttaaggagtggacctctaaacacatggcagcaccattggttacaaaggaatcccgtttgtaaccaagaatcgtactatatattgctctagctttcctgtcagaagcaccactggttacaaactttggcatttcgggtcttctttgaagcagataaagagacctcacctgctgttagaggccttttccctctttggagattcgaaatttcctgcatatcttccatctcatgttgcaactcattcccagcaggtaaagagacctcacctgttgttagatttcttttacctcttcggagattcgaaatttaccgcatttcatccaagtcaagtcacggtacagaaactcattgccagcaggtaaaaagacctcacttgatgttagataccttttccctcttcggaaattccaaattttccgcattcttccatgtcacgttcatgcatctcattcccagcatgtaaaaagaactcacttgatgtttgaggtcctttccctcttcgaaggttccgaattgcccgcatttcttccatgtcacattcatgcaaccaattcacgttgcatgtaacatcttccccttgttgaggggaagacgctgatgcaggcccttcctgttgcgaggacgctgccatgacttagaagaaagaggcacgagtcgccggacaaagaaaaactcgccggaacggagagaagagaggcaaagctaggtcgaggctgaaaaacctttttcaccgggttttatcagcaacggtgaaagccctaaaatagccgcaagaaaaccctaacgtgagggatttttcggaatgttacgggtgcagcgcgatagcggcgttacacaccgcgattccggcgacgctgaatcgcgccgggaacgacgctgtagcgacgctattgagaagagtgtagaacaagaaataagaaagggaagtttacaagtgctggaaaattaccaggaagtcatggtcgatgggaggaggagaaaggtcgaaaggtgaggactgggcacaaattgaccaagacattagcttcttcttcttctccttcacgagatggtggtgggaccaaaacgcaacgtttcggggcaacacagagagacgccatgttaatgcttggtttggaggatggttccaccaagttgcagctgctgccaccggcaccaccgttgttgtcattttggattagataatggacaacagaacagagtctctctgtctctctctctctctctctcccccacaaacactactctgttcgggatttttattcttggaacccgtgcacggttttttttagtaaaaaaaaaaaaacgagcgagagatacaaaacaataatataaaatgtttaaatctatagagtaataaaactacattttcctaacctacttcttgcttctccttacttcgcaggttcggttccttacctgcttcttgcttctccttgcttcgcaggttcggttctgcttctctttgtttcggtctcacttttcccagcttcggtccactaccatacctcagcttcgttattttttcttctacaccagcattccaaacctttttttttatttcaaaactgcctctcctctctctcctctgctctgtgctctctctccctccctctgctctgtgggtctctctccctccctctgctcgtggctctctctccctctgctccgtagctctctctccctcgctctgctcggtgccgctctctctccctctgctccgtgcctctctctccctctgctccgtcgctctctccccctttgctccgtcttctcctctcttttctactctttcattctctctcttttccttctccgttccttcctcagcttcttcctttcctttcctcacacggtgctcagctattcctttccttttcagctttttccaaaactcccgcttctcacaagtatcagtgtttctcttctacccatctcctctgtaaatagcaagattatttttctgtttcaacattttttggggtttttgttattcttttgcaatttagaaactgattgatgttgaaacctgcaggtgcatgttgttcttctgcttcactttatggagcatgttcacgtaagcaggtaataacctttggtatttaatttctaaattttagatatttcattggttctactgactcactcctatcatgcttcattggtttttgtggattattttggtaagatttatttgctctctaatattgaaaaaatgaaaaatgcttggtgttgtgtgctgaaatgaacagtcagtttttctttctcgaggaagttctgatgagcagtgacagtgggaatctcacttattagcaagaattgcatttacacaaaaagattttgataaagaatttttccgatgatttttatttttactttttttctgtttacctggaaacactttttggtcttaggttgtgttgaataaaagaaatatgttttctttttcggtttagtgatgaaacaaataaaacatgactactaaagtccatattggagtgcacaaaacaaatcatagttgcatagcttaagtccttaagtcctcacttggttgaaaagcatgttcattgttgcccagtttcatccccaattctttctactaatcaaaacaatgatactaaaggtttagacttttcattcaatgtgaattagaaaatgtaggctgttgttctgagtggagaaaaatttgtttctaattggttttatattcggtgtgaatgacttctataatactatgagaattaggtactgagttgtacctaaatcttttggtttgcttcttctataatactctttgggttccacactctcaaacctctataatattaaggttggttataatactattagaattagatactgagttataagacaaatgatcactaactttacacattgtcttaatattgttatttaaatttatatatagttgatatattataattttatatatagctgatatattattaaaaactcaagaagattttacctctttcactacatttatccagaggtatgattatacatttatacttgctttgaaggtgtgtcttggttatatgcttttgcaattgttctagcacttagccttcaaatgtatggttgctgtgtcatccagaggtatgattatacattttacccttttagctgatatgtatatgtttgaccctctgtaattttctgaatgtcttataatttttcttttgctctttcaattatgtatccctctttacaagactatttgatgctgctgtggctgtttgccaagattttctgcaggttgcattctggagagcaataaatggctttggcttggcaattgtcattccagcactccagtctttcatcgctgatagctacaagcctacaaggatgaagtgagaggagctgggctttatctacttccgcattatggcctatttattgaataaagctagattagtaattcatcttcaaacctctttacgttaaataaagtgatatctgttttaatgaaatcttgggaaattaatttttatattattttcgcttcatttaatttggattttatacaaatgaaatcccactttttttttccttgcaaatgtcttaatgttcggaaggacttacttcccagtgaccatatttaggtatgttctttgacagggattttggtggttccaaattccaattctttttaaatttcaaatcccatattgaatgcaaagctgatattttctttatccatggtcagatagatgcaaacttacttcatctagcaagagtggcaatgcttgattgcagtcaacataaaaagttggatgtttctagagctaaagctgagcttgatatggcaaagaatcatttgtataattccataaggttcggattagtttggcactccagtctttcacaactacttctgaatatcagaactcaatcaatttgtcatgtttgtttcttttttcagtggaaatcattctttcttattacaatgcagtttttatcagagttatttctctgtccatgacatgtggacaggtggaatttgatgtcatacatacaattgttcaatcttatcatgtacaacatttagattgggttggttcacttaaggaaaggataaaaaacatatttacttagttatgaaatagattgattttattattccttttttaacatgattcatattaatgaatcaaaaaacattaattatttctctctactctctgctaagattggatttgtattagtttttaaatttgttatttatttatttttaggaaaatttcacatctgtttatgttgaagttgaaggtatcataatatctcccatggttttgctgtttcggaaaagtttattttttagcttggtttgtgattttttgtttttccatttttgtttgcttatggcattgtttttccattttttaaatctaatgtttaatgggttagatttataatttgttaataaaaactgagtgtagaaatggattcattctccttcattctccattttattgttgtcaagtaagaaaaactatagcaatccattatttacttctcagcaataattatttctttttttatgcttattatttctttcaagatatagcaatccattatttcgagatatagcaatgttgcaaaattagcaaaattatacttatcaacaatataattatttacttctcttttttgctgtatttttgtgctgttagctttccttcacactgcatatttttttcaactctcacaggtgttttcttgagttgctaaagagaagcaagaattatattgtaatagagctatttttctctcttatttctcactttcaacttttttcttgagtggtctttttctcttcttcatatgttagaaaaataaagttcaaatctaatcccatgtgttttttaatttcacacaaatatgtagcaacttattgggtgaatatgcagtgtttgacaaaatgcctcacccaaatttatattgttctgtttataatctttattatatattccatttcattttgtggtatgttactttcaccacctgagaggtatgttgtaaggaaaagacaaagactttgctctaaaatggtacaattgtatattccattttgtaataatttgtattcttcatgctacatattctccttcaccttacacctaatctctccttcactccctaaaaacaacatataattaaatatatcagcttattaagttgtgggctatcattacatataactgcaggtattattttgtttctcttcctcagttttatttttccacatacatgcttggcacttcagaactatctttttagttgctgatagtttattgagttgaatgtagaccagaactggattcttatgaaaggatatttatgcattggtaaggcatttataatttattccaaaatatttcctttatattttaatcttttctttatatttttcactattttttttcatcatggaataggaatctgtaatttgcttttacattagtggttgtggttaattgtagttttcgctttgctgtgattttttgttcctttttttccatttttgaatcagcttttttttttcctattttgatagcactctgcacaccagctagataaatctttttaataccttatcatctctctaaaaatagaactgcatagaggacttagaataacatggtttaaagtaaatcatagattatcaactgcatacattatatttataataattattatgaactgcatacattatatgcttaacattatgagctccacatattggattatatttattcattaaaagaagctaaaagaagaaaaagagaaaaacttttaattagaaatatattttatttttaactgatatatagcctcattcaattctccaacctctttacttgaagctcttttgtttttattctattgtttcagctctccatcaaggttaacttaactaattaacacaatttattttgttaaattatattctaatatcttgagttattatgttaggtatgggcaacataagtctgtgagcaaaagcaaagaacttgcaacattcaggtttttctctcatttatatggatgcccaagcttctatttctgtagcatattagtttgaattctaaatagataatggctaggatgagtgtggaccctaattttggaattgggattttggtcttctgaaacaaatttaagtggttggctttagtttgtgagcactaaaggaataattgccccacatgttagaaatataatatatagaaatcattcatgtgtcttcatctaacaaagcttttgagatagttaattctgattcataagattgtatcaaaaccttcatgaccaagagctctagagttcaattcttgcttcctttattcttctaataaaataattctaattcagctcaaagtaggtgggactatgcaattatacattttccatgcttcaaggatgaaagggctccttatttttaactctttttatttaattcaattgttatgataatcagcataataatgtttagttaatatatttattagaaaataatagtttgattcttagttataagacaatcaaagttaattaagttaaattagtttatcaataatatcataataaatattttttggttataataaacataaaaattaaaattactttataaaaatgatttttgttataagaaagttttaaattacttactcaccatatcataatataaattatttttgatttcatatttttatgtagaaactataattatcatttatgagaaatgattattctttgagccatcacgagcaaatttttacacaaaaaaagtttttgttaaaaattatttaacacaattacatatcaaacaatcaacaatattaaataatatataatttgagataaagtaatttaaactcctgtatccactttctctaaaggattgtaacccaactataacaaaaatataatcacattatccaaatatatttttttttttaaaaaaagaactccaagttgtggttttgtttgttttttaaatttcatttttaaatgatagaaactacaattatcatttatcggaaataattattctctagaaaatttaattaagatttgaaatttttaaactctttatttagttcaattattacgataacaagtagagtaacaattaattaatatatttattagaaaaataatagtttgattatttattataagataatcaaaatgaattaatttaaattattttatcaataacatcataaataatttttttgttataatacatataaatattaaaattaattttaaaaaatatagcggagcggagcagagcagagctacccgtgcatatgcgcatacaataatttagcaatttatcttttacttttaatttttaagtttgcttatacaataatttttaatcattaaacattaaatattaaaacattgctaaatttatcttttacttttaatttttaagtttactttatcaataatatcataaattatttttataattataacacatataaatattaaaatttattttaaaaaatataacggcgcagagctacccttgcgatacatcagtgcttattgattccattcctcaaacaatgcaatgaaacactctctatttcttagtggagtccttacttttttattagctgatatatttagcaatttatgttttatgttttatattttatttttaagtttgcttatacaatataattcttaatcattaaacattaaaaatattttatacaaatctaacatagcacggcggagcgaagcggagccgtcccgtgcgtatgcgcacgggtcctaagactagttttatataatatgtagataaggtgtcgggaatgcagtaatacattttattaccattttttgtgattttttttaaaattattatgagaaaatacatccgattacaaactaataatacattataatacttgtttaatgtcttttttattattatgaaaaaaatcaattacggactaatatgtgaatatataattattaaactcatttattattaacatgttggctaaaaagaaagattaagatgtcatgctaatgcttgattttaaggagggttcaaccaggttgctagtaccatttttgtcattttggattagataattaataataggctatctcaaacatgcacgttattctgctctgcacggtggacaatccaattttaatataaaataataataaatacaaaacaaaaaaaaaggtaagtgcatgaggtagagaaatttgaccaaatgaattgcacaaaaaggacgcaaaaaaagttgtttgaacattttgatttttttaggaaataattgaacatttgataattaataaaatatattaaattaaattaaatagaatcaagcgcaataaataaaaatcaaatagaatgatacattacgcatagcaaatttcattcaattagaggcataatcacatatagagcaaaccatcacaggaaacaacacattgattcaactattgggctaatagaagaaacagggtgaacagaataggcactacacaattctgcagcaagatgttgatgtgattgaggcataaccactgcaaaaattctccagattttttatgctaacatgtagtcaactaaactatgcactctagttgggtcaaataaataaataaacactctagtataatttgatttttggtagtagtctatacatgattaaaccggatcagacatgccaaatccacctccttcagtggccccgagtcttctttgctcagattcaatcacgcgtgcaatcgggttcgcatagttgtgaaactgcgacaattcacacccaaaaattcaactatttctctattataacaataagcaaaacacgcatcatcatgcaatatttacaaccaacattataacgctaagagcaaggattgaagcaagtccatcaaaaaaattaaaacaataaacttaaaagtagagttcaagcgaaagttgtattggctaactttagaaacttttaaattttaatttttctttcatggaggaagtatgggtgcaatttaaagatttttaaaccaagcatgttgattagatcacgcaggtttcaagaataggataaatggccatttaccgcttcaactagctcttcacatttgcgcactaacagtgccactttaacagctccagcttcttttactgttataattttactacttatggcatcgacctgtcatttttgaagataagaaataacaatttattctttcaccaaatataattgatatatcatgaaacttaaggaatgccacctcagataaaacagcctcgacatttctctgccttgtttctgtaacagatctcttagattcaacatctgattttgtactacttaagtatttagttgcttcttcccgcataatattgcactctttctccaattgcttccatgattcttccatctgctcaactaaggagaaacaagtcgaaaaagttggaggtaaaacatgctagtaacaaatattcatgcttaaagagcagttatatgtggcatgaaagtttccaacaaaaatcattaaaaaaataatgtggcgtacaaatgtgctggttttcaatcaccaaatgctgttaaaaaggaaaacaaaattattggacaaaaatcatgcaggttacttgtgaacaggttttacagaatgtgtttcgtaaaaattatcattactcattcttaaaccatgtagccagaaatggagacacagcaaggcttgcacaagaacatacctttgctctgtttttcaaccaatttggcctcaagtgacttctccaatatttcttcatcactaagtttagccttcaatgctttaagatccttttcaatagatttagcagaatttacctatagaaggcacaactgacatcaaacaaggtttgcacggtaataatctttgaagtaatgtgaagaagtgcttcttgcacatgagtctcaattgagaaatttcacaagaaaaatgttgtttccattgatgttgcaacaacatcctctgctcctctgatttctaatttggacactgctcaagttaatttgaacactgcttaagctaattttgtgcaacagaataagaattctatttctaatcagagtcagtccacaaactactcaaacttaaacatatctgaaagtaaatctgagagaactaaattgaggtgaaagagtattgtattcaacccaaagagaaactgagtccaatacagtttatataacagttacagatatgtaactgtcaactaacttgagtgtcagtcaatttgccaaagataactctgtatattttgaatttcatcctaatgtttgcttggtgaaatctcaggtctccaattctcaaaggaaatctaggttctgatgaactgtacaaatttcccagtttgctgtcaagttcttcatctactgtcaagacaggctctcctaggcctacttctatttttcctaattctgttgtaaattctgtctctgtaaaatccattaattcaagcgcttggcactctaggttaggccattctagtgttgatgttcagaaaattgcaatccaactttgtaagattccatttatcaataaaactgagcttgactttttgttgttcatgctctctaggtaaagctcacagattacactctccctcttctctcacaacttataatcaacctcttgaactaattttcagtgacctttgggaaccagctccctttgtttcctatacagggtatagctattatgctacttttgttgatgcctatactaggtatacctggatttttctgcttaaaacaaagtctgaaacactatatgttttcaaaaagtttcaagctatggctgaaaggcaatcaagtctacctattaaagctgtccaaacagactggggggagagttcagaccttttactgcctttttacagcaattaggtgtaactcatagggttatttgccctcatactcatcatcaaaatggtgtggtagagagaaaacatagacacatagttgagcttggtctcactcttttagctcaagctcttcttcctcttacctactgggatcatgcattcttaaccagtgtttatcttatcaatagacttcccacctcttcccttaattttgatataccctttgtcaaattatataaacagcaacctgattttcactttcttagagtgtttggatgtgcctgttttcctctcttaagaccttacaacaaaaacaagtttcagtttaggtcccaagaatgtgcttttctagggtattcacctggacacaaaggatgcaagtatctttcctcagatggcagaatttacatctctaaggatattgtttttaatgaatctaaatttccctatcctaacctattttcatcttctacttcttcacactcttctttagagtctcatgttcctatcaccactatccctcttgtgtctgtacctcccacacaattacataactcttcctctgttgcttctccagccagtacctcacaaatttcaacttcttctctacctcaaaattctgtctctcactcacagtcatgtcaacctgcccctcccctttcagttgacactcacccaaagcttgacactcaaccagagtctcaatcgtctactgctattcatgtagatgagtctcaatcatatactgctgtaccctgcagatttttctgttcccagttctgacatacagcaactaccactcattccctctattcctcaaaatactcacccaatgcaaaccagatccaagtctggaattgtgcaacacagaattcatcctactcttcttcttgctcacatggaacctaagtctaccaaacaagccttggctgatcctacatggctagctgccatgaaagctgaatatgatgcattgattaagaatggtacttggtcacttgtttctttgcctcctaacagagttcctattggctgtaagtgggttttcaggattacaaaaatccagatggatcggtaaacaagtacaaggccagattggtagctaagggatttcgtcagcaatatggaacagattatactgaaactttctcacctgtcatcaagcccatcacagtgagacttctcctctccttggctgccacctatggttggcctcttcaacagttagatatgaataatgcttttcttaatgccattcttgaggaggtgtatatgcagcaacctccaggttttgaatcttccaccaaatccatgttgtgcaagcttcagaaggcaatctatggtctcaaacaggctcctagggcctggtttgataaactaaaggagattctactgaagtttgagttcaaatccagcaagtgtgacccttcactctttgtttattccaagggatcatccacaatctacatgctagtatatgttgacatcataataacagggaatgatactcctttattacaacaactcattctaagctaaatacagtattttctctcaaagaccttggattacttcttaggaattgaagtaaagcatctatcagatgactctattgctctaactcagcaaatatattagagacttactggccagaaccaacatgtcaaatgtcaaacccatctcttcccctatggtaactggttgtaaactcactaagtgtggttctgatcctctttatgattgttatatgtataggacagttgtaggagcacttcaatatgctactataactagaccagaaataagtttctctgcaaacaaggtctgcctgtcaattcatgaaggagccccttgaacatcactgggtggcagttaaaaggatcccaaggtatattaaaggcactctctcatgtggtcttcatctaaaacatgcttctgccccttttttcatcaatgccttttttgatgcagattggacctatgatcctgatgacaggaggtccacatctggtgcttgtgtttactttggatctaatctaatctcctggtggtcaaagaaacagtcagttgaggctaggtccagcacagaagcagagtacaagagcttggccttggtcactgcaaaggtgtcttggcttcagtctcttctaactgaacttgctgtcccacacaagcttcctgccatccattgtgacaacacaagcactgtatctcttgctcataatccggttcttcatgctcataccaaacacagagttagacttattttttcaagaaaaggttctgtacaagctgctgtgagtggtttatgtgcctgctataagtcagtatgctgacattcttaccaaggctttatctttggggggggggggggggggggggggtattagagtttcttactccactaagtaaaatgtatcggttttttacttggtggaaattgtcaactgcaatctgttagtttgttagatgttactaactataggttctgttgacatggacctttgtaacttggcttgatatttttctaatcaatttctatcagttttacaatttctcaatttctatcagtccataatagatttcatatctctaactctaagacagcattccaattatgagttccatccaaaaaatttataaaaaaaaaaaaaaaacttcttgccacagtatacatggtgaattgatagtaaattttcaatcattatgataaacaccagagcagatgtcaactaacaagagtatgttaatacctgttcttgtatatcctgcatcagcttgtagtgttttgacattttcttgtacacctaagaaaagataaaagataaaaagatctaaattcaagaacaaaacatcatgaatttatccatgagttacagctgtttacattgtagctttccttctgaaataatgagtaaaaaaatgtccagaaaatcagtgcataaattattcaagtattgtagatatgacagaatgaacccacagtatgcatatcaaattcaatcagtcaatccacattggcatttgatcttccagtcaatattcaagggacgatttggcttgcataagcccaatccagcttcagcaccaactaattgacaactcagttgatacatgtgccataagactcactagctcaaggcttcacaaaatttgaatttatgatgcaaattgcaattgcatcctaaagtaaatctcgatggaatatttggttggaagaaaacaaaatagagtgaaagtaaatacaaataactacatattttcttttgtttgattagagagagaaagtgagaagaaaagaagttcaaaaacaaaaattcaaaacttccattttccttttaatttcaattcaaaatctccaatggaaaatttgtgtatatgtgtgatgatataagatcactttaccatgaccaaaaaggataaaatgcagatgaaagggggataaaaaagacccagtctttgacaatgtaccttggaaaaaacttcaacaagggcagtcttctcatgaaaagcttgcattgctaatctttcagcattccttgcctcctcacgagctaatttcttttcctctaaagccctcttcatggaaaatcagagataaaatttacataagtactggcagagaaaaatgagccaatgttttttccaaaactagtatcaggtcaagttgtggaactaacagaaggaagatagtccaataatctccaatataatattcacacaagcagattgtttggagagaaatgcaaagtatgccacatttttgtagctaaaaacataaataaaaccaattaactttgattatgcctacaacataagagcaaataaacaacataaatgaattgggattgctagctacaagggagaaccacataaaagaggggaaaaaatacctgtactttatcaggtgattgaccgatttttgaacgtagatttgcattttcttggacattttgtaccaatgtaaattcagcatttgaaatctgggatacgaaaaggaaaatagaatgaataagaattcacataatccatgcatcaaggagtcaaattttcagaaggaaagggaattgatgttagttagtagacaaagaaaggaatctcaatctccaaactaaaaacagcgctaacaacagtcagaccacaatgtaatatgcacaagaataaagacctactcatcaaaaccaaagccatgtccagtgtctacacaaatgaggaaacactaatatccaacaaaatataattaatctgattaaacataaatttccaattgtcacagcagaaaacgaacaccatgtcaatccattattggcgaaagacaatcactgaccttctcatccgtttccccggtcttctccttcaacttcctcaaagtacttcttagagaactctggttgctgttcagcaccgcaatcatttgcttgagctctttaactttggcctccacctcctcaacaagaggcatctccttctccttcgcctcattgcattccgaaatctccgctttcaactaaactcagcaaaacacacgctcagttaaaacctcaacgagtttgaaattgagattgagatgagatcccaatacaaacctgcaaaatcctattctcctccaactccgttcgctgcgcctctagagcgttcacttcctccacaatttccgagacggagttcattctcgcgtccctgagataaaaaataaaaaataaaaacgattaggttttctcccagcgaggcaataattaatccaagaggttaaaagagagtgacctatcgagacaaaaattgagaagagagccaaggaagagatcggttcggtgaggatccggcatgagaagatcggcgagggtgaatttgcgcggacactcgagtgttgtgagaacctcgttgatctggttgtagagtttcacggcgcgaacggaatccacgtggaaatcagggttttcaagatgctctagagcgtggaactcgagttgctcgttgtcttccctgcggaaaatgaaaagaataagaatctgagcgaggaatgtagaatcgaagaaggtgcgaaaagagaagaaaatagaaagagagagagactcaaggagaatgtcgagatgaatgaggacgcgagtgtagagatcggagatgaaatcagggttagggttggtgaagtcctgctccgtcacgttcgcgatctgcaactgcgctaagattgtgactatttccggccgccggagccttgggtactcgtaattcgactccgccattttcttcttctccaaagtcaaaacgcaacctctactcgagagaattcgggcttcgactcatacgagacgagactataagtacaaccgcgaaattgaattaaattgaaaacaaaattagtggccattttcccgcccagtactttcccatggaggctgattcaacaagttctcccaaaattacaaggaaaatactaaaattggattattgcaaaatataggggaaattgtatttagccttatgctttttttaagaggtaaaataccactctttttattctttgaatgagataaattaacatattgtatgatccataaaattaagtgttttttcaataaaaatgaatttatttcattttattcataataagagatgcaatatatgttagaatgtaatcaaagatattaatgttaatataggatcttgttgaattggcaagaaagttgataagatgatttgaatcattttaatgttttgaataggttaattattttaatatttgtcatatctcatggtttaaaattgtcctattatttctaataaaaatcttttgttttgttagagaaaaaaagtaaataaaaatccaacacatacaattttttataacatcataataatgtgtaagtcgttaatatttcatgcatactgattttataattatataataaattttcacacttttttatatgaaataggctaatgggacaagttgagcttatataaaggcaaagtttagacctaaaaataagctgatgacaagtagcatattcaaactttggacataaaaatataaagtaggtaatatccaacttaagtagaccctgactcggctcaacccttgcctccttaccagactaaccagatagtttgaaaaataagaaagcctatatttacaagctgaaataatggtgtcaatttcagtgctggatggaacgtcgttgttgaaaagcatccatgacggtctcgcaatctaagtcaatctcaatgccagtgactccaaagtctgataggtaactaattgtctacatgaaaccaatatccttcaccttttgagctgggagaactccattgcacagataaatttgaatattgggccataactcagtagccaaacaaacactaataagtaataacattagggcatccaaagaaaacgtgtcagtcgttttcaacacttgattcgcaattaggacaaatattcgggcaagagacacccttcgcgaaggtagacaaccccgaagaattctccatagaatatgtttgattttaggaggaatattcaaacgccacaattgtatccaattactaggaagtttcaaatttctggtatccatagttacctccatgatgttgtggtatgcggatttgacctgtaaaatctagtttgactcaagtttcaaataagcttgtcattttttagtataaaattaagttaaacaacattaatattagaataaatttatgtgtggagtttttaaatctatgtgacattataggattcataaaattaaaataagcaaccctatttaaacaaatatgtactgtggaagcacttaaaagtttatcttaaatgagagaattttagtatttctctaattagaaaagtgatacctgttttctcttctcatcagaaagaaagtatccaaattaattctctcggttttgatgtctcggccaggtcgttgatgcacctaaatccccttattgttgagttcaattcgttgcttgttcatagtttctttctttgattagttatcttcaaatacaaagacggattgagggaagtcctcgttatattttttctccactagttcacaggtaaatacatggcttactatgaatttgtaactacatgttctgatatttaatttgttgtaagataaacagataataattatatatatatatatatgggtgtgtgtatgcgcgggtccactttttgagtgcaagagtagtcttaaatcttaattatagctttggacgtactagatatgaaatttctaatattgattaatgattagattaattgcatgatacagaaagttaagaagcataagttaagttccgtaagtttagctaagggaactaaccatgtatctgcctagctttgagattatcaacctagcaatactagtataacttttcgtttttgtagactcacaagacatgaaagttataattttatgatgtacatgtaatcaaaccggctaaatatatacgttctcatgaatgcctaattttatttcaataagtgtttaaatatctatcacttctgtaaattaatttttgtgttggagtggtttatttagcattacaatttctttaaaacaagtgacactactaatgctttatgatcatgagcaaagggaagattaaatcagtggagttggacttaacaccgaagacaacagaagcattgtttgagggagatggtggaggttactacacttggtcaagttctgaagtgccaatcctggctaagaataatgttggtgcaggtcgccttgtgcttcagcctcgtggcttcgcccttcctcattatacagattcatccaaaattggttatgtcattcaaggtcagacccgcgcgtagatatcatcatatcttttctattttttaattttaatttcccctcccatttctattacaagttatacatacgagtttaatttaatattcacacacttatgagttatgacataccaacgagtggttggtttgaataaaattaggcttagaatttttaattaagattttattttcgaacatatatagacgaaaaatatgtaattaacaaaaaagatctcattaaaaacaacagtcaattaaattacaaaaatatcattattgttgtgaattagtttaattttttttccttttttaattagtgacatccataatataatggtattatgcattgaatcgtacgtgtaataaacttaaatgactcgtggtgttagttttcttagaactttggtgatcatcactgtctcctattaaatttctcaattttatggcacacatgcatgcagggactgatggcgtagttggaattgggatggtactccccaacactaaagaagaggtggttttgaagcttaagaagggagattttataccagtgcctattggagctgtctcgtggtggttcaacgatggagactctgatctcatgcatcattgcttttcttggagaaacttcaaaggctcttgttcctgtccaattcacctatttctttctaactggggctctaggacttataggaggcttctccaatgagctcacaagcaaagtatatggtttggacaatgaggtggaaaagctcataaagccaaacttggggttttgatcatcaaactagacataagtcaacccatgccttaagccacaaatgaacatgaacaaaaagctactctataatatagatgctgcacgcccagaaaatgttgtggaaaatgctggattagtcaaaaccttaacggagaaagattttccttttattggggatgttgggttaagtgtgattagagtgaaacttgaaccggtagcaccctcatacccaaccaaccttacggttcagttgatttacattgccagaggagaggtggcaagattgaaattgtggactttagtggaaagagtgtattaaacactcaagttgaggctggtcatttgcttgtcgtgccacaattctttgatgttgctgaaattgcgtgtgaagaaggaattgagagttactccatcgtaataactataaagtatgacttaatttatacaaaatatattcatttaatccaagaagtagcacatggcatgcaatgacattaaaaatgattgattatattactttaaaatatgacatagtataattaagtgttaacaaaattaacaaaaaaatgattgattatcttatttacaggccattgtttgaagaattggctggaaggggatcaatttggaacgccttttcgcctacactgcaacaagtgtctcttaacgtggattctgattttcaaaagtttttcatatccaagatcaaggaatctaccaatctcatccctcctactgtttagttcgatgcgtgtgatgtacgtactaccgtatttgtttatgtataattttcagatgatgatattgatgtaagataattctgaacttatctttctaaaagttatgtcgttgtattgcttttgttttaaagaaaacattttcgtgagaatacttatttaagttttctatattgagcaataaatgaatggaaggatttgaatgctagtctataatatagacgctgcacgtgcacaaaatgttgtggaaaatgctggattagtcaaaaccttaacggagaaagattttccttttattggggatgttgggttaagtgtgattagagtgaaacttgaaccgggtgctattaaggcaccattataccctacgaacactgcagttcagttaatttacattgctagaggaagtagcaagattgaaattgtgggcttgaatggaaaacgtgtattagacactcaagttattaaggctggtgatttacttgttgtgccacaattttttgtggttacccaaattgcaggagatgaagaaggaatggaaagttactccattgtcacaactactaagtaagctgttgggattttatataaaataatttttatagcatgcaataacattaaaaatggttgattatatattatttgagagtatgtcccagtatgattaattagtactactaacaaaaatgtttgattatattatttgtaggcctttgtttgaagagttggctggaaaggcatcaatttggggtgtgttgtcatctactgttcaacaagtggctcttaacgtggattcagaatttcaagagttgttcgtatccaagatcaagaaatcctctaatctcatgccacccacgtcctactagttagtctgacacatgagatgatgcatgcgtgtgaatgtatttgttttgtaaaattcagatgatgttatacatatgagaaaatactaaatttatctttctacgtgaaaattcttagtttgatgttgattcaagagacagggatggagaagaagtcgatgtgtatgtcattgtattgcttttgttttcaatttaaaggatatactttggtagcagtaaaattctttatatatgttctgttatgaacgaaaagtattcatgaagctagtgattataattaaaatgtttacatgtatggtcttacattgcatagtggattagagtgtagaattgattttgagttaaatatttttagataatttttatgctaaagataaaaatttatattgaatttttcaataataaaattaaaagtattaacgtacaaatcacttcatttcaaaattttaatcaatttcttcaaaatcagtctagacttctcacacaaattaaaatgaattcatccacttcatcttttgaagaatttattgagaaagtttatataaaagtaaaaggcataaattttattttaatttatagagaaatttaatttatttttttcttttcttatacgtttcatgttagataagcttctttaatttatgaaacacttatttggaagaaaaaaaataagaaaataaaatatatttaacttctctatatataagcttaattaactattttaggaaccttagctttttagaaaaatcaaatgaaaataatttttataaaaagtaaatagtacataattaatttaaacttatataaattacaattcatttattttgtatttttttctcttataattatttatgaaaaaatttattcatataaaacttaatttcttataaataatttcatctaaacaatatacataacttatatgtttcaatgtaataaaatttaaggttcaaaactcatatttgataaggacatgcggaaagtgcttcttagaatagacataacatatatgtttctcatttccttttattataataaaaaatttaaatatttataatttacttgattaaaacatattactacttaaaaaaatttgtattctactacggtgaaataatgacagttttccaagaaccatcttaaattcgattacgacttcaatgatgacaaatttacaaaaatcatcttaaaaagctgcgttccataatgattttttgtaaaaccgtcgtggtttcatttctcttccagcaaaaacgaaaacgctcgccactcaatcactcaatcactcaaactcacaccagcgtatagagattagagagagaaccctaaaattcggctgccgcgatggacatgcatcgacgacgacaaagacctcaacctcgacctcggcgacattgatctcgacccgaccaacggaatcatgcccaaccacataagcaagttttgatttcatttcaacttcatctttcatcttcttcccctgtcaatctagccactctctctgaatttgacggttgtgccgcatagtctcatcagtttctcacttgctcgctcagtgactcgctcactcttcttcagatttgatcgaagaaagaaatagaggaagcactggaactgtcacgcgtgaaggacacgaaggagaggatggcaggtgtggagtgcctccaccaacttctagaagcttctagaaagagcctatcctcttctaaggtcacctcgctcgtcgacatatgcatggatctcctcaaggacaacaacttttgtgtcttccaaggcgcgctccaggccctcgcctctgccatcatcctcgccggcgaacacttcaagctccacttcaacgccctcctccttgccgtgggagtagcagagggtgttgaagtgtcgacaatgcactcagtttgtctctcaaacttagaattttgaaatataattaccttcaatggttttgtgagtatatctaagatctggtcttcattccaactcttaattatccatcattacttgatgtctcaagaaatgacatcgggtctctaatatatttactcctccgattgaatagttggatgctttgccaaattaattgcttatttgttgtctatccgtagcttcataggtcttattgtttccaaattcatctctcccaacaaagtttcaagcttggcagtaagacagtgccaccatatactactttttgaaacactaagaaatgtattatgtatccattgcatttgcagcacatgaaaatataacaagttgtattcttttgatcatcctaatctccacaccaaccaaagtccatacatccaatctttacacttctacactgcatctcatttgaaaacagcaacccgaaatcaatcgtccctttgatgtacctcagtatccgtttgtttgttgcatagtgagatgttcttggcttctccttaaatctacttatgaagccaactccatgccagagaatgatcacactgcattcatcacatcaacttcttttttatacatttttcatcacaagtcccacatcaaccaactaatggagttggttattgataactggtaaccactattaaaagtaggatcttggtaacctgtgacataaaaagccttaaagacgttgtgactttgtgaacacaaagtcaaggaaacagaggcttgcattaattgcaactattctaattcaataaaatgcatgttgcttctcatacaaagacaatcctccaccatcaaaagaagcaaaccagagttaacactgactaaataaaacaaaacacacatacatgcacgatccaccttaagaatactaacttcaatgttacattggcattttattacacaccactgcaaatttctttttcactggagacaattttgttccagtaagataggattataccttcgagtacttaacacatctgcataaccaaaaccaagacttaaaatcgagacctttgattaagttggaccaaccccacgccaattgatccacgtgctcggtggtacaccactgcgaatttcattcattcattggttgattcatcccattgatcctctcaattacagagataatcccttgcccgccaagcttcccctgcctattagccactgttctgtatagtttctagaacacaaatgtacagcacgaaagcgctgtatgattactgtttgatcactctaactccgcaactatgaagatatcgatggtgaacgatatcccacagttgatgatcactgagatacacgaaattggggtgaggtgtgtgctcagtgtaattgaaagagagagagagctagagtgtgtgtaccttttaagcgcctatacccgtgtatttataggcacattaccttgcggttagatactccaactgcacgcgcaatactccctatattcttggcctcaacctgcacgttcataactgctccagtagaccaagtcatagtccacattcattgaatctgttaacacacgtggtattaaaggaaattgggcttcgatattaggcccaactattattccataacagttgccccccagcccgagtatcaagttgccttgatggtcgggatgtattatgttaaccgcctccgaccatactaccaaactagtcgtctccgagcagaaaattaatctgaacagcttcatccgagcatcgaggtccaaataaaatcccgcgtttattataaatcggccaggagtcattccgagtaaccaagtaggatctccccagtatatttctttggataagtactcctggtcggttaatctaatactctagtttatcacatcaattatccgaacagggcaatccgagcaggaccttttatccgagctcttgactgatcgtactttgttgagtagggtttgtccgaataaaggcttattttgctattcctttaggtcgcacttgggtggaaaaagtaaatatccctcgagtggcgactggcctccttgctgtaggatcagttactattcccatcattaatggcagcttgggcattaaagacctgtcgtttcattccctttggtaatcattacgaccctagtgtttttactttcttgcccccaaatcaacacgtccttttaccgttctgtccttgcgtcgtttcgttttgtgagtggcggttcatcaggccgttttgttttccttggcggttactgtgggttattattgcatttcaaatttatcctttaatttctggacctccttttctttatattgtctgcattccttctttcctgagttttccccttttctctttcttcttttgaagctttcgcaaacttgcctcttcgtcatccctttcgatacaccgctattcttgctaccaggtacctttctttctttttgctatttttacttgtgcattctgttgcttgcatttctgtaagggtagtgttgctttattcttttccattcttggccgctgtcctttcctctgttcttgtatatcttcatgaaatttactcctgaggaagaggcggagttgcggcggagggcccctagggcctcgtggttgttgtggggtcttcccctccccgatggaatgagcgagaccgaccctttgcgtggtcataccggaggttcttccatctctaggccacctaaaacctccgccgtgactctcccttcagaccctttgttgccacctatccgccaccgcgagtctgactctcgcggtgttcctccaccttcttctatctcttcttctagaaatgactctattccgggtactagtcatcctagggctcctcccattttgggccccaggacatctgggcccacaaatgcaatcagcccaacaatctttcctttgaaggtctcttgtgatccacttgacaacctgtcgtcctcgtcttcggacgacactctttcatcatcctcggataaaatgatgactttttcatcgtcctcggatgaagtgatggaagttcggtacgatgcctgcattaactgtgtttctgatgccgtgtaccatactcagcatggttctgatgatatcgccgactccatcttgggattatgtcggcataaccccatcttctcatccgtcaaaaaacccaaccgaggccgtacaccaaatgcatggttccggtctcgggctcttctgcctttaatgcgtcatttccaggtatgtgtactaactctggttctctctttatattttggtaggtataatggacaattccgtggaggttgtggatgaatctctgtctgccgagtccgagtcgggcgcggttcctgcgttggcctccatatttcattgggttacctacgaaattcttagaaccttctccaccctcgaactatccactatagcctcactccccttaggtaaacaagacgggtttggggtccgggctccctactcgggtgagcccatttgtgcccatagagagggcaatgatcccaacttctttttcttctacgagggggtagtttctcaaatagggtgaccttccccttcacctcttttgagatggacgtattaaaccatctccgaatagccccttctcagcttcatccgaacagctgggatttgtgaggaccttcgaattattctgtgaagagcttcggatcccctgtacagttccactctttttttattattattacccgaacactcctaggacggggaaagaaccgcccgagcgtaagggatgggtcgccctgcggagtcagaataagcggaaattaattgttccgtttacagagtccttccggggatttaaagataaatattttaaagtcgcagccaatcccgggcagcgaccattttttctgcggggggatgagtctgctgacgtagagtggtcgtttcccttgtattggtcgcaagaccattatcaggataaagctaattataagttcatcgaagagtcattgtccgatgctgaagcctctgccatatctgtgatttcggagtatctcgacaccaagggccgccccatgcggccgtttatgtccgccgtgctcgcggcagttcctccgcttaccgtaattatagctctcgacgagttttgttcggtatgtatcttgaatgttatatctgatgtgtccttgtttatttcagtgaacatgggacaaccagctggttcagccgccaccgacccgaagccaaccgagcctgcaaataaagctccacaaaaagggcaaaagcgggtcctccctctttccgggcaatgttggagggagaaataaaagagctaaggttcagaaaaaatttgttgctcttagaccgtctactccaacggctgctcctcgggggatcccgtctgcagtcgtccccgtctctgctgcccgggaacgtgcttccccgtcgactgccgccttgcagaatgagcgagctgggtccttagccgcgacggggaatgtttggagaagggggtaaccgaggagctggtcaagcttaccaagcctcccagttatctcctcgaaccgggtgcccccgtgggagacgagctcgcggcattggttcgcgttgaagagaacgcttatcaatgcgcttctctagtacgggcctttgccactgttcggcacaggtaagtattcaccaacacttcatctgtattcttcatttttcaggttctaattgatttaatgtagatatggggtggcggtagaagagaaaaagaaatccgaccaagctctcatggccgcccggctgctcatggagaggacaaggaaaggtcttccgctgaaattaggaagttgaaggaggacctactctccgtgcaagccatagcggcgtcgctgcgagcagatctggggcgtgcccaaggtgacctcgaggcttctgatcagaagatagcgatgttatcctccaccatcgactctttgaaagccgagcacgaggaaaagctttcagaagtgaaggccgcccttgctgttgccgtcgaggactctttcaataacaccttagatcaagttaagtttttgaatcctgatgttaacctttgcacaaccgggatgcattacttagcttatgtagacgagggccgtttggttcccccatctggtgctgaagattcctcgatggtagccgccgaggaggcggtacacgtagatgaagcttcttctggtgctgcacccaccgtcctcgcgccgcctcctacagatcccgttcctgtcaccgaggatcatcctcaacaataaagggccgggatgccggtttaacttgtattttacttgtatttatttttctttgttgggcccggtgcccggaacaatttaatttcctttgttgggcctggtgcccggaacaattgtttaacttggtatatatttctattttcaagctctctacttgattcgtaaaatatcatgtgcgcacatctttttggttccaacgaccacatattcgaatgtattttttatttcgtatatatccgaccacaaacaactttgctaacgaggcctgatcagagccgggtagcatatcatttatagccgttatcacactttgaaatcgtcatgactcaaaacgtataataaaatgtttgcattgataatcgttgttacaataatatgtatgtccgagtaccgggtagggtcggatcgatactttagtcaacgatacaatttattcaatgataaacataatgtgctcggaaagcaatgtttccgagtgaacaatttcctaacaatgtcttcatcgtgaaaaaggaccgtatggactcggattactccgttccgagtccttaccctcgataacgaaatttcattgtcgagctgcctcgtacccctgatgaataaggaccatatgggttcggatacaacaatccggacccatacccctattaaaaaggaggtcgacgtcgttagctgtaatacttcttcaacttgtcagcattccatgttcgtttgaccgtcttgccttgtaatgtttccaacgtgtatgctcccttgtctagctttttagtgacccggtatgggccctcccagttagccgcgaattttccgtctcgggcattcttgtttccgatgtcggcacgtcgtagtaccagatcggtttcttcaaattcccgcgggaccacccttttattgtaggcgcgtgccatctgttgtttcagtttcagttctctgtcgtgcgctgctgcccggatctcctcaacgactgtcgactccaggctaatacttcattatttgtttcctccccggcttgcaatgtctgtctccgtcgccatgattgctgtccgacctcgacggggatcattgcttcgtttccgtatgtcatgcggaatggtgtctcccggttgatgattggaccgaagtccggatcccccatagacataatataattgttccacccaagtcgatccggcctcgtgcattcgtttccgtagggcctccagaattgttttgtttgcggcttcagcttggccgttggattgggggtgctcgacagatgcgaaccggtgtcggatttggaaattagccatcatctcctgaaatcctctgtcaatgaattgggttccgttgtcggtaattatttccccagggattccgaaacgggaaattatatttctttcgaaaaatttctgtactcgggccgacgtgattgtcgttgaggggctgcttcaatccacttggtataataatctacagccactatcagccacctcatctgtccttccgccggcttgaatggtcccaacagatccatgccccatttgtaaaatggccatggcgccgaaatggactgcaattcctccggcggggataaaatcctggtcgcgtgcatctggcagctttcacaagatctcacgtgatttgtggcgtccgcactcattgtcggccaaaataaccagcccgtaacgcctttctcgtcagtgcccggccccccatatgctgtccgttgattccttcgtggatctcggataggatatagtcgactcggtttgggccacgcataccaataaaggctatgtaacccccttcggtataattctccgtcgaccatagtgtacatggccgacgttcttgtcagacgcgggcttctatatcgtcgtctggcaagattcctctttccagaaaatttactatgggtcgcgccagtcctggtcggaggtaatcatcattacgcacgtcggctgcatcgtttgctgttgaattactgtgcggttgttcccgggctttttggtgctcgccaatttggacaggatatccgcccgagtattatcttctcgggggatgtgactcacagaaatgtcgtcgaactcggacatcaattcttttactcggctcaggtatttggccaacaaaggcccctttacctgataccgtccttcaatttgtgatgcgaccagtgggagtccgtgtagactttgacgttacgtgcctcctgctctttggcctgcacgagtccggcgatcaacgcctcgtactcggcctgattgttcgaagtcgggaaacctagttgtagggatatttccgtagccactccatctgggttctcgactataattccggctccacttcctttcttattggaggacccgtcgacgaacagggtccaccatcatccaccctcggattatgaggggtgagttctcggacgaagtctgccagcgcttgggacttgatcgcatgtcgagcctcgaatttcagatcgaactcggacagttggactgcccaatgggttagtcttctgccaagtccggtttgtgtagtacctgccggattggctggtctgtccgtacaacaacagtgtggctctgaaaatacggtcgtaactttttggcggcgacgattaaggcaaaaacaagtttttccaacttctggtacctcagctcggagtcgcgtaatgctcggctcacaaaatataccggcttctgtgtagtgtccacctctcttaccagggctgcgcttactgcttcttcgcctaccgacaaatacatgaccagcacttctcctgttttcggtcttgataatactggtggcgacgataacgatttcttcatgtcgatgaaggcggcctcacattccgggctccattctatgacggcctgcttcttcaacatcttgaagaatggcaatgccttttccgctgacttcggcataaatcgggtgagggcggctatccgacccgtcagttgctgaacctccttcttgttcgtcgggaactgcatgtccagtacagcgcgacacttatccgggttggcttctattccccggtgtgttagcatgaaacccaagaacttcccggctccgactccaaaggaacattttaacggattgaggcgtatgctgaatcgtcgtaatcggtcgaaagtttcttcgagatcctcgacgtgcttattgatatcttcagatttgacgatcatatcatcaatgtagacttctatatttcgtccgagctgtggttcgaacacgctgttcatcattctctgatacgtggcccctgcattcttgaggccaaacggcataacattgtaacaataattggccttgtcgccgatgaacgccgttttctcctggtcgtctgggtgcattgggatctgattgtatccggaaaatgcatccataaacgataatactctgtacccggatgaattatcaaccagctggtcgatattcggcatgggataggcgtccttcgggcacatcttgttcaaatccgtgtagtcggtgcataccctccattttccgttcggcttccgcaccatcacaacgttcgacaaccaagtggtatattgaacttcacgtatgaaacctgcccggagcagttcatcaatatgggcccgtaacgcctgtgccctctccggccccaatttacgttttttctgttccaccggcttcgatcccgggtacatggctagtcgatggctacagaaagctgggtcgacgccgggaatttctgatgccttccacgcgaatatgtcaatattcttcttcaggcaactgattagcctgtcccgtagctctggtcctaagtcccccccgatgttagtcacctggccggctgaatctccaattacgacctgttccactttctccacgggttctggccgccactcgtctggggcttctcgcatatcaagctctacgacattaacagaacgtactcggtttgatccgttgtcgtcaatatctttctcgcttctacggaccgtgtcgtagtaacactgccgcgactctttctggtcgccgcatatggtcaccacctgtttgttgttgcctacaaacttgagcttctggtgcttggtggacattaagatgtcccacctgtgaatggtcggtcttcccaatatcatgttgtactgggatggaaaatctgccacgacgaactccacttcttcggatttataagattctctcgttcctagtgttagacgcaggcggatggatcccatcacgcttgtgttgccgccattaaaaccaatgagcattgtcttgcaaggctttaagtcttttacgtccaacttcatcttacggaacgcagtcaacataataatgtcggcggaactcccattgtctacgtacattcgtcttacccgacagtttcccacggttgctgatatgaccaaaccatcttcgtgtccgggtactactccctccatatcctgctcggtaaagtataggagtggaggttctggctttccggcccgggctttgaatctaggttgtgcctggaccgacaatacttccttcaagtactttttccgttgagtggaggtgtcgccgccgccgcccatacctcccgagattacattgcattcaaattcgggctccgggaactcgtcattgtcttcccggggtttctttccttcttctcttcgttgactttcttctcctttgcgtttattttttcgcccctgtgttcggatgacatactgcttcagccttccttctcggataaacttttcaattgcgtcccgcaagtcccagcattgatcggtagtatgcccgggcccgttatggaactcacagaagcgtgacttatccagtccagccttgttgaacacagggcgagggcgttccactttcttcatttcagtgaatgcgacttccttccaaatttgtgaccgggacacgttcagtggagtgtacttctcatatttattctcgtatcttcctggccggggcttttgttcgtgattccgagtacgattctccgggtaacctctattttttgggggcggacttctcctatcatgtcgctcctttgttcgtccagggttgttgacaacctccatttgttctagctccaagtacttcttcgcgcgagcacggaattccatcaacgacttcaccgggtctttgtatatagacttggcgaatctcgacgaaccatcgagtccagctgatatcaaatacacatggactctttcctctaatccttcgacttgcagggctgcctctttaaacctatccaaatagctttgcaaggtctctccgggtagttgcctgactttccccagcgtgaactcggacttcggctgctttttgctggtcgcaaaattcaacaaaaacttctgtccgaagtcttcaaagtttttgatcgacctaggcggtagggtgtgaaaccacgtctgcgccgggcctgtcaatgtggtgacgaagatccgagaaatgatgggctcgtcaattccccggacgcacatctgcaaatcgaattcatcgatatgcacttgtggatcctgcgtcccgtcgtattttgatagaaaagatccatcaaagtcgtccaagtatcgagctttcacaatgtcgtcgacgaaagggctgttgttctgatgtccccgactgttcttccgacggtatatgggtcccgtcttttgatagaaagtctgttcgcccttcttgccatttccatcttcctgtagaactttttcaccattcattcgtcgactagggctgtcatcggggattcgtcccgtgccgacgtcatcacatgtctcatttcgtgcccggattgggctccgacctggctcatccgttctcctgtggtcttctgggtcggcgtcgcgtctctgagttatttgggtcctcaggtccagtggctgttctgtccgcctttggtcttccggatctgtactcctccgctggttcaaccgtgtcctcaaatcctgtgtctcgccctcaggattcgacgactgtgtgcggttgattaaggtttgtaattgctgctccaattgtgccattctctgcatctcggcacgtctccgttcttcattgtgttcctcgatttgacgagtgatgtttctgatgtcgtcttgtctctgtaaagtctgtcgcctctccatgttctcaattcgagtcaaaatcgaattgaggacattgccgactagctgtcctccgagctcaccctccggatacgttctccgtgtgactggagtcctctgctgatctgtttgggcgggcgaggaagcttcgtcggaaacggcttcagtcacgtgtacttcttctcttcgtgccacgttctgactctccggtaggaagatttccctattcggcatctcggagcgcggtacggaatggctgtttcttgtgttaaccattgttgcaaggtgtgggactcgaaatttatcgtccccacagacggcgccaatgttctgtatagtttctagaacacaaatgtacagcacgaaagcgctgtatgattactgtttgatcactctaactccgcaactacgaagatatcgatggtgaacgatatcccacagtagatgatcactgagatatacgaaattggggtggggtgtgtgctcagtgtaattgaaagagagagagagctagagtgtgtgtaccttttaagcgcctatacccgtgtatttataggcacattaccttgcggttagatactccaactgcaaacgcaatactccctatattcttggcctcaacctgcacgttcataactgctccagtagaccaagtcgtagtccacattcattgaatctgttaacacacgtggtattaaaggaaattgggcttcgatattaggcccaactattattccataacactctcaatagaaacaaattttcaatctagataaacattcagtgtgtaacttaaggctattagtaactacaatgattattatattgaccatttctcaaagcatctgggtgacataattaggaagtaattgcaatcaatttggtgattatcatgattgagactgcgagagcaaggaggggtgggagcaatgcatgcatatgaatgtaacttttaaggttatgttgttaatgtcctttttatttatataaaaaagatttggttagttgaatagaaagttcacaagagtcatgacacaatacttgaaaattaataacaatttttttatatattaataacaagatttaaacttgcatatatttataggatgagtcatgattttttatctaatgagcatatatcttacaagctaaaaaatatatcaaattatgttattggtaataaataattattaatgactaatttatgtcgaaaaaaaatttgtttgatcatttttagtaaggttgtttttttctaattagattttttttatttacaaatctcgaacttgagatcttaagaagactgagtcaaaaattatttggattaatgactttttaataaagattggattataatgcataagcacaaaacgtggactgcttattattgactgtaaacatgcatttaactactaataaatcataaatggtagtgaaatggagtggttaataacagagactatatgtgagctataatttgttagaagcttagctgattaccttcattctgttactggaattgtattcaccttccactttcatgttgtaagtacagttgtacacaaaattaatcaccgaatccaatacaatgacatcccatttctaatcctctgttaagagttatatgatatgtggtcacttttttcactatattttcttggataatacttttttcttttttacttaattggagcaatatataaatgatgaataactaatctttatttgattcatgttacctcctcaaatcttcttaatttctttttcttaaagtgtatgtaacagcaactgaactcacatggggagaagatcctgactcagaactcattgaccccacaccagatttctgtaataattctgtccctcaaccccttcactgcttcacagctcacagctaagagctaatgagctgttgcctgttggtgtgcctatacgtctgttactaaagtttcttgttataagtcaagcaaagtacaaagataaaaaattaatttccaaagcattcatccgcgtaatgataaaaaattaatttcaagtagaccatatcccccacttggaattcaacctcccttctgttcttattggcttgttgattcatttttttgaacttacactaaattctcgaggttttggagaaatgctataagcactgaacagaatagcagaaaaattgcccgtcccaattaaatttggacgcctgtcaactgactattaataaatttcaactttttaaaatgtttctaggtttaaagagaaaataattaagtaattatatgtagagaaaaattagaaaagtgttttataaaaagacaaataaaattttaaaaagagtcttataattaagagaaaaaagtattttaactaaattaaatacattacgatcatgttttgttttttttttttttaggtaaaaaaagaagatgctttaagcattgaatcaaaagtgtaacatttatttagtattggaattgattgatattcttaggtggaggaacttgtttatggagggtggtggcagataaggatctaaaaaccaactgtaatcgcaatagcatatttatttgataatggatgattctttcagaccgagattggtacaaaaatgcaaagtcaggcatcaactaatctcgttgcctacttttgggtttatgaggaaagacagcgaaccaagggatggaaacgcggcttgccattgatgagtacaaagggtaaatttcagaaaataatatttctttaatatatttaaattaactaatatttgattgacaggtttagcaatttcattggacaggccatatttatttgtatcaaagtttgatttgggaccaacacgccaatcatttattattataatccaataattattattataatccaactaagagtttctacgtcttcaccgttttttatttttgagtgatatgattgatttgtggagttggatccatgattaaagaagaataggtattagagtaatttttgtgagtattatttttactctttacatttttacaaactgaaaataaattaacaattaaaacttataaagtcatgtaagtttttttaaaaaaattacaacttttttaaatggtaattaaattttaaaaagctattaattttgttatcgttcattcataattgtatgactttttatttttttattctataatttaatatttatctttgatatgcacacagaaaggaaaatatagatttttcggttaagttgtttcgtgcaataattaacgttattttgatgggtccgcgactcggcataataatgtatgttttgtttggtattccgcgttcactttactcttgtcaccttcatattttaacgtgaatctggagacccaattaacaagcaatccacaatcatactaagttttcttctatatatataggaatttttattggaaaaaaaaagcataattctacttgaaatatgagatataagattgattgcatgattaaaaattatgaatttgatctctcctgttaataaaaattaagaaattaataattaatatttattgatataaaaaaattaccttttaagaactttaattaattggaaactcttataagattcatccactaaacaacttagaaagagagaagaaaaagagatatatccgcaatccacctaatataaagactctatgtccgcgtaacattgttgtctatcattcaaagtcaacccaccacccatccactcaaagttttatatagaatgacttttttaagtcatcattaaactttaagatattcttaattagatcattgattcgtagttatatgaatttttgtttttacttattattaattgtgcatgttttctataattttatatttacctatattattttattttcaggtaaacatacgttatttataaccattttttcaaacaatatactttggattgagtacagaggattctgactcgaaaaattaatatcccttattcaaaggatgttctaaaaaacactaatttcatcactggaaataactttatcaccaaaataatttcttaaacattcaatttcttttatcattcaaaaataaagtcaattttaatattttgatacaatatttataatgcaaatatatgtaatgataattaaatattactttaagaatacatgcatctactaataaaaaaattaaattcatctaactaagagtaaaacaacttattatatatttagatatgattaattttaggggcaaggatactttttaggataaaaaaatttaacaacaaatttgttgaagttcatgaataaaacttatcagcttattttttagttaacattcactagtatttttttttattgctaacaattaactttttggggggatgtaccattataaatagtcaattattttaaatatagtgccaattataaaaattgacaatatactttattaatttgtaatgattcattgcaaaaaaaaagtattttttgtaacacagtttattttatagaaattattgtgaaggaatctttctttatggttgtttgtgtggtgtagaacgtataccacgggttaggcacagtcaaaggttttcacttctaagaaagagagacgaaacagagagagattttccattaagttatatgtccatgtaaatgtaataatatatatgtttggtactgagtgtaattaacacttatcacgttcatatttattcaagtttgattttggagaattcacattcatactaagatttcttatcatggctttgggatcacgttcctcttcctgcaattacgatgtgttcctcagcttcagagggaaagacacacgtcatggttttactggccatctctacaaagctcttgatagcaagggaatccacactttcattgatgatagggagcttcaaggaggagaggaaataaaaccagcacttacgaaggcaattcaagagtctagagttgccatcactgtgctctctcaacactatgcttcttcctcgttttgtttagatgaacttgcaaccatccttcactgtgaccagaggaaacagtcgttggttatacctgtcttttataaggtggatccttctgatgtgagacaccagaaaggtagttatggagaagcattggcaaagcttgagaggaggttcccggagaagttgcaagaatggaagatggctctggagaaagtagctgacttgtctggctatcatttcaaagacgggtatacaaccatactaatctttttactttatagtttttgttggattaacttttacttgtctgattatttgacattaaatctaaagggaaaataaatgcttgttgaccttgacaatagacgtatcaagacttggatacatgcaaggtgatatgcatccagcatatggtcctttccaagcttctaaaagcctagaatcattgataaacaactcagaattgcacataattatgataattgttgatgattccattcctttcaagtgtcgtgctaatttgaaacttgttttgtttgaaacagagatgaatatgaatacaagtttattgagaagattgttgagcaggtctctggggtgattgatctttgtcgtcctttacctgttgccgattgcccagttggactaaagtcacgagtttcagatgtaaggaaacttttggatgctggatctgatgatggtgcccacatggtagggattcatggaatgggcgggataggaaaatcaacacttgctcgagctgtctataatgaattgataattgctgagaagtttgatggtttgtgttttcttgcaaatgtgagggaaaactcaaacaaacacgggttagaacacctccaaagaaaccttctttcagaaataattggagagaagaacatcaacttaacaagtaagcaacaagggatttcaatcatacagtctaggctcaggggaaagaaggttctcttgattctagatgatgttgacaaacacgagcaattacaagcaattgctggaagacctgattggtttggtctcggcagcaaaatcatcatcacaactcgggacaaacaattgctagcatctcatgaagttaataaaacatatgaggtggaggaattgaatgggaacaatgctcttcagttgcttacatggaaagctcttaaaaaggaaaaagctgatccaacttatgaaaagctcttgcatcttgcagtaacttatgcttctggccatccattggttttggaagtaataggttgtgacttgtttggaagaagtatagtagactgggaatctgtcatcaaacaacataaaagaattcccaagaacgaaattctagagagacttaaagtaagctttgatggtttggaggaagaacagaaaagtgtttttcttgacattgcttgttgtttcaaaggacgtgatttgcaagaggttgaacatatacttggttgtctttatggtgactgcatgaaacataatattggggtgttggttgaaaaatctctaataaaggggagttgggatggtgtagttaacatgcatgacttgattcaggacatgggcaggggaattgaccaacaagaatcgtcaaaagagccagggaagcgaaggagattatggttaacagaagatataattgaagttttagaagacaactcggtaagtgagagtatggtttcttatcttgatcttttttatttttgtctatcgtatctttatatcatagtcaagtttttcatgacaatttgtaaatttctttaaacaggtgaattgatgtcttacatataacttgtattgtggttgatttgtaccttttttcattaacagggatctagaaaaattgaaatcatatgtctggatttctccttatccgagaaagaaacaacaatagaatgggatggaaacgccttcaaaacgatgaaaaaccttaaaatactcattattagaaatggtaaattttccgaaggtcccaattattttccagaaagtttaagagtactggagtggcaccggtatccttctaattgtttaccatctaattttaatcctaaggaacttgtcatatgcaagttacctgacagttgcattacgtcatttgggctccatgactcacggaaggcaagtttaaggagtatattttcttcatcttgttaattaataaattcactttaaatttattcatttggttctttttttttcttttttctttttttttctttttttttttttttttttttgcagaagttcgggaatctaaaggttttgaattttgacgcgtgtgaatttttaacagagatatctgacgtatctggtctcccaaatttggaggaactttcatttaatcggtgtgggagtttaattacagttcacccctcaattggtttactaaataaacttaaaatattgagtgctgatggttgcagcaagcttaccacatttccacctctgaacttgacctctcttgcaagtcttgaactttcaaattgtttcagtcttgagaactttccagaaatattaggagagatggaaaacttatggaaactttctttgaaaaaccttaccctaaaagaattgccagtttcatttcaaaatcttggactcggctggttaaacctggataattgcgaaattggttgctttccaagtagcattttcgtgatgcctaaactgtttgttgtgaaagctacaaattgcaaggggttgcaatgggttaaatcagaaaagggtgaagaaaaagtgggctcaagagtatgttcaaatgtatttgaattcagtgtcgatggttgcaacctgtatgatgatttcttttcaacaggtttcatgcaggttggtcatataaaaactttatgcctaaggaacaataatttcacattccttcctgaatgcatcaaagaatttcaatttttaagaagacttgatgtgagtggttgcttgaatcttcaggaaattaggggggttccaccaaactcaaaagatttcaatgcaacagaatgtatatccttgtcttcctcgagttcaacaagcatgttgttaaatcaggtattgtcttgtttttaacgtatatatatgatttgataatatattgcacacttgatattaataaacttatgatatctttatgaaatatgaccaacagaaattgcatgaggctggacaaactgtgtttcggtttccaggagcaactattccagagtggttcaaacagaaaagtaggggaccttcaagttctttctggtttcgtaatgaattccctgacaatgttctttgtcttcttatagcacgtctggaatgcaaaacaaaatttggacttgaacccaacgtgttcatcaatggcaaacttcatgaaaaattctctcatcacactagcgtaaaaaaggtgaaattgtattatacatatctatttgacctcaaatcagcgtgtctgccatttgaagtggctttagaaaaggaatggacccatgtggaaattacatacgcaggtgtgatggagacctcactggttaaagcaaccggaatccatgtattgaggcaggatgatattcgatatgataatccttatggcaagacaaaattagaccatgatctcaacagctctgaatcacaaccactcattaaaaagcataggtatgtagacaagcaagtttcataattatgttatatatgaaaattatacttttaaattgtaataaagtaaaaaataccaatattataaatataaagtcaacatatgagatggtgtgactgaagagaagatataataggttgttttgcaggatatcgaggtgggttggccctgaaagaattagaaagcttctgtggaaagctgcagatggagctttgattcctaatgcccttactattaagaacttcccttgtcggcgatgtggcgtgttggaggagacatgtctgcatactcttcgtgattgttttgctgtgatagcgttttggagaagtgtgttacctaagcaattagcaccaaagttttttaaaggtgatgtaacagtgtggctggaaacaaatttatctttttcagaggcagctttttttggccgactttttttgggattgcagtggaagtggtcttggaattgcgcaataaccatgcgttctatcataaatacaatgtttacggttcccgtaatatgatgtatgttgtctttaagcgttataaagattttatgagagcccatgcttctcacaatttgatgacgaggaatctcttgaagtggaggagtcccgaacatgatgatgaggaatggttgttgaggttaagagtgagtggtgcatttgatccctcttctggtactgctgcatgcggaggtatattcacagacaattattatagatacgtgcttgggtattcggttaaggttggggaatgttgctcaaaagatgaggctgaaatatggggtatttatcatggtatgaagattgcaaggcagtatgatatttggggtgtttatcgtgataaactaaggcagcgtaggattccaatcagacctaagattgcaaggcagcatgattttggtgaaatttgggtggaatcggggtcgcagaaagctattgagtttgtgttagatggatgccctacatctgcatctacatctagatctagatcgctgcagcattgcttccctctctgtcctgaattgcaagctctgacctctgctactaatcacttttacttcttttgcagagcgagcaaggctgttgaatcgtttgccaaattcgggagtatattttcttcatcttgttaattaataaattcactttaaatttattcatttaattctttttttttcttttttcttttcttttcttttttttttttttttgcagaagttcgggaatctaaaggttttgaattttgacgcgtgtgaatttttaacagagatacctgacgtatctggtctcccaaatttggaggaactttcatttaatagttgtgggagtttaattacagttcaccactcaattggttttctaaataaacttgaaatcttgagtgctacgtgttgcagcaagcttaccacatttccacctctcaacttgacctctcttcgaagacttaaactttcagattgtgtcagtcttgagaattttccagaaatattaggagagatgaaaaacttatggatgcttaatttggataacattcacataaaagaattgccagtttcatttcaaaatcttgttggactgcaatttttattactgcataattgtgaaattgataggtttccaagtagcaatatcgtgatgcctcgactgtcttgtgtgtgggctgcatattgcaaggggtggccatgggttaaatcagaagagggtgaagaaaaagtgggttcaatagtatgttcaaatgtatgtgacttcagcttcagtggttgcaacctgtatgatgattttttttcaacaggtttcatgcagcttgatcatgtggaaactttatccctagtgaacaataatttcacattccttcctgaatgcttcaaagaatttcaatttttaagaagtcttgatgtgagtggttgcttgcatcttcaggaaattaggggggttccaccaaacttaaaagatttcagggcactagaatgtatatccttgtcttcctcaagttcaagcaagttgttaaatcaggtattgtcttgtttttaacgtatatgatttgataatatattccacacttgatgttaataaacttatgacatctttatgaaatatgactaacaggaattgcatgagtctggacaaactaagtattgttttccaggaacaactattccagagtggttcaatcaccaaagtaggggaccttcaagttctttctggtttcgtaatgaattccctgacaatgttctttgtcttcttaaagcacgtgtgggatatgaacttgattatctcatgcccacggtgttcatcaatggcaaacatcataaaattcactcttgtaacactctagtaagaaaggggaaattggattatacatatctatttgacctaaaatcagcatgtatgcatgatgatgtatttgaagtggctttagaaaaggaatggaaccatgtggaaattacatacgcaggtctcatagagccctcactggttaaagcaaccggaatccatgtattcagacaggatgatattctatatgatgattcttatggcaagagaaaattagaccatgatctcaacaattctgaatcacaaccacacattaaaaagcataggtatgtggataagcaagtttcataatcatcttatatatgaaaattatactgttaaattgtaatccatgtattcagacaggatgatattcgatatgatgatccttatggcaagagaaaaatagaccatgatctcaacagttctgaatcacaaccacccattaaaaagcataggtatgtagacaagcaagtttcataattatgttatatatgaaaattatacttttaaattgtaataaagtaaaaaataccaatattataaatataaagtcaacatatgagatggttggtagacgtggtgtgactgaagagaagatatagtaggttgttttgcaggatatggaggtgggttggccctgaaagaattagaaatcttctgtggaatgctgctgatggagctttaattactaatgcccttacttctaagaacttctcttgtcggcgatgtggcgtgttggaggagacatgtctgcatgctcttcgagattgttttgctgtgatagcgttttggagaagtgtgttacctaagcaattagcaccaaagttttttaaaggtgatgtaacagtgtggctggaaacaaatttatctttttcagaggcagcttttttttggccgactttttttgggattgcagtggaagtggtcttggaattgcgcaataaccgtgcgttctatcataaatacaatgtttacggttcccgtaatatgatgtatgttgtctttaagcgttataaagattttatgagagcccattcttctcacaatttgatgacgaggaatctcttgaagtggaggcggctcaaacttggtgaggattggttgttgaggctaagtgtgagtggtgcctttgatccctcttcaggtactgctgcatgcggaggtatattcatagacaggggttatagattcgtgcttgggtattgggttaaggttggggaatgttgctcaaaagatgaggctgaaatatggggtatttatcatggtatgaagattgcaaggcagtatgatatttggggtgtttatcgtgataaactaaggcagcgtaggattccaatcagacctaagattgcaaggcagcatgattttggtgaaatttgggtggaatcggggtcgcagaaagctattgagtttgtgttagatggatgccctacatctacatatagatggctgcagcattgtttccctctctgtcctgagttgcaagctctgacctctgctactaatcacttttactacatttgcagagagaacgggtatgctgaatcgtttgccaaattcggtttatccatgaaagagcaggctgcctctattttttctgagtggccctcatttttatgaaatctcctgtactgtatcaaaattttatatttttgtattttcaatttttatgtttgtaccaattcacttattttctgagaggccctcattctcttattttaatatttatatctcttatatctatgtgttaaaattcattatttttttttgacttttcttatatgtttattattattattattattattattttatatattgatttgaatttcttttatattttctcaaataaagtgtgtaactttttgtttcttatctcatattgttttataacatttttatcatattttacattgtaaaattatttattttttcgtttgggtctctaaaagatcattgatgttgcatcgaactgagtatccttatgtttgccaattgcaattgggcacgaaaacgttcaattgaaaacaacatttggctacatctccatcaacgttcactggatcagttagaggggtaagattttttatttttaatttcaacaacttcttccaacattacccactcaacaaccagcattaaaccataaatgcggtcatttttatttctaatattaattaaaatgtatttttatatgtacatattttaatatatttttttttgaaaacttgatatatttttattttataatgtaacaacaatttttaacaagatgtaataatatattatcaatttaagtatccatttttggtataaaaaaagagaaagataaaactaaattttctaataacttcccgtatgtatatttgtgaatataataagagatttataaaagggaagatttaggaagctttgattactaaataaataacttatctatgaatatttttctgtggtatgttttaattaaaaagtaatgaaataaatcatagtattatatttaaaattctattcaaacacttaatgtttaatttagtaattatataattaacttacttttcatccaaattatccaaacaagtttaattttgataaaagtacttttatttttataataaagtatctaaatatacaacaaattatatttaatttacttttatctaaactaaaaagttaaattacattttaaatttacaaactgtaattcaaacacatatcagttcaggaatctaagctccaaccacaatggacacattaccaaataagttggttgtaacccatgttttttttaattgttcatgaacgttttgaagtaaacatgaataatcaaattggtcgacaatcaaattataaaatataggatttgatatttttatataaattttaattttaatttttttattaatatatatatatatatatatagaatgataatatatattttaggttagttataattttgtattttaattaattttaaaatcattctgcttttcaattacagatcaattatttaattatattttttagttataattattatattttttcatattatgcattctacagttaatgttatattatatattaaaatattcgcaatgatgtttaaaataaattaaattaataatcttaaatagatattatatttttattgtgtcaattaacgtaataattaaaatatcttaaagtgtaatgttaaaataatataataaataatatggtattactcatactcgataagcctgtcaaaaatggtagaaacaaatataaatagtgtaatgtaaaataaatagtgcaagaaaaaaaatactttacttaaaaaaaggaaataaagagatttattaaatattttatgagtaagaaggaaataaatataaaaagataaaaattgtcattttgaaaattgtcatgaggtagcatctcaaattgttttcaaattattaaaaaaacttgtttgtcaaacactgtttataaagttaaacaaattttgtagttgttaaaacaattagaaactaactagaaatatttgtcaaacataaactaaaataatattttaggatcaaattatattgaccagtgtttcaaaaattataagtaacacgttagataagaagtagatctcataaaattttgtaatttttaataaatttaaattaattcatctccatttatgtgattgttgatgaaatgaatactctctgcttgtgaatgtttgttgggactttgttattattttatgatgttacattataaaattataactgatttttaacattacttttttgactctctttaataattggttttaagtgaattttaataataaaaaacctaaaataaaaaaaaaacagaagtaaaaaaatgtccaattaaattgtatttttgaattgaggttaaataaccttttctccttttgttgttttaaagaacttttagtacttataaaatgtgatatttttattttagttccttaaagatatattttattttaattcctgcaaatttaaaaatttaactttaatctctactcattgggaaatgtttatactcctagaacttggaaagaacttctaaatattccatatctaaagatagaatgaaattatttagttttagttatgcatctttattcttaaaacaaattatttgatgtagttgttaagagattagaagtgttattaggtaatttagactctttcacataagggatcatgattaggatatgttagcggatgaaggtaataattgtaataacgttaaatggtgaaaaatctctaccattgtatcaagagtagtttcggtaggtcaaacacttaacacgtccatgaaatcatgcatcaacaggcaattaacaccccaagcaaacatgttttgtctctttaatattctgcttaattatctttatttatgttgaattttacatttttcgcatcattactagataaatactgaatttagtcaattatctgcttaaaattagaaatatacaaactccaagtcgattagtcaaagtctttgtggacttgacactcaaacttactctagtaattactacttggatgctggatctgatgatggtgtcaacatggtagggattcatggaatgggcggggtaggaaaatcaacacttgctcgagctgtctataatgaattgataattgctgagaagtttgatggtttgtgttttcttgcaaaggtgagggaaaactcaaacaaacacgggttagaacacctccaaagaattcttctttcagaaataatcggagagaagaacatcaacttaacaagtaagcaacaaggaatttcaatcatacagtctaggctcaggggaaagaaggttctcttgattctagatgatgttgacacacacgagcaattacaagcaattgctggaagacctgactggtttggtcgcggcagcaaaatcatcatcacaactcgggacaaacaattgctagcatctcatgcagttaatgaaacatatgaggtgaaggaattgaatgagaaagatgctcttcagttgcttacatggaaagtttttaaaaaggaaaaagctgatccaacttatgtggaggccttgcatcgtgcagtaacttatgcttctggccttccattggctttggaagtaataggttcccacttgtttggaaaaagtgtagaagaatgggaatcttgcatcaaacaatatagctgaatgcatcaaagaattgcaatttttgttgctgtgttttatttgtttgtgcatgttttggcgattgagggatagagacgtgtgattatgtgcttatttatttatttgtaatggttgtgttcacattagtgctcagacggcctctactttaggttgtgccttttctaattgtttataacattttcttgtacgaagatctgaatttcaattaagattgccttaaaaaatgaatactcaggttttggtttaaatgcatgcaaggacaccctggacgtgtgaatttgctggttcttggtgaagttgaaaacacgtgtgatcagcaacaatgacattggctttgggacggctctagtagggaaaaagctcaagcgattggcagagctagatgatcaatttatatcaagagtgatgatatatagatattcataaatcataaatacctatttgatattatttttttacatgattgataattttttaattattaaattaaatgaatcctcgttgatgaggtatgtaatggacatgagatcatcctttggagagtgctgagtgcactgaatgcagcaagatagttgaaatcaatattttccgcgggaggtttagtcaatataaaaatgtaaaatatgcgaccatttgaaggacacttaattttctcattagtaaaaaaaaggaaatgctcataaaaaaatattaaaaagaagttaagaacaaaattaaatgtgtttaacttcttgaatagtgttagagggcaaggccatgcagaaaattcttcatcatgagaagtttagtgtcacgtgagataattcaggaatctggaagtgtctctagaaggagtgatcgaaattgaattgtgatggtgcatattctcgggcagccgatgttgcttcatgcggtgttgttctttgcactagtcgagtaggcaattttattcaaggaggcttggacattgctctatctatcctgaaagtggagcttttggccaactatttttgggattgcagtggaactgttgtgggaattcggcaatgaccctgagtcctatcttgttagccgttatgtttacaattcccgtgatatcaagtatattgtctataggcgttataaagattttatgagagcccatgcttctcagaatttgatgacgaggaatctcatgaagtggaggtggcccgaaattgatgaggattggttgttgaggctaaatgtgagtggtgtctttgatccctattctgtttctgctgcttgcggaggtatattcacagactacaaacgtacattcgtgcttgggtattgggttaaggttggggaatgttcatcaaaagatgaggctgaaatatggggtatttatcatggtatgaagattgcaaggcagtatgatatttggggtgtttatcgtgataaactaaggcagcgtaggattccaatcagacctaagattgcaaggcagcatgattttggtgaaatttgggtggaatcggggtagcagaaagctattgagtttgtgttagatggttgccctacaactacatctgcatctacatcgctgcagcattgcttccctctctgtcctgaattgcaagctctaacctctgctacaaatcacttatacttcatgtcgtctaatatttgggttggcgactatccaatctttagacagctggctgctaaatcgtttgccgaattcggtttatccattgaagagcaggctgcgtctattttttctgcttgtccctccttttgcaaaccttatgttcgggaaggattgtatgagttacattactttaaccattggctacttctccatcaaagtttgttggatccgttagaggggtaagtgttttttttcttaaaaaaaattcaacaacttcttccggcaattaaccctcaacatccaacataaaacccatgattgggttcatttctatttctaatattaatacattggttgtaacccatatttttttttattgttcaagaacgttttgaagtaaacatgaacagtcaaattagtcaacaatcaaattataaattataaaatataggattgatattttcatataaattttaattttattttattaatatatatatatatattgatagaatgataatatatattttaggttagttataattttattttctaattaattttaaaatcatttcacttttcaattacagatcaattatttaattatattttttagttataattattatactttttcatattatggattctactgttaattttatattatatgttaaaatatgcttattattgactgtggtaaacatatatgcgtttaattacaaataaatcataaatggtagtgaaatggagtgattaataacagggactccatgtgagctataatttgttagaagcttagctggttatcttcattctgttactgttgtattcaccttccactttcatgttcctagcacactagtacacaaaattaatcatccaatccaatacaatgacattccatttctacatcctctgttagagttctatgatctgtggtcacttatttccactttattttctttgtgaatatctttttttttttacttaattggagcaatgtgtaaatgatgaaagtaattttaatttgattcattttacctcctcaattcttcttattttcttttttttaaaagtgtttgttcaaaaccaaactagccctaaattgtctggcaaatggtaaagaattactattttttagtttgttcttactcattctatgatacaactttcttaatttttcttctttaattagttacattgcagcccttttgggtagtgaggccattgttgttactgatctgccagataggccgaggctaatgagaaagaacattgagatcaatatgaaacttacatgttctctgcagggttctgtaacagtaactgaactcacatgggcagaagatactgactcagaactcataccagatttcggtaataattatgttcctcaaccccttctcagctgacagctaagagctaatgacttgttggtgtgcggatacgtctattacttacgattcgtttgctagaaaagaaaatggaaagaaagaaaatagagagaaaaaaaaaatgaaacattttttatacttttttgagaaaaaataaaggcaaagttaatttttggataaaaaatttaacttttttctcctttttttcaatttaaatttaatttttttcttctccttctagccaaccaaacatagggtaaagtttttgttaataaggtaagcaaattacaagaaaaaaaatgaatttccaaaacattcatccgcgttatgtacgatatgtccgcgtacactttagtctattaatttcgaggaaatgctataaccaccaaaaaagaatagcaggaaaattgccagtaccaattaaatttggaccctgtctaactattgattaatttcaactttttaaaatgtttctcagtttagagagagaataattaagtaattatatgtagaaaaaaaataactaatatgtttagaaattagaaaagaattttataaaaaagataaataaattttaaaaaaagtcttataaataaagataaagaagtatattgactataaattaaagacattacgatcatgtttttttttcagggacaaaaagaagatacttttagcattgcgatcaaaagtataacatttatttagtattggaattgatttatattcataggtggaggaacttgtttatggagggtggtgggcgataaagatctaaaacccaagtgtaatagcatatttatttgataaatggatgataattttggaccctgattggtacaaaaatgcaaagtcaagcatcattatgagggaagacagctaaggaagggacacgcggcttgccattcttgagtacttaggctaaatttgagaaaataaaatttctttaatatattaaaataactaatatttgatttttaacaatttaattggacagaccatatttatttgtatcaaaggttttcacttttgaaaaagagagacgaaacagagatgaaacagagagacattttccataaagttaatacatatgtttggtactgagtgttattaacacttatctctttcatatttattcaagtttgattttggagaatccacattcatactaagatttcttatcatggctttgagatcaccttcctcttccttcaattacgatgtgttcctcagcttcagaggggaagacacacgtcatggttttactggccatctctacaacgctcttgatagcaagggaatccacactttcattgatgatgaggagcttcaaagaggagagcaaataacaccagcacttacgaaggcaattcaagagtccagacttgccatcactgtgctctctgaagactatgcttcttcctcgttttgtttagatgaacttgcaaccatccttcactgtcaccagaggaaacggttgtcggttataccggtcttttataaggtggatccttctgatgtgagacaccagaaaggaagttatggagaagcattggcaaagcttgagaggaggttccaggatgacccggagaagttgcaaaaatggaagatggctctgcagcaagtagctgacttgtctggctatcatttcaaagacgggtatacaaccatactaatctttttactttaaagtttttgttggattaacttttacttgtctgattatttgacattaaatctaaagggaaaataaatgcttgttgaccttggcaatatacgtatcaagacatggatacatgcaaggcttttagttttaacttgttaaaacttgttttgtttgaaacagagatgaatatgaatacaagtttattgagaagattgttgagcaggtgtctggggtgattaatctttgttgtcctttaaatgttgcggattacccagttggactaaagtcacaagtgctacatgtaaagatgcttttgaatgctggatctgatgatggtgtccacatgatagggattcatggaatgggtggggtaggaaaatcaacacttgctcgagctgtctataatgaattgatatttgctgaggagtttcatggtttgtgttttcttgcaaatgtgagggaaaactcaaacaaacacgggttagaacacctccaaaaagaccttctgtcagaaataatcggagagaacatcaacttaacaagtaaggaacaaggaatttcaatcataaagtctaggctcacgagaaagaaggttctcttgattctagatgatgttgacacacacgagcaattacaagcaattgctggaagacctgattggtttggtccaggcagcaaaatcatcatcacaactcggggcaaacacttgctaacatctcataaagttaataaaacatatgaggtgaaggaattgaatgcgaacgatgctcttcagttgcttacatggcatgcttttaaaaaggaaaaagctgatccaacttatgaggaggtcttgtgtcgtgcagtaacttatgcttctggccttccattggctttgaatataataggttcccacttgtttggaaaaagtatagaagaatgggaatcggccatcaaacaatataaaagaattcccaaccagaaaattctagaaaaacttaaagtaagttttgatgctttggaggaagaagagaaaagtgtttttcttgacattgcttgttgcttcaaaggacataaatcgaaagagcttgaacatatacttagttgtctttatgatgactgcatgaaacatcatattggggtgttggttgaaaaatctctaataaacgtttgggatggtgtagttaacatgcatgacttgattcaggacatgggcaggcgaattgaccaacaagaatcgtcaaaagagccagggaagcgaaggagattatggttaacaaaagatataattcaagttttagaagacaactcggtaagtgagagtatggtttcttattttgaactctttttttgttatcatatctttacttcatagtcaattttttcatgacaatttgtaaatttctttaaacacgtgacttgatttgttacatatatcttgtattgtggttgatttgtaccttttttcattaacagggatcttgtgaaattgaaatcatatgtgtggatttctcctccttatccgagaaagaagcaacagtcgaatggaatggaaacgccttcaaaaagatgaaaaaccttaaaatactcattattagatatggtcaattttccaaaggtcccaattattttccagaaagtttaagagtactggaatggcaccggtatccttctaattgtttaccgtctaattttcatccgaaggaacttgtcatatgcaagttacctcacagttgcattacgtcatttgggttccatggctcacggaaggcaagtttaaggagtatattttcttcatcttgttaattaataaatccactataaatttattcatttagttcttttttttttccttttttttgcagaagttcgggaatctaaaggttttgaaatttgacgagtctgaatttttaacagagatacctgacgtatctgatctcctaaatttggaggaactttcatttgatcggtgtgggaatttaattacagttcaccactcaattggttttctaaataaacttaaaatattgaatgcttatggttgcagcaagcttaccacatttccacctctcaacttgacctctcttgaaagtcttcaactttcagcatgttcgagtcttgagaaatttccagaaatattaggagagatgaaaaacttattgacgcttatgttgtttgaccttaacctaaaagaatggccagtttcatttcaaaatcttgttggactccaaattttatacctggctaattgtgaaattggttgctttccaagtagcattgtcgtgatgcctaaactgtctattgtgagggctagcaattgcaaggggtggcaatgggttaaatcagaaaagggtgaagaaaacgtgggctcaagagtatgttcaaatgtatatgaattcagtgtctatggttgcaacctgtatgatgatttcttttcaacaggtttcatgcagcttggtcatatggaaaatttatgcctaaggaacaataacttcacattccttcctgaatgcatcaaggaatttcaatttttaagaatccttaatgtgagtggttgctttcatcttcaggaaattaggggggttccaccaaacttaaaatatttcactgcaagagaatgtatatccttgtcttcctcgagttcaacaagcatgttgttaaatcaggtattgtcttgtttttaacgtatatatatgatttgataatatattgcacacttgatattagttaacttatgacatctttatgaaatatgactaacaggaattgcatgaggctggacaaactatgtttgggtttccaggagcaactattccagagtggttcaaacagaaaagtaggggaccttcaagttctttctggtttcgtaatgaattccctgacaatgttctttgtcttcttatagcacgtgtggaacgcacagatggatttgatattcccatgccccgggtgttcatcaatggcaaacttcatgaaaaatcctcttttaacactagcctaaaaaaggtgaaattctattatacatatctacttgacctaaaatcagcatttaggaatcctgataacaatctaagtgaagtggctttagaaagggaatggaaccatgtggaaattacatacgcaggtgtgatggagacctcactggttaaagcaaccggaatccatgtattgagacaggatgatattcgatatgatgatccttatggcaagacaaaattagaccatgatctcaacagttctgaatcacaaccactcattaaaaagcataggtatgtagacaagcaagtttcataattatgttatatatgaaaattatacttttaaattgtaataaagtaaaaaataccaatattataaatataaagtcaacatatgagatggtgtgactgaagagaagatatagtaggttgttttgcaggatatcgaggtgggttggccctgaaagaattagaaagcttctggggaaagctgcagatggagctttgattactaataccgaaaggagatataggcatctttctatggactcctcttgtccgcgatgtgggatgttggaggagacatgtctgcatgctcttcgtgattgtccagatgtggctgcgttttggagaagtgtgttacctgtgcaattacagccaatgttttttaaagttggtgtcacagtgtggctggaaacaaatttatctttttcagaggcagctgttttttggccaactttttttgggattgcagtggaactattgtgggaattgcacaatgaccttctgatttatggtggagactgttatgtcgagttccgttttatccagcgtactgtctttgagcgttatcaatgtattatgagtcgccatgcttctcacaatttgatgacgaggaatctcttgaagtggcggacgccccttactaaatgggattcgttgttgaggttacgtgtgagtggtgcatttgatccctcttctggtactgctgcatgcggaggtatattcagagactacgatgatagatacgtgcttgggtattcggttaaggttggggaatgttgctcaaaagatgaggctgaaatatggggtatttatcatggtatgaagattgcaaggcagtatgatatttgggctgtttatcgtgatcatctaaggcatgaatatgacattccaatccatcctaagattgcaaggctccagcatgattttggtaaaattggtgtggaatcggggtcgcagaaagctattgactttgtgttagatggatgccctacatctacatctgcatctacatctacatatacatccacatccacatctacatctacatctacatatacatcgctgcagcactgtttccctctctgtgctgagttggaagctctgacctctgctacatacttctcttggatgtgggaagagagcaaggctgctgaatggtttgccgaattcggtttatccatgaaagagcagtcgtctatttttgatgcttgtccccccttttacaaacgttttcctcctcggaaggaatggtaaaaagaaatagtgaaaaataattcattccaatcagtcctaagattgcaaggcagtatgattttggtaaaattggtgtgaaatcggggtcgcagaaagctattgagtttgtgttagagatggatgccctagatctacatctacatctgcatctacatctagatatagatcgctgcagcattgtttacctctgctactaatcccttatacttgtgttggggagagaacaaggctgctgaatcgttagccgaattcggtttatccatgaaagagcaggcgtctatttttgatgctgctccccccttttgcaaaccttttcttcctcggagtacatggaaaaactagtttcagtacccgttcattggatcagttagaggggtaggattttttaattttaacaacttcttccggcattaccctctcaacaaccaccattaaactcataaatgcgttcatttttatttctaatattaattcaaatgtatttttatatgtacatattttaataaatttttattattaacagtattgtctatcattcaaggtttattaacacattacttatccattcaaagtttagacttttatatagaatgactttttaagtggtcattaaactttaagaaattcttaattagatcattcattcatagttgtatgaatttttattttttcttttgaaaaatgaatttttatttgtatgtattattaattgtgcatgttttctataattttgtatttccctttgattaatttatttccgcataaacatacataggagttttttcaaacaatatgctttggattacataatgaggattttgtttcaaacaattaatatccctcattcaaaggatgttctaaaaagaaataatttcactgaaaataactttatcacaaaaataatttcttaaacagtcaatttcttttatcattcaaaaataaagtcaattttaatatttcgatacgaaatattacatatatatttaatgataattaaatattacttttacaatacatgtatctactattaaaaaaaattaaattcatctaacttaagagtaaaataacttattataaatttagatatgaataattttaggggtaacgatactttttaggataaaaaaaatgtacaacaaattttttgaaattcctgaataaaatttatctgcttactttttaattaatattcactagtattttttattgctaacaactagtattgggacccgtgcggacataggggtcacgcttcactacactctgctacatttttataaattaattttaatttttatatttaccataacaaaaaaatatttatatatgataatattgataaaataaattaacgtaattaactacgttattcttataactaataattaaattattattttacaataaatatagtaactaaaatgttattatgttggctatcgtaacaattgaattaaataaaagagtttaaaaatttcaaattttgattaaatttaaataataaaactataattttttttaatttatcaaaatttcaccattttattttacttttatttacccattatttgatatgacaaaaatttaaaaatgaatgatatatttaataaaaataaatattgtaaattgtttgacatgtaaatgtgtaaaatactgtaaaaaaaacattttcccatgacggtttactcatgatgacatagagaataattatctttcatacatgataattataatttcaaacattaaccaataaaattaaaacaaatttacaatatgatatagtgaataagtaattaaaagctgtcttataacaaaaatcatttttataatgaattattattttgatctctatcataaatatttttttatttatgatattattgataaagtaatttaaattaattaactttggttgtcttataacaaagaatcaaactattaatctttaataaatatattaactaatatcattatcttattatcgtaaaaaaagaattaaataaaaaatttaaaaattttaaatattcatttaatttaaatgataaaactaaaaaaattttgttttaaatgtcaaaatttaattttactattatttacacatttttcatatgttgaaatattaaaaacaaataataaatttaataaaaataaatacaattgattgtttgatatataaatgtgttaaaaaattttaataaaaaaatattctcataacggttaactcataatgacatatggaataattattttccataaatcataatcataatttctatccttaaaaaatgaatttaaaactaattcctattataatatagtgagtaagtaatttaaaactattttgtaacaaaatcacttttacaaattaattttagtttttatcgatataataattaatgataattttactaatgattgttgattatttgatatgtgactatgttaaatactttttgggaaaaaaattttccatgacagttgacccatgatgacatagagaataattaatgttggtaaatgataattgtaatttctaccataagaaaatgaaattaaaattaatttacattatgatatagttaataagtaatttaaagttttcttgtaacaaaaattatttttataaattaatttattttttatctctatcataactaaaaatatttttatttatgatattattcataaattaatttaaattaattaatttggttgtcttataacaaagaaacaaataattatatattattatgctggttataataacaattgaattaaataaaaagagtttaaaatttgaaattttgattaaatttatataataaaactataaatacttttattttttaaaatgtgactatttcattttattcttatttatttattttttatatcataaaaatttaaaaataaataatacattcaataaaaataaatattgttgatcgttttatatgtaattgtgttaaatacttctataaaaaatcttttccctacaacggttaaatcatgatgacccaaagaataattatttctagtcaatgataattatagttcctatgataaaaaaaatgaattaaaattaatttacattatgattatgatatagtgattaagtaatttaaaatttttttgtaacaaaaataatttatacaaattccttttaatttttatttctgtcataactaatcatatttttatttatgataatattgataaagtaatttaaattaattaactttagttatcctataacaaaaaataaaactatttttataataaatatattaactaaaggttattatgctaattatcataagaattgaattaagtaaaaattcaaaatattgattaaatttaaataatgaagctataatttttttaaatgtcactactttagtttatcatctatttaattgaaatttttttatcataggcaagctcaattttattaaactcaaatatgataatacaatgagtgtcaacgtgaagaataaaaaaatgtaaatatgttttttatttcttaaatatgatgtatgatctttttagtatctcaaattttaaattttttttatttcttaaaattgataattatttttttagtatttcatcacatatgacattaatataatatttttttgtagtccttatataatttctagggactaaaaataataattttaaagtaacaatattttgcaaagcttgttccactgtcacattatttggttaaaaaaaaaaatatgattcacagataccaacttacccgtgaatgaatgaagttatgacatcataaatgagaaacataatgaagaatttatataagattggtatttactatatagctagccccaatgatcataaaaacatgattggaatagtattataaataataaataaagtatgaatctctataatattaaatcaagtttatttggcatgattggaatttatccgatcactggccttgatagaggttcaaaacaaaaaataaatacacaaaaaataacatgaaatgcagaagctacatcctttatcacgcagaagttacatatgacagattccaaaacaccctcgatttcaaaatttgagttggatccagttagcctaaatcagaatgtccacaataacaggtcaatcactgtaaaataatagtatttgtgatattattgatttggttcattaaaataattaactttaatgatgttataacaaagaatcaaactattatttaataataaaaatattaaatagatattattatgttgctccgctatgctccgcatttttttaaaataattttaattttatatatatgataaataaaataatagtatttgtgatattattgatttggttcattaaaacaattaacaattaactttgatggtgttataacaaaaaatcaaactattatttaataataaaaatattaaatagatgttattacgctgctccgctactctccgcattttttaaaaatgattttaattttatatatatgataaataaaataatagtatttgtgatattattgatttagttaattaaaataattacctttgatggtgttataataaagaatcaaactattatttaataataaatatattaaatagatatgttgctccggtacactccgcattttttaaaatgattttaatttcatatatatgataaataaaataatagtatttgagatattattaattgcttcattaaaatgattaactttgatgatattataacaaagaatcaaattatctatactataataaatatattaaatagatgttattatgttgcttcactgctctccgcatcttttggtcattaaaacttttaagcttttaagtcagacataaaatattaattacttttggtcattaaaactttattttagtcctataagtttaattttttatttgctctcttataaaaaaatcatttgttattagtccctttgaaaaaatttaccaaagagtaaatacaaaattcgagtatttattagaaatcgaaaacatattttagccaattaagaaaaataaaacaatttcaagattggccagaaaagggtgaagctgtttcttggtacaaaatttgtagctttcgtttgccaagtcaaaacctgactcaacagaacaaaatgatggtgctcaatagcttagaatatctcaatagctttgcatctctatcatatgataggagctcaattaaataaagttatctgtatgtcctaataaactgattcatgattgatggaatgttaataggaaaaagaaatcgaagcctctgataagaaatcgaagtttctaattggtctatacagttattacagttaaatgatttggcgtaaccaagatacattgtggaagtacaaggttgtaggatatgatgatcctttgcatttggacaattcacaattgctatcaactcagtttttgtttcggaactttttagaggatcatttatattaggaatcagtaatactttgtcatgtgatataatgtcacaatatcaataatataattaaatgttccttgaaaatccttggcagtttgtttagttcttgcctagaagaaatcggagatggaaatggttttagtagacacgctttttagttccaaaatgcatcatcactttgctaagatcagctgcttttaagattagaaaaaaaaaaaaaaaactgagaagattgaggttttctcatgaggaattctgtttatcttgaaggaccaattaatatagagtataaatttattttcatgacttgtagaacatacttggtttggttacttaagatttgttgtggtgtggagcattgattcttttctgtccatgattttacaatataaactctgatttaccctgttatgactgacaacattaacatagagcctcatgaaaataactcaaattttattataagccatacatatttggtttcaaagtagactatataggctgagtttagagaacatcaaaatataacgtaatgcataggtgccctataatatcacttccatgcttcaagcatagacctcagggtttgccacaagataggcatccactaccttgaggagagccaaaccttcctcccttgcagccttgaaatcctcctctttgacatcaacccctgctttgggatgatacttgctgacattcttcatcttgcaacctccctcttcggtggcctcgaacttaacctcatgtgcaattgaatccactttttccagtgcaccatccccctcgatcactgcatagctgtaatttttttttgtagttactttggatttgttcagcattggcctcttcaggttagtttttgtttttgtgtatatttttttacatattggtaatttatattattaatttttattatatttttttatttatgtagtttttggttgttaaatattatttatattggcgatttaaaatattaggtttgagaatatttaagattagtttataattacttaatcagaggatacatgaaatataagagttttttttgttaaaatgcttcatttaaaatattttaataaatttaatttataggaaccttattcaaattaagtgtataatatagttggtaaatataatttgtaagatacaaatttattaaaattaattatatgttatagttgataaatatatattacttatgtagttgttttgtgttaaatagtatttatttggaacatttaaaacatgaggctaatttttttcattttttatttatattttgtatgaattggtaatttatatttgatttaaaatatatttttgatttatgtagtttttgatttttcatttgattttaaaattttatcataaatataatttgatggtttatattttaattttgtaataaattgttaatttattaaaaatacatgtttcgaaatttttgttgtgtgtatatttttaatttatacaggtacttatttacgagcaaatttgttacctgtcagatccacagatttcgctattgggtaaagctgattatgttgaccagtaattggctgccaagtcagctaatggaatccgctgcggtgacttgcgaactcttctccgtggcagtttgacaatttttccttacggcctggcactttcacatttagtttcttcaattgtggccttttgacgcttgtctcgcaagtgtttgatcttatcacctccattgaaggcattaccaataatgatctctttgttagtcatttcagtttgaaacctaccaaaagatatacggcattatggttagaatatatttagaaaacgaaatctttaggacataaaggtgaaaactaatgactggtgagctttacctcacatggtatgagaaattattatatgatctagaacaaccatgtgcctataatctcaattaatctgcacttgacatgtaaccaagtttttaaatttacgaaaaagagttaataaaactcgtagtgagaataagagaataacaagtctaataaaaaatgaccaaaacaataatacagtcaaacttgaaatttgaaaatggaacaacttgtagtgagtatttaaaaaaattcaactcaagtacttaatataaataaaacacgtgtaagagaattcataccacaagtagttcacgtagtccaaggggtgcagttacaatgtatgacacatctgggtgttcctttgctgcctctgcacttaaggaaggaatatcctgcataatagtggagtttaaatttttttgcctattttctatcttcataagtcaaagaatcattttgacaatttatagaaaagtaggagagaattctatgcagacctacctgactccaatgcctcccaggaaagagaaaaaagggactaacaataatgcaatgagcaccttgttaaacgcaagattgaaaagcatctcttattgatggttctgctaattcctgtaaatgtaaaatacaattatgaagcatcaagaatttgctccatagctacaattctctcatgaaatgaaaaggcaaagacatggctagatgcacaaagaaaattgtgttactaaaattgttatttctgccagccaaatctagattccaggtcagaccgggaaataaagggtaagcagctcaactatatttcctcatgaaggaaaatcatgtattattgtgcatgccaaacaacccaaggaaaatgcaaagaatcctaaaataatgccagacttgctcacatgctcgcaagttcttttttaagacccaggaagctttatccttaaattgaggcaagagatggcaaatagcctataggctgtagcagctcaagtatgaagtatctacctaccatcattcagatttcatttttcatcttcatatggtctttgggcacttgacatgatgaaaatctcaacagattacagaaattaccatatgagcaggctccacaatttcatacccagttgtatgcttaaacatctccacaaattcatctgacattcaaaaccagataacttttagacataaaatttaattatgccctagtaaccaattttaaaaaactcatctgtgaaagtaaactcatcagcttggggatgaggtttggagcatcaaggaccaaagccttgaacaaccttcctggctggacagtgctagtaaactcagtggtgaaagtaaaaacctacatgttaagtttggagtaaaatacaagatatggctagaaaattaagtatagagagcacttcgaattgcagtgatgtgagatatcagagatgtgtgtacttatgattgaagaggataaataagcaattaatgttacatttgacaatatttcaacaaacaaccactattgtgaaatggaccatccccttgcatgccttattaattccatatttccaatgaaagtctttgtttcctttacctatgtaaacatctaatcaaacaatgcaacctgtgagcctattactcctaatctatgcagtgataatacaaatcacacacattgtaggctaattaataatatactctggtctgtttttttaaactacttcgaaagctttgaagtctataatttaatttttctgtcagtactaaaaccttagggtctagctaatcacaacaaatgtgtatttatgagattctttttaatgaaaactttcaaatttttatttcgtaatctttggtctgaagctgaggagtgaagaatccaaacctgggagaagtcaagaagaagctgcagatgctgcgaagcaaggagaagcaacaaacgaacattgtttcattttataattttgctaaaacagaggtcagaaaaattcccaataaaactgataagagtgtaaatgttgaacataaagcagaaccatgaaacattaaaaaattgaaagttaaaatattaaaaacaaaaaagataaaaggaaatacaaagtatgagctatacaaagtatggattaaatatactattaggagtcaaattaacaaaaacattattattgtgtgtaacatcatttagcctgtaaattgaaatgggcaatgaactactgttcaagaattttttttggaagcaagtgttgatcacaaaactagtttggttataaaaaaaataatttatacttttgctcctatctttattataagatttaattaattatatcattagaattaattaaggaaataggttgatttttagttgagagcattaaatttattctaaatttatatttttttcaaaactatcccattgagaaaactaataaatattaataggtttcattgttacaccagtactctaaaattgaatttaattaaagattttttttaaagaaataactaatgcaaaagacaatttagattgattatataaaggatcgaattacacttttaaattggaataacaatttgtataacatttttgtatatttatctcttttacacattatttattacattttataatgatagatataaacacacacaaaatgttatacgaactgttatataaattacatactgcatatattacatctcataataaaacttgaacaaacttttctctgtttcttacattttcaatgtgtgtaccacttccacacatttattttccattgcaaaagaattggcctggcaaagtaaatcttttgctttgatactaaatttgagtcaatcattctccaaccttcaaaagcagttgataaacgtaaccaaattaacattaaagactcgttaagcaaaattaaaagagaaaactgtaaaatgcgtatttaaataaaatggagttttattttcgtacatggttaatctagagattttacattatatatcaactaataaaaaattgtcttaattataactttttaaagtaattaatacaaaaatccacaatgttactatatttgtacatgttcatgatagataaaaaatatttatactgtcgatgcattttaattaaatatatgaaaataatattacatgtttaataggagaaaagagtgggaagatttacattcatgaatacggtttaacagtatattattgcaactcatcaaatgtatcgctttcataataatttactcttatgttctgtttaactttgaaacttgagtatagatgaaaagaaattatccaaaaaagttgtcacagtcacacatgaaatacctctttataatgcatcaaacagtttcaaccaaagcccgtcgcaacctccctttactttctttggcacgttcaaaggacgtactgcatggtgtcaacatgtggaacaatatacaaacagagatagaaaaagatgtccattaatgatagcaacataaattgacgcttccatcaaataatattaaaagacatcacagaagaaaatcttattataaaatatgaaaataattttaagaactaatatatatatatatataatcatttggatgaacaagatatctctttgtcgaaagtttagaaataatcaagcataatactaaggtcgatgtaagaaattgatctttttcaataatacagagttaagaataaaattcatgattatatatttaaaagattaaattatctactaaccatgtttgcacattgatagtatctatatatataatcatagtattaatgaataaattaacgaaagtcatttacattacctgcaacgttgtggtacgctccaagtaagatttgactgttttttgtcaatttcagacaatgacatatacttcttccaatcctcaagcaaaattttaagatcattgactttgttgtctatgccaacacaacaattggcatgcattgttgagaccttgttgaagtccttgctaggctcacaaaaccctccaaaatagttagtgctaaggaacctaatcttcagcttcatgtgggaaattaaggggtgtattttgatcttgttgaacacagcctgctcacccaaccctgggtactctttgctagagttgaaccagaacttattaaaccaaatagttcggttattcgattttatatatttaaaccctccatttggatagttgtgtatgtcagaggagttgccattgaaagcatcacaagctatttggaaatctgcatcttcataaaattgcttgaagggatctctaagccacattatatcagtatcctgcaaaggaaaacaaagaaaaacaaaccctttaacttgcagttggcttgtgtggtagagtatgtgcattgtaaagatcttaagaagctttttttttttttttgcaacagaaagacatgtataattgtatatatatatatataatatatataccgtgaacacaaagttatatcccatctcaagaacagaggtgaggaattcagttcttctccacatcatgtgtaggtatgttggggtcatgaaaaatacttcaccggtgaaattggcatgcacctttagtttcaacttggtaacaatgtttgtgcaaagcaaggcaataagcatttgtcttttggtcccaagttattaccaccatgtgatttaaaagccattgtgtctcattccctaggcgaaaactctccagaaagaggtcaaatatggaacctggctttgcccatgtgatatgcatccagcatatggtcctttccaagcttttcaaagccaaaatcattgataaacagcttagaattgcatatgatcatgatagttgtcgatgatttcgttatttttaagtgtcatgctaattggaacataattgcagcaggaaaacacttcattcaagccaattttgagaagttcaggtcacccacgccccaagcttgaagacgcacgctccaggcgtgggaaggagcttagtttggcaattatgactggaagtccacgccccaggcgtggggagccacgccccaggcatgggaaaaggcctccatcactgattcttgctgccaagccacgccccaggcgtgggactctgctatctgtgcaatttcgaagctaatgaagggcagtcttggattttcacttcctacttcataaataccctcttcctcagacttgaacacacgattttggagggagaagacactattctagggtttagaagctttgggcactcttagtctaaggttggaggttgaagaccaaggtggggttcctccttcatcttcttccttcttgcttcagctaggaatgttcctttttgtaactcaaccacccattatgaggtgtggctgagcatttattgtggttagggccaaagcacttaatgtaaatctttattggatgtattgaatgctattgttcatttattacaagttattttactacactttgcatttctcttccttctcttgcctagacttagctaacctagttaagagcttagagctttagttcacaatagacatattgggactttagtttctgacctaagtgtggtaacttgctaacattgcctagacataggggtgggtgcttgcaactttactcatttatgtgtttgcttaatgcttaacttgcttaagatcactaagagattagggttggatggtaggttaaagaactaagtggaagagacatcaaagcttagtcaacataaggaaaacacattggttgaataacttggataatagaacgtagtgttcaatatcatttcatagagaggcacattgagtgtgggttgccctagctacatttccttacacatcgttattttctcacttgctttgatattaatttccgcttgtttttagttataatttccttccatcgattcacacacacacaaccacaacattacttcattattttggtatccaacttatcgatcgaaattatagtctatttggccaaacaatcctcgttgggaacgacaaatccctttcttccactttattacttgagcgaccggtgcacttgccgtgaacgcaacaagtttttggcgccgttgccggggattgttttagccaaattcattataactttttatccttaagattggacttattttgtttctaacctgcttccagagtatatgcgaggtactgttagccctgaccatcttcagtttgatcctgaaatcgagaaaaccgcaaggaggaatcgaaggctaacaagactaagaaaggaagcagaggggtctagttctcaacctcaagaagaagaaatatttgaagaggaactagacatggctgagaacaaccgtgagcagccaaggccagaggacgaattaatggagaacattcttgctccattgtttgtccgtccagctcccagcatagtgaggccaccgattcaagctcatcatttcgacatccacccatctcttatcagcttggtggagaagaatcaattcggtggtgaggatgatgaggatcctcacagctttgctgatcatttcatgatgatttgcgacaccatccgccatcagggagttacagatgatgccattcgactccgtctctttccattcgccttgaaaggaaaagcactcaggtggttacaacgtcaaccatcaaatagcataaccacttgggatgagttgatggcaagattcttcgctgaatacttctctatggagaagtataatcgtttggtgaatgagatcaccaactttacacagcgagaaagagagactctgtgtgcggcatggaagaggttccaagagttgatccgactttgtcctcaatatgacatgtcggttgggaagaaggtgcgaatcttcttcaatggtttgttgcctgaatccaaattggtgattaacggagcagctggaggaaccatcagatcaaagaccgctacccaaacatatgaattgattgattccttggcacgaaccgaaaatgaaagcttggcaagtcagccgaagagggaagtcattcatttgggtagcacggatgcaatgttggctgagcaaaaactcctatcacagcagctagctatcctcaatgctaagattgacaagcttgaagtctcaaaagcccaagcttcatcgatcaaggcaagcacagctgtatgtgaatattgccaaggggaccacgagtctaatgtgtgtccaaccttagtgggggctgatccaattcaagtcaatggggtatggtatgaccaaaggccaccacaaggttaccaaagaaactataatcaagcttctgggagcggaagcaactatccgagaagaccatatgggagtggtttggattacaagtccaacaattacttacaaccacctcccatccctcccaaagaaccatcggagcttgagaaagctatgttgcaattggccaagaccaccaataaccacatacaaaatactgatgcttttatgaatgagactaggtctcagttgaagaatcaaggagcttctatcaggaatttggagacacaaattggccaaatctcaaggcaactagctgagagaccaccaggccaattccctagtgatactgttgtcaatcctagggaacatgctaaggccatcactactaggagtggcattgttattgctccaaaggagaaggttcaagtggtaccaagagaagaggagaaggggattccacacgccaatgcagaaattgaaaattctgcagtagaaattgaaaattctgcagaatttgagaattctgctacatcagaggttcctcacaacctcaaggagcaggagaagaagaagggaaaggagaaagccacatctgagtctaaaccacctctggatttttccagatttgagaagcctccctatcccttgaggacgaagcagcaaaatcaaaaaaagcagtatgccaacactactacagcaagcattttttacgtcaccaaatctaagtcggttgtaatatagccgatgttaaatcaagttcagtggcaaaatcataataaattgtattttgtttgatagacaacgtcgggttttaagtgaccgtagttgttctttaagaaacgaagtcggtttgcaaaataaccgacttagaaaggattaacatttaaaaaaaaagattaaatttttatttgttttaaaaaaacctagtcggttttctttagcaccgtcgttgtattatgccttggcaaagtcggttttaattttaaccgactatgaatttaataatacaatttttttttaaaaaaaagtaagtaaaataaaacctattataagttggcccttttcccccggatgccctaaaagctcaaacgtgcccgtgccccttcgacctaagctcaagagttggtgttcaccactgaagcctcaaagcccccttcgacgccgcgattgatcaaaaattacgactattgcatcctcaaaggtaagttttaacttgtattcttcagatattgcggattccttcatcgtcattattgttgtttgattttatttgcagaagctggttcgaagagtgtaggttggccaccccgacaacgaatatcaacatcagtgccgacggcgagtggtttcgccatgtagtctgccgcaagtgacaagaggtcagggatccctggagctagggttcacctttcattcgaactcctgttggagtcagacgggttcatttgcaggtaacattctacacttagctgctcatctggcacttcaattgaaagcattgtccagttttagagcaaccattgaaatgcaaagataggtcgcatggttcaagctaggtcaatgttttttatttttaatatcttaactacaaacagtaattcgcaagtcatttcatacacacacagtaattctctgcaaataaaaatgaagataaaacagatcagagaagtaaaaagagatgaactcatgctgccaaaacttcaccatcctaaaagtgaaagaaaaaaactaattaagacctcattcggtgttgcaatgcatgatgtaagattgcattacacaacattaaatacattatatatatatatatatatatatatatatagcagctgcatccatttcctcgaaatatagtaaaacaataaaaagatttaattcaatcagttaaacatgatgtattataaacagactttaattcctatgatcaaacaaaaaatatagtaaagcaagaccttactaaatcataaattcactccttttgtacgatgctaattaatctacactaacttttagttttccccaatctaaatagttgatacttgtggtccagactaaatagtctatctaaagcaccttctttaatgatgacttaaaatcttcttcatattcaagttaaaatagagaaaaagatatattataactggttttcattttgatttgcttaatcataaatcatcagatgataaatatttcagtggtccaactagcagaaatcaaccaaactcttgactgattccaagatgaaccttccttattatttcatactaataaaaaatattgtaccaaattttaattagtgtaaggccatttcgaagagtacatagcaggcagtttcactaaaaatatatcaggagctacatgctatagactatagactatatagagtatatagtatagaccccaggaaaaagatctgttgggccaataataaagcatttataaattgtgagaagggtatgactctgataaattatatattaagatagacaaagtagcagaatgcgagtaaagttaatggtggatccaacccatttgagtttgttccaaaccacacacattattgtcatcttacacttcaagtctacctatttccctcatgccaccgtctctcacttttcttagtgtcccaatgctttctctttctgaactgtgtgaaaagggagtactttgcagccactttggggaaaaatatttccccaatgtggatgtggctttctcaacttttagtacaaaccctctagtttcctactgccgtgaatgattagtggaaggagatttggggaagatccctgtgcatgtttattactttaatctgaatagtttactataaaaatgtttgtagagctcattcttttttacatgaaccaattataaaatgagatatagttagctgtatagtgtatatattccaaccatgacctttcaccaaaagttttttttttttttttaaggatccccaaatgttttagtaatagattaatcaccattcatatgcatataaataggaactaccccccttcttcttctggggcctaaagagaaaggctatgccaaaataaacacatacacaccaactcttatataattactttagtttctcttttattccatgattatttcacatattatgtaccaaccaattagggttgttttgacaagtgtggaattaagcaagaagtttctcaatttatcagacaaaatctctctacgcgtttgaggtttttttatgtcaccgctgaggtgagagtttagtgattcaattgattaaccagctaatttttgtgcatggattattattattgtttcactttcatgaaaaaaccaaagactattgtcatttttaacaatcattataaaatcaagtctggccaagacggttatggtcttgatgctattttgatgtattatcgtcaagaaaatgatgggtcggggaccatgaattgtttcatcaatgaattgcctacctcgtgtcaaattctgtggtcaagaaaatgttggattatatatatatatatctcacaaattggcaaggaaaataaagtcctcctcggtgccttaattaggtggtagcattggcgtagcagaagggattgagagaagagttttggtaggattgggaaaagggttgggactcaataggcatagaagagggcaaaggagagaaagggaaggaagagggtggtgtcatgttggggttggtcaaggaaaggtttctggtataagaagatgggattgtttgggaggtgtttgtggcggtgcttgttgctgaacaaacttgcacaggctttcttgaacggtttctgcctctgtgcatgtgtctttcacagtacttggagtctggatatgcctcctttgagcatctccatttcttgccatctgttcttctgcacctccctggctctgggtctacttttctgccaaatcccatttcaaaacatccccacccaactgcagccagagaattatgacaacaaaccaggctctaaattttatttgtccctcataaaaagtagacatatataataataacaactagtgtattttatttttttttaaaaaaaacagaaaattatccatggccttaaaaaaacatgagtaacatgctagcaaaagcacttactgtcttacttggatgatgtgggaagagccttgaagaaattgaagtgtctacatttcttttaatagagtagatgagatctggtgggataggtgttcctgtaaccatgtacttaaaaacaagagcttgatgctcaagctcttgccactgagtttgcgtgaaaggagacctatttcttgcacttgcactcatcattttgagacaacaaaaacaaggaagagtgtgtgtctctctctaaaatagtggtgaagtgaagaacaacaagatataagatttcaaagagtgaaataaagactaaagagggtttaattttatttctctagatggggtgatagtaatttggactttggagggtcattttttttttcaagggtagatagagattcttctcctgtgcatggataacactaatggctctgagagtctgatgatgctttctggctttgctgccacctcctctctatttctctaatgtgctggatgatgggtgagtgagtgagtctgctcttataatgattgcacctctgtcgcttctgttttttcctctgcaattgccttggttgctgcccttgtctctaacatctttacagaaatccataaacaaatgtacaaaggaaaagaagaaaaattaaattcaaatgcatgttagtccatgcacctttggttttgctgtctccccatcacttcatggaaaacagtgtcatgccatccggttatgtgaagtgtaagctgcttagcaatagtggccattagtatatcaaattatcaatctctctttgcaatggtagtaactttttgaatgaaagtctcgtacgtgtcactttttaatcttttttggcttcaagcatgcgtggcgttatctcattgatagatttggaggccaaggctagagctgaatcctgctttttttggccactgattgatgctttctcctttttttcatttcaccccccaaaacccaaacatctcactttcatcagtggaattagggttacagtcaatttggcctttaactcttattgaccaccgtcttgtcaataggccatcataaccctttacatgtttctccttaatcattttcatgaccacaaaatgtcaaaaccaatattcatcaaacattatggtaattgaaaaacacagaatttcaatgtatcttttcatgcttgagttagagttttaactcaatgataatcggaataatgaatgttttctaagatgaaggtctaataatgtgtttgaatttacagtgaaaagtttaaagtcaggtgaaataattaaatgcctgaagataattatttatccttttttacatgtatttttaataatattatttaaattaaatatgattattttaaatgataaaattattttttcgaacattttaaatattcaggacttgaatccaaaataacttattaagttataataatttcatataaattaatccatattcgtgataataaaattggaattgattatgaaaaaaaaaatctaattcaaacactattttactttgtctttcgaaaaatttgaattgatgttgacaaaaataaagtcaaattaaacatgtcataattataatttagaaagcaacaatcaaaatatttcagataccgcatctgaatttctcgcaattaaaaatcccaaagaaatgattaactgtaacaatgattattcagcagtttaaacttcacactcccaactttttggcaactaaccacaataaaaaatgatagtgtattctatgtaattagaagtttagaatgacttacaaatagaacaattcaagtcaagcacaatgataaattaatcatgtcttcggagactccaatgcatgttcaaattaaaaatcagtcaagttaggattatgcaagcaatacacacatagttgtaattttaatgttatcataatttactattaatattaatatctatattgggttgattgaattaattggatatgaaactcataaattcaatatccagcctaattattattggataagttaaaataaacccaattcatctttctaatccaatccaattctgaaatgttatttagataggtagagtttatcagatttccaggtcgattcataccagtctacacccctgttatttgcatttattcccatattttcacagttttaaagatggcgacatcaccataacttaatacactttttttattatatgtaattcattgttggttaaagttgtatcaatattttgaattcttttccatggaaaaactaaactttagcatattctttgatggtgagatcgagacccattctagccggcatttgaagaaagaaaaaatatcttcaattctttgaccttaattatctcccaaggtgcgattttcagattttgcaatgagatttattattgtttcagtttatatagaattatatactaagtttctcttacattagaatatttttattttaatacctattatataagaaaaattagaaatgttttccaattcctattagtcacattattactcaactagaaatattgatgtcatagattaaaatgaaaaaaaaaaatattaaggaccaaaacagacaaacaaattttaaaaaaccaaggcgaaaaccattatatatttttgtcgcgtgatttgaatgttctcattattaaaattgtgtaagcaaaagttttcccaacattctctgttgatatactttttttgattttttaaagcatatactttaaatgataagaattcaaagaggtgaatggaaaatcttataaaaagccaaagaaaaaacgacttatcttttagttcatatattaaagttgcaacatcaattttttttatgatctacttaattgcatcacaattacaatagatgttaggggcacgagtaagtcagatttggtctattttatgatccaacctaataaaatagaattgagttcggttgggtcaaatttgttctcttttgtaaacaacccaaagcaaatctagctgtttaaggttagtttgggtagtttttcttttagtatgacaataaggtaagattacaaatgagtaaagagggtgcctcattcatatgcagcataagtatgaattatggcctctggacactaggagaaaacagtaaagacatgttgagatgaagagcctttctttactagaaaatctccatagaaattccttctcgcatagtgtgttgaaactttaattgtcaaagcatttgccattgtaaatgacaaataatttcacattcatatttgttgtaaaacctggacactcttctttttttttttttgtgttcttttcttgttgaaatatattttcttttcttattgtgatttgttaaaatctgttctgtcatagggtatgtgggatgttacttgcacccaatgcctgattcaatattgttcttcaaatcaaattacttatgtccaaattatacatcgctaccattttgcatctcacttaaaacgaatggcagttgttgtttgcattcaagattttttttcctttgtgaatgtttgtgggttgctcatttgtttagcagctatatatgcctttggatacatgcatgtttcccaattaggtccttcttgatttaagttgcttcttaggtattatgtactttgccttatagttaatgaatccatgagttgaggtttagacttcataacactctgtagtatcatatattttaggggttatggaatgctcaataatataagtgagttaggaagaagcaaaaatgatttgtaaatttttgtgcgaatctgtcagaacttcgatggctttgctagaaatctaagatgaaggtctgagttgtttcagctgttttgtatcttgaccagtactccttgtactgtttctatatatatatatatatatatatatatatatatatatatctatttttgctgatcaaaaaaaaaaaaagaagctattagggtaaccaattcccattaggattgtggacaaagaaacaagggtgagaagttgcaaaaagtagtggtattggccttctagtcccatgtgatccctagagtgaaggtggatgagaagaaattgttgtgcaaaagctatggctcctaacaaatgagttaactgatattgagctttggagcataattgtcaagaactatggcaaaggtgggatagaccaagaaggacatagccatggaggagtgttgaaagttgtggacatgatctgagggaatggatccatcagggttgaatggatggtgacaatccggagagatgaagagctccaaggcaatgaagattgtgcagcttgttattatgaagttgagctgcaagtatctagattttgtggtgggaaaccataggcttgatgtatgttaggtactggtacagaaaagaaaagagaacgaaagttttattcaccacacacttcttgcttacactgtcacttcgagggtcaccacctcctaaagaattccctcccctgatcccctctcagtgatcccctttatacatttctctctcccctgttagttataactaactcaacttagttatactaacaattaaattgctatctaaaccctctttcataagtttgaccccacctcctatcaatgtaggacttggaacaaagggcgtggagcttgatgtgcttgaacaagtgccataaaccaattacaaagaagccaaaccccaaaacttgatgtccctccaacatagtgcctgttaggccaacacaataaaaagaaacttaggttatgtttcgatcgataatagttaggaaaatgttttgtttagtcagtaaaaagtaaataaatataatgaatttataataattcacacattgtattcaaccaattaaataatatacatttacttgatacaaaaaaatacttttaagaatttcaatatatatttcaaatatatatttgggaataaaagtattttcaaatttttccgacaaaaataatctaaacatgtacttagttgtacttagctggtattcttgtcccacagcctgctcacccaaccctgggtactctttgctagagttgaaccagaacttgttaaaccaaatagttcggttattcgattttatatatttaaaccctccatttggatagttgtgtatgtcagaggagttgccattgaaagcatcacaagctatttggaaatctgcatcttcataaaattgcttgaagggatctctaagccacattatatcagtatcctgcaaaggaaaacaaagaaaaacaaaccctttaacttgcagttggcttgtgtggtagagtgtgtgcattgtaaagatcttaagaagctttttttttttttttttttgcaacagaaatacatgtataattgtatatatatatatatatataatatataccgtgaacacaaagttatatcccatctcaagaacagaggtgaggaattcagttcttctccacatcatgtgtaggtatgttggggtcatgaaaaatacttcaccggtgaaattggcacctttagtttcaacttggtaacaatgtttgtgcaaagcaaggcaataagcatttgtcttttggtcccaagttattaccaccatgtgatttaaaagccattgtgtctcattccctaggcgaaaactctccagaaagaggtcaaatatggaacctggctttgtccatgcatcgtttaaagttgtgattatcactgtcttatccttcatagacgcggttctaagaacactctctagcttcgattcataactaacctgacgcataaagccaaaactacatcaaacacttggtaacccaagttcatattcacagatgaaattttcatgagacaaatgcaaagttaagattaacaaataacaactagtttgccatatgcttgtcaaaaagataaaatagtacaatcccttagtgcaaaagcatcaagtgtgcaagaaatcaaattatctgagatttatgtaacaaataataatccacaatggttagaaaaaatccaaaaaaaaaagggcaaaagttgcaagacatcaaataggaagtgaaaagtaagtgatgtacacaaacttctaaacatcaatataacaaaatggtaccctccatttacatatataacaacaagactagtgacacatatagctattttgggtgaaaattgtatacaaattctacatttgtagtgacctccaagtcctcataattatgcaaagtatatatacaaatacagaatggtagcagacagtgtgaaattagcacgtaaattatcattattgatcatggcatccacaaaagaataacatctccaaaaggaaaatgcatatttattctttttccagttatgcatcaataatcaaacaattaatgcatcaataatatcagaaatcaaaggaactaatattataatttaaacaattaaataacataattaactaagtacatttccaccaaaagaaaaacctaaggtacgtttattctcatataaatgctgataattcaaaaacttacatgcaacggggaatcagacataaccgatcaagtagagaaaatttgttgtcgctatcttaaattacgaaaccagaatgtcaatgtcaatagttgaagtttgtgaatgtttgttcattaataaatgattttcttcaatgtgttatttaatttcgaattgattagctgtcccacgtcggatgaacttctttcttgagcatccttgaaagcttatatatatatatatatatatataagaaacttaagtaaggctttaagatctatcccatttatcttataatagctttcattgttttttctctaagagaaaaattcggagaaaaaatatagttttcctatgaggtcttttaagtattttattttcttatttttaaaagagattgttaatatatattctctcattgtattttaaagagaggtcatgcaatctctttcagatggtgaaaatctcttatattcttatatgtgggttttccacgtcacgttgttactcaaatacccaaataatacaacccacttggtcaatatagtcaatattttggtatatagtattgtttcaatatacagtatactatccacggtgtggatattgttcacgattactacgcacatgttctttagcagagattgtcaacgcacaccatattaacttgttatagtattgtatatacagttgaaaaattattttgtgttaattaaaggaaggtggaagttaaggcattaggataagaattacaagagaattaaggatgacaaccaatacgatttactatagaatttattctcgtgcgctgagctcgtttccattaagctggaattttatccattatgaatattttttacaagtacttataggatttagtaaactgtcatccctagacaataatataaactaaataattcattcttgacttttcaactaactgaccaagagagtttatatatgactttcttaggacttcaataggacttgcttaatcagtcaatttcctaattcatagaattttaaaactatcttaattgatctgattgtgacctactttccaaaatcaaactaactcaaaagcttgatcacagaatttgatttttaatcaagtttttcactaaaattattctttgaaggagtggaaatccaagatattctcatgaaaaaacaaattatatatatatatatgtataatttgattctttctggaagtaattactaacaacactttttaatttgattcttataaataagaaagggaagtacgtttatgaaaatgataaaaatgtcatttcatttttatttggttgattgcttttaagaatttacccaaaaaaagaattattcttttaaaagaaagatttttttatccatttgcatttttccataaactaaaatcatattaattcctaaaaatatctctttattcagtttcttatttttaaaggtttcttattaaataaaactaggttaaatttataaaaaaaaacaatataatgtctttgtaataatttaaaaaagtgtatcattaagaataaaatcataacgaggatcccataaaaaagtaaaatagataaagcacacgtcaattaccgagtggaataatatatatatatatatatattatatatatataagaaataaactattatataatttaaactttgtgaaagaaccaaattaaaagaaaaaatattttactgaaattaaaatatttagattatgaaaatgctaacatcaattattagggttgataatttttaattttaaaaattattttctaattatataaaaaaattggaaccggacttggatctttaataaggaagatttcagatttgagatggaaaaaattgttactaaaataagagacattgaagatagcaattatagatacttacaacactaacaaaggtgactaaaaaaataccaatatcaggagagagaaaaaaacaacaaaaagaatgaaatattagctctaactttgttttgaaaaaaattaccgtaaataaatatattggaaaaaatagcataacaacgtaacccacaaagcataaatatattgaagaataatccaatatgacccacaaaagcaaaaaagcttgatcaacccaaatcagaagcaagcttgaacgcaagagcaataacaaaagcatcaaaaccaaaaattcaactttttgattggtttgcaagataaataagcaaaggccaacacccagattcactcatttcattctcctctattttcaccacgataattgcaattgcaaaaggcaacttggcatgcacagactcacacaaacacacacatatatagtatagatagatagaataaatagagagagagaaagagagagagagagagagagagactcacctttgttgactgagctgtgaagtaatgtgagaaggtatggaattcaatggaagaggcagagttagagagaaacacccacaacacagcaagcccagcaatgaacatggttaattgcatcacccttctcaccaaaagctggtagctaccggaaccccatgccttgatgccaccggcattctccaccgcagaggtgtccttcttcatgttgtttcaagagctgatcaattgggttgcaaaaatagtctctctttgactattcttaaagaacttgcttctactttgtttcttcttcaacaaaacagcaactaatatggttgtactttttaagatacgttattgtttgactgcattcacaataactgttaatctattattacttttatatatctttcaagtatatattgtaaatcaatcttttatgtaaggtaaattaatacaatttatattatttcatacgtaccattaattgttgtgtattaattgttgtgtcttgtataataataaaaaaatcttcatcatatataaaacttcgttgtgattaatgctactgttttgatattaaataagttggttatttgtttaatctttatataataaaaaaggaaatttgaacacacttttttccatccagaaacactttagacatttttttagttattttttttaacaatagctcaattagagtgtgaatctcaattaagaacacttgagctttttttaacatttctcttgtacgaagatgtgaatctcaattaagattgccttcaaaaatgaatactcaggttttggtttaagtgaaaggacaccctggacgtgagaatttgctagttcttggtgaagttgaaaacacgtgtgatcagcaacaatgacattggctttggacggctctagtagggtaaaagctcaagcgattggcagagctagatgatcaatttatatcaagagtgatgatatatagatattcataaatcataaatacctatttgatatatttttttacatgattgataattttattattaaattacatgaatgctcgttgatgaggtatgtaatggacatgagatcatcctttggagagtgctgagtgcactgaatgcaacaagatagttgaaatcaatatttttccgcgtgagtttagtcaagccaaagggcatgcagatgaaagagtttttcctatcactaggctgcaattgcatacttttggtgtaacctatttactaagtattaatttactatatgtattaaaaacatgtcttctttttataaaataaatgccctctttaatacacatgtcacggttatgtactttatgttatgtactttattttttctcgccaaaagaatctctgaaagtttaccttgtttaaaatcctgataaaagcaggtatccattagcttgtgatcatgtcctaagtccaaccacaagtaattactattagcaaacaactcttaattggcacaagataaatggtctggacaatgcttcattgagttccaagtactaaatgcatgtacatggtaggcataaaattaaagttattacttcgtcttgcatttattacttacgagcaattcacgcaaaaaaaattctggtcaacttgcaacatctcatgcatacatcatatgatttatttttaatagctgatcttataaaataaataaatatatatataaaacgtaaaacacaccctattgtcgatatcctctatagtcaatcaaacttaataatcaacaagtcattcgtccaaccctttactatatgttcaggagttaaatcttgactggcaaaatgtaaattaaattagtcaaaataagtaaatatcgtttttatttaatttaattaggtaaaaatataaaaatgttaaatatgcgaccatttgaaggacacttaattttctcattagtaaagaaaaggaaatgctcttaaaaaaatattaaaaagaagttaagaacaaaattaaatgtgtttaacttcttgaatagtgttagagggcaaggccatgcagaaaattcttcatcatgagaagtttagtgtcacgtgagataattcaggaatctggaagtgtctcttgaaggagtggtcgaaattgaattgtgatggtgcatattctcgggcagccgatgttgcttcatgcggtgttgttctttgcactagtcgagtaggcaattttattcaaggaggcttggacattgctctatctattctgaaagtggagctgttggccaactatttttgggattgcagtggaactgttgtgggaattccgcaatgaccct

SEQ ID NO: 6 - DNA, 15964 bp, Glycine tomentella
atggcttctatctccagcgtccagagcagctcttctgcatatgacgtgtttctcagcttccacggtgaagacacacgcaacaacaacaacaactccacaggttttctttttcaagctctcagaagaaaaggcatcgtcgccttcaaaggtcatacacttcccgaaaagggtgaacccgagctgttacatgcaattgaaggctcccgccttttcattgtggtcctttcaaagaactatgcttcctcaactcggtgtttgcgtgaactagcacacatcttcaattgcattgaaacttcgccaagacgtcttctgcctattttttatgatgttgatccatcagatgtgcgagaacagactggatggtacgaggaagccttttggaaacacgaacaaagattcttggtagataaagagaggatggaggaagtgcggacatggagaaaagctctgactcgagtggccaatctccctggttggtatatcccaaataagtaagtaacccgctctcatctcatgaaagatgtaacttgcaaattgggtccaaatttaatatagatgtttgatgcaaatggtatttaaaagttgaaaactactcttctattatcttctcctgttttgcttctcttgggtgatgatttcgaattcttcattttctttaaaatttcaggccacaatatacagagattgaagaatttgttcaatatataataactatattgggtcctaatatttcaactcttcaaaatgaagcagagggaacatcttcagataaagatgaagttttatacaatgagctgtcaggcttgatgaggataagagattttatcagcctcgtgttgacttatcctgggaaattagaagatgaaaatattttaagatcttggattagtgcatttcctgaatggaaagctcagttattgtccactggtgatgacactgtgatggacaaaccatggtgtgtactaactgataaggcactgggacctatgaagggatttatgccaatggaaataataagtaaagtagaaagtggtgagagatccatcttcagccataatgatgttgatgcaataccagaagccattctccaacaatctgttgatctcgcagttaaccaactacttcaaactttgttttctggggattactgtgcacgctatatcagactgttaaccagaaacttggctgaaaaaggatctgtagtggacacaatagtttcagccgttgaagataagcacaccatgtttggaattgacaaagattttcttagagccctatggatcaatgcctcaacatatgagactgatgcagaggttcgagttcaagaacaaatcgatatcaatatgatgatggaagttgatgacatgggaagcaatgggcagttggtaattgtagtggatgcagatagcaacaacaagctggacctccaaaagttgcgttttccaactggaattgtggtgttgataacaactgagccgtcaacacaagcagagaaggatgttgactttagaattgcatgcacaatggatttgaatatttggacccaggatcatctattgccttggaaagttttctgcagctatgtcggcagttgtatcagcagtagcatggtaagttcatcaatggccattcagaaaattgcagaggaaatagttaaggaatgccatggtcatcttcttgccattgtccttgtggcaaagtatcttacgtatgtgcaagattttaaacagtgggaacttgcacttgacaaattaagcagtctgaatccttcctatgattatcaagatagtgatcgaattggcattagtagagtcatggtcaatgcattcgtaaatattatttgggaagacattgatgatgcacaaaagctttgccttgaactcagtttgcctgttcacaacattaaaaatggggtgagagatgatatcttggtgtctgattgggctaagataatatcaggatacacacaagaacttggtgaatacagaaggcaattacaacattacatcaatgagcttcaagaccgttttgtcttgttgaaatatgaaagtggagatgtctatttgccagtagaaacctatgatataataaaatcattgcacacctcaaagccttccatcctaaggcatggtgcattaggattgacagagccaccctacattggacgatggcatagtcttgttcagatagaattgatggacaataaaatatgtgaattaccacaatctccagattgccctaaactcaaagtgttgttgttgcagggcaatgttgatttgatggatatccctgactcatttttcaaccacatgcccctgcttcaacacttggacttatcctacactagtataagggatttacccccttctgtctctaaattaatacaacttcagaaattttatcttagaggctgtgatctcttcatggaactaccacatcagattggacagctaaagaacctcaaagagcttgatcttgatgggactttgatcacccatctgccaatagagatccgagaattgatcaacctgcaaagcttaagcctctgctttgatggaacttccaggtcaacaattattcctccaggattggtatcaaatcttactcaattgaattatttaagcatcaacgttgaccctgaagatgagcgatggaatgagaatgttattagcgtcttgagggaaattttttttggattatggaatttgcagaggttgagtatatatgtcccaaaggctgacctcttggaattcataccaacccaaaaatctctcaatttcagattggttgttggtcaacatatgcgacgtttgatatcgcgtgtaccacctgaactggagacaaaatttaaacactgtgactatagcataaagtttgttaatggtgtgaatgttccaaatggagtgaaaatgcatcttggacgcttcaaagccttgtacctagaccgacatatgaccatcaagagtctctctgatttcgatttgaggaatttatgggggttggaagtatgcatattggcagagtgtaatgaaatggaaacaattgtcagtggaagcaattcacctgataggccagcttctctaatgttgaagtttttgagtgtattctatatgaagaatttaagaagcgtctgcgaagggagtagtcccttctttctctgcttaaagtctatagcattacacacttgccccatgttaaccaccatcttcaccttagattctcttaaaaaactttcctttttggaggagattattattgaagactgtccaaaagtaaccaccctgataagtcatgccacaccagaacaaaaaccagtgtttttcctccccaagttgagaatgatatcgcttctctatcttcctgaattggtcaacattttcaatggcatacatgttggaccttttatagaagaaatgatattttattattgcccaagtctccaaagtctttccaaatcagagttgtcaagcaaatctttgaagatcatcaaaggagaaagcatctggtgggaagcattgaaatggaatgtagcagagtggggagatgctggtcgacccaattattttgaccgaattttttcaccaattaacgaggaggctgacatgatgaaccaactagctgcacttcaagagactcgactaaatgaacatcacaatacgacgtatcaggtaatttttagttatcctcttttcaaattgcatggtgttattggcatgttggtattttccaatgactaatgagttgattcttatttttactattttgtatctctgtatgaattgcttttgctaatatgatcataccctcttagcttcatttttcgtactgtattacttgaatgttttcctttcagggaatttcaagttctacacattcgatagcaaagtcatctttggaaatacctgttttgtcacctttagccccagtttcatctgtgggtaggggtagttcaaacagtgaagcccaaaagcggaaagtcgttactgagccaaaaatattacaagatgcgtcaaaaaagataataaagcaggtttgagatgccttgtcaccgttcgtgattgattgcttttggttttcttatatgcacgagttggtttacttacattaaaggcatgtttgataaacctgtaaaattatacgtcgaatgtgttttgcttgaaaagattataattttaagtgctgaaaaactcatttaattaagaaaacttaaaacatttagatgctaaacatggtgacaccaaaggaaattatgtcatttaattattcagatagggaagtagttgctgctttattcattcagtatcagcaatgtgctgaatgtatttaacatatttcacgtaaagaattattttcagtttttatatgactagttgccaatagcaacaaatagtggtgctagcgcagaattgcattgcagagcggctagagcatgctatgaaaattgaaaagtgtatcagtagcgaccatcacagctgtcatatctagcaaaatagcagaaattgctcctggagcaggctttattggagtgggtcacaaaaaaacctattttaatttaaccattaaacaactttatttagggtgttttagtgggcaatgattttgcccccttctttgaatcacaactgaaactctactttctcaattacttacacacactgttatgacatattgttatcctttttccaccaagacacccttttctggcaacatttttggcaattccctgcattttcgggccttatgtgagttttttgccatccccaacctctgcagcttctattctccatagtttccagtcattcctgacctttatggccattttctggcgaacctgtcactgtttctggccaaccgcgacctttgctgccgtgctgttcactgttctgtccttgcattgttcatctctctaatacagatccttcatctctctgttttgtgctctcttctatatttttctttaacatttaatttaatatttgtcatattttattttattatcaattacgaaattattgatcaaagttttataagaaagtctaaagtatttctagcattttactgtcaatatataaaatgacaaaatcattcaaattatttcataacatagttaatatcaaataagattttagtatgtaacataaaaaagatttgagtaattttagtttgaaaagcaactttcaagaataataataataattactaggtttattaataatattagaaacaatgcatgtatttgaaagaaaaatacaatatttttaactaaacgatatttttaatgaaatatgaattttttttctatacttcttgcataaatgtcctaatgaggagaatttgcaaaaatttagagtagcgagaaaagatgcaaagaaagcagtgcgagaagctagaggaaaagtttttgatgatttgtataaaaatcttgggagcaaagatggggaaaaaggtatttataaacttgcaaagatgagagataagaagagtaaagatctcacccaagttagatgtatcaaggatgaaaatcaaaaacttttggtaagggatgaagatgtaagtgaaagatggttacactactttaacaatctttttaatggaaatggtgacaagagtgaggtggaattggaggacgtttctgatgatctgaatagaagatttgtgcgcagaattaatacatatgaggttaaagagactttaaagaggatgaagaataataaagcgttaggacctgatgatgtccctattgaggtgtggaggggattgggagatgtggcaataaaatggttaaccaatctttttaataggattcttcaaacaaacaagatgcctgatgcttggaggaaaagtatgcttgtgcctatttacaaaaacaagggagatattcaaaattgttcaaactatagaggcatcaaacttatgagccatactatgaagttgtgggagagagttatcgaacatcgtctaaggagggagaccaagatttcagtaaatcaatttggatttatgtcaggaagatgtaccatggaagctattttcctgatgagacaattgatggaaaggtatagagaaaggaaaaaagacttacatatggtgttcatagatctcgagaaagcatatgatagagtcccacggaaagtcttatggtggactcttgagaagaaaaaggtagcattaaagtatattaatgcaatcaaagatatgtatgatggggctaccacatgtgtgaaagcttgtaatggaacatcaaggtatttccctatcacggtcggtgtctaccaaggttcagctcttagtccttatctctttgccttagtgatggatgaactaacgaaagatattcaagaagaagtgccgtggtgcatgctctttgcagatgatgtagtacttattgatgagaccaaagatggcgttaatagaaaattggaattgtggagaagcactttggagtctaaaggattcaaggtaagtaggagcaagacggagtatatgaagtgtgagttttcgaggattaaagacggtgagcaagacacagtgcatctgcttgggcaagaggtacccaagaaagacgtttttagatatttgggatcaatgttgcaaaaaggtggggagatcgatgaggatgtaagtcatagaattaaagcagggtggatgaaatggcggagtgcatcggggtttttgtgtgaccgcaagattcctattaagctaaaaggaaaattctatagaacagctgttagaccggcaatgctttatggagcggaatgctggccagcacataggcaacatgagcataaaatagaggtagcagaaatgaggatgttaaggtggatgtgcggatacacgaagatggataagataagaaatgaggatattcgacgaaaggtatcagtggtaccagtatgtgaaaagatgagagagcatagattgagatggtttgggcatgttatgagacgaccattagatgctcctgttagaacaagagtatgttaccaagagctagatacaaagagaggtagaggtcgaccaaaacttacctggggaaaggtagttaaacaagacctaatggagtgggatttagattggcggacggtatgtcttaggacggagtggagaaaagctataagtctgatggagggttaaaccctttagtagttctatgttccagttgtttcctgttttaattcttttcttcctcttttctcttctcctctcaccattcttttatatttaactctgtttctctcttttgctttattttcgatttatcattgggttcatctaccaccgaccccaattaatttgggttaaaggtgctgttgatgttgatattgatgttgacttcttgcaatatctttattttaaaaataaagaaaatattttcagtattataattcttagtagaacttaaaagtattttcaattcatatcttcatctaaagttttcaattgttcaattaaaatacaatattaaattacagtcttaataataaaaatagtaatatatatcgttataaaatttatcacctaataattcaaattaataataaatatttttcaaaaagtataaattttttaggcttaaggtaactacttaaatggccatggccttgtggttgccacagccctagttagaagtgaatcttataggggtctgaaggtgctaacagacggattctctccatttttagtggaatttgcttactctttatcagcaacttattttgttcattgctgtcacgaaaaagaaaaaaaggaaaggaaaacatcactttggaaatgtgtcaatcctatgaacctatgatgcatggtcatataagtagggagttatacgcctgcaacttgaaattgtttgttctctactttgactatgcatcaattataccacaaaagattcagaaggtagatattctctatattgcaaatcaatctttagcttcaacacaatgtaagctacttccccaactgaaaaatgatgatgatggttttattcatgaatcgagatcaaatactgttgctgagttcctctatgaagatgtgtccgtaggaggcgtctctatagtctttagttaaacaaaaataaacttcacgaacctaacatgttgaataaaagactattgtggtttttatattttggcatggcaattaacaggttcgtgaacaaagaacagttcaaactgaagtttggacagaacctgaagtttggacagaaaagataagtgtcaatgcggaagggtatttaaatgatggatatagctggagaaaatatgggcaaaagagtcctcttggagctaagtttccaaggttagttaaacggtcttttctcgtttaactttttcttgttataaaattaaacaagtttaattagcaatttttttcctagtataaatttatataattaacatttgatttgaatgtgacagaaaggttcacccctctaggttattgacgtacaagtttcacccctctcgtttagttaataccagaggccttggacctggtaactggaaaatcagtagccaattagctaataagttctctttcattgttttaatggttctatgcccccagtgtttttaaaatgacctgcaatttgaaaaattatctaaaggaccatgtcagctggtttcaaatgggcccaaattagtgctttctgttggaaacttgtttttgacattctcaacaaaaacttgttcatttgacaactacctttgcaaaaatttaaaaccgagaacaaccacaaactccagataacatctgattctttatttttggacatagactatactataacattcacagcaactaaaaagagaatgtaggtttcttctccaacttccttatcaaggcttaaaacaagaggggtttctattaatatttttatttgctgttcgtaccatactaactttgccagtctaatgtttatattaagaacataaaaagaagttattttctagttttgccgaaaaattgacaactagtcgtttgcattgcagaggatattacaaatgcgcatatggatctgtacaagggtgcccagcaagaaaacaagttcaaaggttagacgaaaacccagcaacatttgagataacctaccaaggaagacatacatgcaccaaagaacagaatttgatcattaagagtggggatgaggcaagtttgaacaaaaagactagtggtcaaatcttgcaagttataaaaaaacttgtcttgcaaatttgcattactaaaaataaaaatagacaaatttaaaatatattgctgatgttatctacatttcagtaaaaaaaatatcagtaaataacattatttaatatgatcataaatacatttcatccaaaaaatgttactggtaatccaccaaacttggaacatacaaaacatcaagctagtatccaatgaatgctaatcaaagattgttacaatgcatgtatctctggttgaatcatcttcatcatcaaaggttgcctacataacaatacaaaatacctcccattacaaggcaaaaaagtggggaaaaaatgggttaaatgattttatgtagtgaaactaaattgatttttggatgtttgaagaggggggtgggggatcaaaagtattcatgataaattaacataaaattataagaacgagaaattattagttgacttaaattatgttttttgtctatactaaatgctcaaagttcatatttaatctgtcattctaatcaaaacctatgagacatttgcttgttccagaaaacttgacagctgtaactttatatctctgtatgaattgcttttgctaatatgatcataccctcttagcttcattttttgtattttattacttgaatgttttcctttcagggaatttcaagttctacacagtcgatagcaaagtcatctttggaaatacctgttttgtcaccttcagcccctgtttcatctgtgggtaggggtagttcaaatattgaagcccaaaagcggaaagtcgttactgagccaaaaatatttcaagatgcatcagaaaaggtaataaagcaggtttgagatgccttgtcaccgttcgtgattcattgcttttggttttcttatatgcacgagttggtttacttacattaaaggcatgtttgataaacctgtaaaattatacgtcgaatgtgttttgcttgaaaagattataattttaagtgctgaaaaactcatttaattaagaaaacttaaaacatttagatgctaaacatggtgacaccaaaggaaattattgtcatttaattattcagatagggaagtagttactgctttattcattcagtatcatcaatgtgctgaatgtattcaacatatttcacgtaaagaattattttcagtttttatatgactagttgccaatagcaacaaatagtggtgctagcgcagaattgcattccagagctgctagagcatgctatgaaaattgaaaagtgtatcagtttgaagtagcgaccatcacagctgccatatctagcaaaatagctgaaattgctcctggagcaggctttattggagtgggtcacaaaaaaacctattttaatttaaccattaaacaactttatttggggtgttttagtgggcaatgattttgcccccttctttgaatcacaaccgaaactctgctttctcaatcacttgcacacactgttatgacattgttatccttttcccacctgcacacccttttctggcaacatttttggcatttccctgcattttgggggcttctgtgagttttttgccatccccaacctctgcagcctctattctccatagtttccggtcattcctgacctttatggccattttctggcgaacctgtcactgtttctggccaaccgcgacctttgctgccgtgctctgttcactgttctgtccttggattgttcatctctctaataaagatccttcatctctctgttttgtgctctcttctataattttctttaacatttaatttaatatttgtcaaatttttatttatttattatcaattacgaaatcattgatcaaagttttataagaaagtataaagtatttctagcattttattgtcaatatataaaatgacaaagtcattcaaattatttcgtaacatagttaatatcaaataagattttagtatgtaacataaaaaagatttgagtaattttagttttaaaaactactttcaataataataagaattactagtttattaataatattagaaataatgcatgtatttgaaagaaaaatacaatatttttagtgaaatatgaatttctttttctatacttcttgcaatatctttattttaaaaataaatcaagattttcaatattataatttgcttactcttctgtatttttctttaatatttgtcatactttattttatttttttatcaattacgaaattattgatcaaagttttatagaaagtgtaaagtatttctagcattttattgtcaatatataaaatgacaaaatcattcaaattatttcaatatcaaataagattttagtatatcaaataagatttttagtatgttaaaaaagatttgagtatttttagtttaaaaaactacttttaataataataataataatatttacaagtattattaataatattagaaacaatgcatgtatttgaaagaaaaatacaattttttaaataaataatgtttttagtgaaatatgaatttttttgtctatccttcttgcaatatctttattttgaaaataaatcaagattttcaaaattataattcttagtagaacttaaaagtattttcaatccatatcttcatctaaagttttcaattgttcaattaatacaatcttaaaattacagtcttaataataaaaatagtaatatatgtcattataaaatttatcacctaataattcaaattaataataaatatttttcgaaaagtatacattttttaaggctaaaggtaactacttaactggccatggccttttggttgccacagccctagttagaagtgaatcttagaggggtctgaaagtgctaacagacggattctctccatttttagtgcaatttaatcatgaagaaaggaatcttggggcttggtctcaaactctcagttcctgtgtccgatcaatctaattttgccaagttcctgtgagtctctctctctctctctctttgtgatgtgtgggacttttaaggatggggatctgcttgtcaacagggatggagttcgaattgtctctcagaatgatgtcgaagcggtaacatatttctctcacttttttatgcattctttgcctttgtaattgtttgtttgttaacaatttgtttatttcattatgtgtccagtccgattgctccattgtttgtttttttgcatttgatcttttggatctgatgaaatgcctgatagataagataacaagggattcatgatttttctgtagattccttattctcaggttaccatacccaagtggagtattatatgatttaaattgaataaaaaaattatgagatggattatttgctgtttctccttggccattatttttcttgtgtgtgtgttttcggcggtattgaccctactttcacttttcctagcctttgctattggattttaaatgaacctgatattgttaacgaggttatgcatttcttatcttatttacattgtctttaatcaaatggacaacaagttgcaagtttatgaaatgaaattgtgctaagcatacgtcatccacttcatgagccactaaacaaattgagtctttcatttctactcttaaacgaagtttgttgcataaaattgtttgcattctgagttaatgttggatcctcttcttccttcctacgtctttttttttttttggtgggactcagggaggctttcaacactttcatcaatttctgatgtattacactgtcaatcatgaaaaaaaataaaaaataatctgactaattatattggaaaacttcctatgcatactcttatatggtcaatacattttagaagacaaaatgagttgatagtagatacatagccatgttaaatgaggacccaaatttataagtgactaagtttaaatttattcctgttaaactccccatatctatagttgtgcattccaaccagtggcttatggtataaaaagagcaggacaagggggagttgaatgttgaaattcatgcatattttttttatctagtcacaatacacaatacattgctggctgaattctgacaatatgttgtatatgattctaacattcatgttattttttcagccacctcaaatcaagccgacagacaaccagttaactttggcagatatagatgtaatcaaagttgttggagagggaaatggaggggtagttcaattggtgcaacacaaatggactcgtcagttttttgtgttgaaggtacacttgctgcatgttgcataccatgctttgagtttgcatggtcttttctctcatttttagttagtttatccttttgtattggcattgtctacccatattacataatttttgataatgtcattcccctctccattacatccatttcattgagcaaggatgtttgaaacttgttttctcttggaatttcagtgtcacccaaagtcattattagtaagtttcataaaatgttatttctttcaatcaacatttaatgatttaatttcattaggagtggttcattttcattcaaatagtaatttagctcattactattatgctgctggtgctttctttctttgttatgtcagaacatgatatgaaccaagaattaggaatgggaaaggaaagaaagattttattgaataggatgaaaagaaccaggaataggaaagaaatctctcctccaagggtctccactccaaggatttccccttccaaaagaactaatgctctatttacaaatgacaacttattccccgaatcctgctatctgacctcccctatttatatctaattatcccctctaactaactgattaatattctaaacttcccatctccttataccctaacagaacatcattttgttcacccaacttcgaacatttgaattgtgtttaacatactgattgaaaatggttctcttccataggaacttgtatatattaatcaatcattgaacaagacaaatttaaacttgtgttaacatctaaggtcttcaaccccccctcccccttcattattgaaatgttcagtcttttgtcaattcattttctattaattttcctactagtttttgaaaatagagcagaaatgattgggtaacatgtcccatattggtttccctcctgcttttaacaattttaaatttccctcttgcttggttaacagtttagtatttgtatttgaactaataaactaattactttccttttgttctgatatattcccaaccttaatgttatcatttaaatctattcctcttttttcatttgtcactatgtatgcattcttcacaattcaggtaattcagatgaatattgaggagtctatgcgcaagcagattgcacaagagctgaaaattactcaacaagcacaatgtccttatgttgttgtctgctaccaatcattctatgaaaacggtgtcatatcaatcctcttagagtacatggatggaggttccttagctgatctgctgaagaaagttaaaacaattccggaggattatcttgctgccatctgtaagcaggtatggagtaaggaatttcccttcagtctagtacccataattcttttcactgaatcgcaaacaagatctgatctctttcttttttcttttttaatgatgtaggtgctgaagggtttagtttatctccaccacgaaaagcatattatccacagagacttaaaaccttctaatttgttaataaatcatattggtgaagtaaagattactgactttggtgtgagtacaattatggaaagtacatctggtcaagcaaatactttcattggaacctacaactatatgtctgtgagtaatatgtgcaagtatatttatcattttaccaccaaaatttaccagtgttgcctagaatatacagtaacattcactctgccaattttatagccagagagaatcattggaagccagcgaggatacaactacaaaagtgatatatggagtttgggactaatattactcgagtgtgctttgggtcggtttccatatgcaccgcctgatcaaagtgaaacatgggaaagcatttttgagcttatggaaactattgtcgataaacctcctcctagtcctccatctgaacaattttctacagaattttgctcatttatctcagcatggtaattgttatatgtgatactagttctgtgcagtcaagagtcttaatccaccataagaaaatgaaaacacaaccacacacacacacacacacacacacacagagaacactaacataacggtagcagtttcttaaaggtcatcctgaaattagtgagtggatgcttgaggagctttgatttgctgattgtttatgttgacaaaacaataatagaaatgtaatgcacttgccctacctacatccacaaaccattattttcattttttattcttatttttaaggtatctttcataatttcatcgaagaaaccatttaaacatgtataaatattagcaccttccgtcactattctgctgcctgttttgccaaaaactctatttcactgtgtgctttttatgtgtctactgatcttccttttttcaatcttgtttagtctacagaaagacccaaaggatcgactgtcagctcaggaattaatggtatgtgtaaatcttgcttatgtacacataccatgtaaaattgtctttctgatgctatatatttgattgaaactccaggcacatccttttgtcaacatgtatgatgacttggaggtggatctttcagcttacttctcgaatgcaggttctcctcttgcaaccttataa

SEQ ID NO: 7 - DNA, 3547 bp, Glycine tomentella
caaaatgttaaattgcagatacattaaaatcaatttttatagggaccattatgtgtggttatgaatttctatcgctttgtactcatttttgtaaagattttctcataccaaataactctgaatgaattttgacaaagaccaccggttcatgcgttattgcacgaaaaactcgtgcgtattttccttcaaaatcaaaattaaattaaaaaagttttcctcttaagaagagatctcttaacttctattctaaactatgaaataaaagaatttattgaaataaacatgtgtaaatttggaggaatttttctaacctttttccttctctcatcttgaacattgacaaattaaaacttcccttcctgtatttctccctggccttcttttttctttctctaatattcattcttcaaatttcaaattgtttggtaagaagaagaaacagcccaaacagttatctcaagtggtcacagagactcacttaagttcacaattgtctctcaaatctcaaaattgtaccatctttgtttcttgattttacaaccattttctttctttctttcttgagagagaattatgagactagtgtgagtctttgagatttactgtttgtcctgcctcttcttcttgtcaaacaatttgcatgcgggcgtgcatatttcctaactcatcaaatcatgtaacacgagagtgagattaagcttgagaattaatgaaagaaagcatgatgaagtgcgaactagtttagaaggataattgaagataggaaagaaggctaataaggataaatccactatggccatggtaccagaaagaagatgccaaaataatgtatacaatatataatctcaggtactcaagtttgtaatcaatgtgatcataaaacaaataatatttattattataaggagttgatcaaataagaacgaagagctagaaagaaaagaaaatacctataatgtataagattaatatttggtttgaaggacaaaatagataagaaaacagagataattaacgatctttttctctaattggattggagaaaaatataaagaaaagaggggaaaagttaatttttaaaaaacaaacaggtactcaagtttgtaatcaatgtgatcataaaacaaataatatttattattataaggaggtgatcaaataagaacgaagagctagaaagaaaagaaaagaggcaaaaagttaatttttaaaaaacaaaaattcaaaaaatttcttttgacttttcttcatattcaaattttaggttttcttttcttctgtctttctctcattacaaaaacaaaatttttgaaggatagaaggagtcaaatgaaaataaataaataaaaacttaaagaacaattaataaattttaagagataaatattaagcaaactgttaatattttttaaaaatattaagcaaacacatataaaaaaagttagctttttcagttataatggaaatagatcgacccttggtgaaattcgttattaactgaccgataaattaaaatataaaaagatgtatttatgtacagatcaatttattgaaaaataaagttatagcttttatttaaatacattataaacaaaagatcaattttatttaaacacattaaataataaaataaattcagatttttaaatatatttattttaatcatatatttcatgtatataatcaaatgtattggattaagtctctttgatcaaagtggtaaataagttatcgattttgaatttttggaggattatattaaatgtgattaattagattttttaatagtcaataacatgataaaaaaacgtatttgattaaaagtaaaagtaattgtagatatatttttaatttaaaatcataatcaataacattatctttactttttgtcctaaattggtatcgagtcgacaccacacactcaagtgataaacgcgttgacttgagtccattgtgaaacaaataaagcaagcaataatcaaacacttgatcgatcattttacaaaatctgggtgaagaatatctgtcggctacggctgctcgcactcgcagaggtacacagtcatcatcataaatctttgttaactgttgtttatgattcctcactcacccttcagatggatctcaaatctaacctcttaagtcttaagtagtttgattctgtatatcactttcaactaattaaggaataactaatttattgtcttctatttttcttttcatctttctctaaaatacaataatataacttataacacaaaagttttatgattgttgtttttttttttttttattttgtcagctaatttccaaaaatgatattattttactccttcctaattaataaaattcgatcgtattttcaacaaattatatttgtatatttaattatttcacttttattttttttataaatatgttatacctaataatagtaaataatccatatctatctaaatctattacatttttaattatacacacgcagactaacacatatatgggataattagtttattagataatttttactaaatatttcatattcaatagctttcaaactatatctgacaaaaataattctaagttggtgcaatgcttaaaagtgatttttttaactaaatgaagtcattaaggtagaacaaacttataaattaaataagttatcgattatttaaaatcacttatcaaacacattcttgggtatattatatttagtaagactcataaataaataaaatggcttaaagttgaaaaattatttgaagttaaagttgttaaactcaatcatttaattagaagtgttcaataaaaataatcattgaagtaactaataaatataaaatgatatgaaatattctttttattttgtagtcaaaagtatatatttttaaaatgtagatgttatagattaaacagagatagaataatcaaatgtatcttaatcagtagtatttattttggttggtgcctgtcctccattagtattgaacaaggagaccagagactcaatttggtgctgctcatgcgttcacttacccatcatttagtaaaatctgtgcacaagaggtgctggcagaactagacatgcatgaatctttcttaactgttgcttctgattcccccgagatggatctcaattcttaacagttagcagcagaggtacacatgaatctttcttacttaactcttgctcccgattcctcctcagatacattccaatcattttgtatatcagtttcaacatggacggattttggggggtatgggggaagcaggggccttggccctccctcaagatcctttatatatacttgagaaaaaagaaaaagaaaatattactagtataaaatgaataagaaaaatagagtattgacttgatgtttctttaatttttttttctagtagtagttcccgccacaggccacagcttttcttccattggatcccattttatcccaactccagcaatcgagaaatacttgtccttaatttacaccttctgtccttcttcacaaacaagtttacttccactttcgcaattcca

SEQ ID NO: 8 - DNA, 955 bp, Glycine tomentella
aagtttgtatgttccaatcttggactctattattaatttaagtaaaaggttattcgtttgttctttacttgcgaatctatcaggtgttcttgaatgtagatccctatataatgtattgattttatcataagtagaagtattttttcttctatattaagaaattgtttttggttctgtaaatgatactaagggtattgttttctaaattacgatgataggatgtgctctcatgcaaccatccagttttagatattaatatttctggataatctgagtaccttctttctaaacaatcggagttatttgtaactgtagttttccatttctgttgcgtttgcagatgagttgaagaaccagctcctagagtcacttcaaggattctgtatttagttgttgagtggttgagttcaatttgttgataaactcagatgcaagggtcaagaaattgcaatagttgacatatgcaagaactttaatgctgaagttaagtatcaggggctgcttttgcaacaaaatgtttgaaatttatgattgcaacaaaacgtatcacaaggatttgcctgagttgctgataatatgatctgatgtacaaattttcatgaaataaaagttttgtcaagctgtcccaaatgaacattttgagtcacgctaactgaacagttcctcaagttatatttgagactttttatttggttaaagcttgtcaaatttcctgattgatgatgggttttcattgcttgcaattactaatcaaatttaagacttgggaaccattttgttacgtgatgccctagggaatgccatatccgcatctgtagtcttcagttgctgcgttgtttcgttttctgttttttctcattacgtaaccaaaataaaataaaatttaagagtggctccaaggtgcgtatgtaagagacaatgagcttatcaattgattagctaacacaacatattg

SEQ ID NO: 9 - DNA, 2051 bp, Glycine tomentella
atgtctgggcttgaggttgtagcccctcttgttggagaggtaggagcgcatggggttggagaattacatactacaattgcatctaaaattgcgtcttccagaaaccttgatgacaactacaacattctgctcaaagagatggagatgctacttgcaataaagaaggataaagagagggaggttcaaagaaacaaccacagagataccactaatgcttacaaactgtggacaaacagggtatcagatgctgcagaagaagtgcagaagctgaaagctaaatacgaagagaaaatgctaccctggtggcgtattcaacgacgttcacatctgagtgaagagatggagaagaagtgcaactgtgttcgtgaacttaagaaggatgaatgtttaagagattttcttgttgataaaccaccagagcctgtcttaaaggagttaaatgtcccacagataagtggatatccaacccttcaaggtgccttggaaaacatgctgggtttgctaaaaaataataagattaaagtcgttggagtgtgtggaacaaaaggggtggggaaaacaacaataatgcagaacctcaacaacaatgaagaggttgctaaactgtttgaaattgtcatttttgtgaaagccacagctgatgatcataagcttcaagagaaaattgttgatcggttgatgctggacatagaaaccgacaaggagcatagcgatgatgttgcaagaagaatacacaaagagctagaaaagaagaagtatttattgattttggatgaggttgaggatgccatcaatttggagcagttgggaattcctagtgatgtcaacaatggcagtaaggtggtaattgccactcgactccctcgagtttataagttgaataaggtgcagagggtcatcaaagtcatggagttatctcctgaggaagcatggaagatgttcagagatactgttcatacctttaatcctaatattgattcccttgacattcaacctatagccaaacttgtatgcaaaaggtgctctcgtcttccacttctcatttacaatatagcaaattcttttaaattgaaagagtctgcttcaagttggtcggtgggacttgaagatcttaagccttggccagaacttgaaaatcaaggttagaagagttgtactcatgcctgaaattctgttatgatgaactcaaagataaaaaaaagcagaaatgttttttatacacttcactgtatcctgcaaatagcaaggtttacactgattatttagtggagtgttgggcagcacaaggtttactcggtgatataaatgacaaaaggtcatatcaaagtgcacgcaattgtggtattgacatattagaacatcttgctaatgtctctttactagagaaaggggaatcaatgatatatgtcaacatgaatcattgtatgagacaacttgcattacacatatcctctaaagatcctgaatgtagcttttacctccaagatggtggagaatctgaaaatctctcaaattcaagagcttggcagaaggctaggtgggtctctatgagacaactgcttgattttccaacaagccaagattgcagcatgattttgacattgttgctgagaaaaaatccaaaactaactacaataccacgaactttttttgagaacatgagcagtctacttctgttagacttgtataatagcatgattacacaactgccatcgtctttatcaaaattgacttgtctgcggagtttattcttgaacaattgcgagctcttggaatcattatcatctgaaattggatcacttcaatttctagaggtccttgacatacgagatactaaagtaacattcatacctctacaaattggatgtttgactaatctaagatgcctgcgaatcccattcattgcaagtgaagataatgaagctcaaaatgttcatgtgatttcaaagctgcataggttggaagaattaaccattcaagtcatatcctatgaacaatggtgcgatgatgctgaattgttttacaacatgtggcttctctggaaaatgtag

SEQ ID NO: 10 - DNA, 3005 bp, Glycine tomentella
ttgatttagcaaaatagaaacaaatattctttagataataatcgttttgcaatatcattacatgtcttggtctttttttataaaaaaaaaattactaaaagaatatcgtaagaatcaatactgtctctgactctctgtgattctgttactctatgttttagatgaaaggaattttcatgaggaatataactagttacttgtaattacttgtcaaacactatattcaactctcgcttaattttcatttatttgttagcttttcagttggtccggttctcataccttacacgaggccaatcaagttgtggatttgctagcaaattaatgaaattatgtcaatactacggagggtcacatgttaatattttagcctatgctatttccatgatctttcctagtggcttttagtgttttttccttggggttttagcccctttcattaaaaaaaaaaaaagttaactttttcagttgataatggcaatagacccttcgtaaaattcgttattaactgactgataaattaaaatataaaaagatgtatttttatacagatcaatttattgaaaaacaaaattataatttttatttaaacacagtataaacaaaagatcaattttatttgaacacattaaataataaaataaattcatcttttttaaatatatttattttaatcatatatttcacgtatataatcaaatgtatttgatgaagtctctttagttgactggtaaacaaaatcttcattttgaatcttgtaaagatgtgattagttagatttttttatgaagattagttataaataaaattaatagatattcgtattaataatatgataaaaattatattgaattaaaatgtaaaagtaattgtatacatattttttaatttaatataatcaatactatttgcctttaaaaaatcatcaataggcaatagcatttatctttacttttttcctatattagtattaaggatggtatcgagccgacaccacacaccgaagtgataaacgcgttgacttgaatccattgtgaaacaaacagagcaagcgataatcaaacacttgatcgatcattttgcaaaatgaggtgaagaagatctgtcggctacggtgctcgcactcgcagaggcacacagtcatagtcataaatctttctcaactattgcttctgattcctcattcatccttgaaatggatctcaattctgaccactcttaagtcttatgtagtttgattctgtatatcactttcaactaattaaggaataataatttattgtcttctatttttgttttcatctttctctaaaatacaataatttccaaatatataacttataacacaaaagttttatgattgttgtctttttattttgtctgctaattccaaaaatgattttattttactccttcctaattaataaaactcgtattttcaacaaattatatttgtatatttaattttttttttttttataaaatatggtatacctaataatactaaataatccgtatctatctaaatctattacatttttaattatacacacgctgataacatatatatggaataattgtttattagataattttactaaatatttcatattcaatagctttgaaactatatctgacaaaaaaattctaagttaacgcaatacttaaaagtgattttttaaactaaaacttgaaagtattaaggtagaacaaacttataaattaaataagttcttaattatttgaaatgacttatcaaacagatatattatatttggtaaaaaaaaatggcttaaagatgacaaattatttgaaatcaaagttgttaaagtagatcatttaattagaaacgttagataaaagtatttattgaattaactaataataaatgtaaaatgatatgaagaatatatttataaatattcttttaattttgtagtcaaaagtatatttttaaaaatgtagatgttatagattaaacagacctagaataatcaaatgtatcttaatcagtagtatttattctggttggtgcctgtcctccactagtattgaacaaggacaccagagactcaatttggagctgctcatgcgttgacttacccatcattttgcagaatctgtgcacaagagctgctggcagaggtagatatgcatgaatctttcttagctgtttcttctgattcctcactcacccttcagatggatctcaattcttaacagttagcagcagaggtacacatgaatctttcttacttaactcttgctcctgattccccctcacatacattccaatcattttgtatatcagtttcaatagggacggattgagaaacaagaaaaagaaaatattcttaataaaaaatgaataaaaaaatcgagtattgagttcatgtttgtttgattttttttctagaagtatattttatttctagttttacgcataaaattaataataaatacttctgtgaaacttttttatttattacataattatttattagaattaaataattaaataattgtgtaagaaaaaaaaatcgtccccccccccccccccccgatccctatgcattcctggatccgtccgagtttcaataagttactacttttaaatggtgctacttctagtctcaaggtttatatatactatacacccacacatatacaattctttttgtgttttgtgtttcgtaatcattgctttagaatttaagatttattgtaattgtctatatttaaaatgtttttactgtcaaacagaaaagataaataatgatcaagtgtgttactaaaggttgaatcattagtttttacatactgaagttttggctttgggtgttacatacatattcatattgaataaagcgcctatgtttgtgtatgcttcaaaattctataccgctgatgtctagaatttctatacgttgatttggtgtattatatgaatataacctttcattttattttctttgttaacgtattgtaggctttgaagtttcata

SEQ ID NO: 11 - DNA, 2141 bp, Glycine tomentella
cacatctcatatgttgttttccctcctcaatcattcttggagaatttctttcaagaagtaaatcatggagttgtaagcagctaaattcatttaattctttgtgggatgccaaaacacaaggcgacctcaaatacttgaatcttttgagtataaaattactaattatttgaggtactgcaatggtggacagaaggatgacttggcaattatgaggtactaccaaaaactgatgcatttgaattagtttgccataaagatataaaaaaattgacaaattttgctggcatagtgtgtttggaacgcattcgtggtcttttgattacaagatgtaacaaagttttaacaattgtgtcagccgatacaagtagcaacaccatgaatggaatccaaatagaaacaagagtcatcttaccaaatttggagcaattatatttggaaaatttgctcaatttaagacgtgtttttagaggtcccttgcacagtggaaccttttccaaattacaaattttgtcattgaataattgtccatcactcagtgacattttcagcaatggagcaattcacatttttcagaacttcaaaatctaaaacttgaagattgttcaaaaattgaagtacttatcggagaaaacattgaaagagaaagggatgtgcttccaaaactagaaatacttctgctggttaacttgcctaacttcaaaactatatgctcaactcatacattggcttggtcctctttggagctgttaaggatacataactgtcctaatttgaaaactttaccactagacagtgaaatgcagtcaacttaaagtccattaaagggcagcaagagtggtgggatgtgttggagtggacaaacaacgaggtgtatcagcgattgcaatccatctttgctgcctctaatgagtatttttcttagatattttctttcgtgcgtgtaagaattcctgttgaatgtgaaaaataaatgtttatttgtctttctttagtttattgcaagaaactcgataaaaaatagcttggattgtattattttatggtttgttgtgtttgaaggtttgggactaaaagtttgtactaatgtgtgtatttggaactaagttatttggaatgtgcttgaggttaaagagaaccagtaatgtttttgcagttaatcttaataggaaaaaattaaagaaagacgtattagaacattttgataatgtggtattgacatattagaacatcttgataatgtctctttactagagaaaggggaatagcgatatatgtcaatcattgtatgagataacttgcattacttatatatccttaaagatcttgtgcttcgcagttggcaggttaggtgggtctctatgagacaaatgcaaaaaaaaaaaaaaaaaaaaaaaaaacttacaagatactaaagtaactttagtaactctacaaattggatgtttgactaatgtaagatgttttgaatcccgtttatttttcattttttttatatgaacgtttataatataaaataaacaaattaaaatatatacaagataaataaataaatactaatttaaaaatatatatatatataattacaaaatgtttacctactttaaaattatgctaatttaaatatataacatagttaaattcaattttttttatatatacagaatatttcttgtggacatttagttccaatatttatagcatatactcataaataatgttaggagtgattctaccaaaataaaattgtaagtgattcacatctaggtaattaatatgaagtaagaaacaaaaaacatcatcaaacatttattttttattttttggctatggacgttttaatataaaaataaataaattaaaatatatgaaacataacttaaaaaatatatagaattacaaatgtttacctaccttgaaatatgctattttaattatataataataaattaaattcagttttttatatataaaaaatgagaagaaacaatattacacgaatttattcttcaaaaatattttatttcattagacttataagttattaacaaaagaaaaatatactatagaatatttctcgtgaacgtaacatttatatcatataatcataataaattaataatattgtgggtgattctacgtac

SEQ ID NO: 12 - DNA, 2976 bp, Glycine tomentella
atgtcgggggttgaggttgtagcccctcttgttggagaggtgggagcgcttggggttggagaattacatactaaaattgcatccaaaattgcatcttccagaaaccttgatgacaactacaaaattttgctcaaagacatggagatgctacttgcaataaagaaggataaagagagggaggttcaaagaaacaaccacacagataccactaatgcttacaaactgtggacaaacagggtatcagatgctgcagaagaagtgcagaagctgaaagttaaatacgaagaaaaaatgctaccctggtggcgtattcatcgacgttcacgtctgagtgaagagatggagaagaagtgcaactgtgttcgtgaacttatgaaggtcgaatgtttaagagattttcttgttgataaaccaccagagcctgtcttaaaggagttaaatgtcccacagataagtggatatccaacccttcaaggtgccttggaaaatactctggctttgctaagaaataataagattaaagtcattggagtgtgtggaacaaaaggggtggggaaaacaacaataatgcggaacctaaacaacaatgaagaggttgctaaactgtttgaaattgtcatttttgtgaaagccacaactgatgatcgtaagcttcaagagaaaattgctaatcggttgatgctggacataggaaccaacaaggagcatagtgatgatgttgcaagaagaatacacaaagagctagaaaagaagaagtatttattgattttggatgaggttgaggatgccatcaatttggagcagttgggaattccaagtggcatcaatggcagtaaggttgtaattgccactcgattccctctagtttataagttgaatagggtgcagagggtcatcaaagtcatggagctaactcctgaggaagcatggaagatgttccgagatactgttcatgcctttaatcctaagattgattcccttgacattcaacctatagccaaacttgtatgcaaaaggtgctctcgtcttccacttctcatttacaatatagcgaattcttttaaattgaaagagtctgcttcaagttggtcggtgggacttgaagatcttaaaccttggccagaacttcaaaatcaaggtttagaagagttgtactcatgtctgaaattctgttatgatgaactcaaagataaaaagaagcagaaatgctttctatacacttcactgtatcctgtagatagcaaggtttacactgattatttagtggagtgttgggcagcacaaggtttacttggtgatataaatgacaaaaggtcatatcgaagtgcacgcaattgtggtattgacatattagaacatcttgctaatgtctctttattagagaaaggggaatcaatgatatatgtcaacatgaatcattgtatgagacaacttgcattacacatatcctctaaagatcctgagtgtagcttttatctccaagatggtgaagaatctgaaaatctctcgaattcaaaagcttggcagcagtctaggtgggtctctatgagacaattgcttgatttaccaacacgccaagattgcagcatgattttgacattgttgctgcgaaaaaatccaaaactaactacaataccacaaactttttttgagaacatgagcagtctacttcttttagacttgtatggtagcatgattacacaactgccatcgtctttatcaaaattgactggtctacggggtttattcttgaacagttgcgagctcttggaatcattatcatctgaaattggatcacttcaatttctagaggtccttgacttacgagatactaaagtaactttcatacctctacaaattggatgtttgactaatctaagatgcctgcgaatcccattcgttgcaagtgaagataatgctcaaaatgttcatgtgatttcaaagcttcataggttggaagaattaaccattcaagtcatatcctatgaacaatggtgcaatgatgctgaaaatgttttacaacatgtggcttctttggaaaatgtaacacatctccaatgttgttttccctcgtcaatcattcttggaaaatttctttcaagaagtaaatcatggagttgtaagcaacaaaattcatttagattctttgtgggttgccaaaattcaaggcgacctcaaatacttgaatcttttgaatacaaaattacaaattatttgaggtactgcaatggtggacagaaggatgactcagcaattattgaggtactcccaataactgatgcatttgaattagtttgccataaagatatcaaaaaattgtcaaattttgctggcatagtgtgtttggaacgcattcgtggtcttttgattaaaaaatgcaacaaagttttaacaattgtgtcggccgatacaagtggcaacaccatgaatggagtccaaatagaaacaagagtcatcttaccaaatttggagcaattgtatttggaaaatttactcaatttgaaatgtgtttttagaggtccattgcacagtggaacctttaccaaattacatactttgtcattgaagaattgtccatcacttagtgaaattttcagcaatggagcaattcaacatttttcagaacttcaaaatctgaaacttgaagattgttcaaaaattgaagtacttatcagcaaagacattgaaagagaaagggatgtgcttccaaaactagaaatgcttctgctggttaacttgcctaacttcaatactatatgctcaactcatacattggcttggtcctctttggagctgttaaggatacataactgtcctaagttgaaaactttaccactagacagtgacaatgcagtcaacttaaagtccattaaagggcagcaagagtggtgggatgagttggagtggacaaacaacgatgaggtgtatcagcgattgcaacccatctttgctgcctccgttgagtatttttcttag

SEQ ID NO: 13 - DNA, 1663 bp, Glycine tomentella
caacagagcaagcgataatcaaacacttgatcgatcattttgcaaaattaggttgaagaagatctatcgacaacggttgctcgcactcgcagaggtacacaatcataaatctctcttagttgttgcttctggttcctcactcacccttgagatggatctcaattctgaccactcttaagtcttgagtagtttgattctgtatatcactttgaactaatcaagaatgattaagaaattattgtgttctttttttttttttccatctttctctaaaatacaataatttccaaaaatataacttttaagataaaaattgagtttttttttgtctgttgatttccaaaaatgatgatagtttactccttcctaattaacactcgtattttcaaaaaattatatttgtatatttaattatttcacttttaatttttttataattatatcatacctaataatagtaaatggtcttttacgttattttatattaatgaataattagtttattagataattttactaaatattttataatcaatagctttcaaactatatttgacaaaaacaattataggttaatgtaatgcttaaaagtgatttttttaacaaaattaaaagttgttaagttagaacaaatttataaattaaataagttgttgattatcttagactactatatttgataagactcactgataaaatggtttaaagtgacaaattatttgaatgcgtttttaagatcatttttttatcttaatcctgattcatacggaaagagagattctaattaatctggaattcagcgaaaagataaataaaaccttaaagtttaactaaaacttgttagaagtgtttgataaaaaacagttatttaaccaactaataatgatataataaataatttttataattttgttttaaaaagtataattttttaaaaaatgtagatgttatagattaaatggacatataaaataatcaaatgtattttaatcagttacatttaatttggttggtgcctgtcctccactagtagtattgagcaaggacaccagagactcaatttggtgctgctcatgggttgactgacttacccatcgttttgcaaaatcaggagatctatgcacaacagctgctggcagaggtagacatacatgaatctttcttaactgttgctcctgatgcccccgagatggatctaaaatcttaactgttagcagaggtacacatgaatctttcttaactgttgctcctgattccccctgagatcgattccaatgattatgcatatcagtttcaataagttactacttttaaattctatttttttttgtgtgtttcttaatgattgctttagaatttaagtttttagtgcatatttgaattacttttactatcaaacagaaaaagaaaactaatccaaggtgcataaataatgatcaagtgtactggtaaatggttgaatcattagtttttacatattgaagttttgggtttgggtgttccatacatatccatattgaataaaactgctatgtttgtgtatgcattgaaattctataccgctgatgtctagaatttctatacgttgatttggtgtcttatatgattataaccttttattttattttatttgttaatgtattgtaggctttgaagtttcata

SEQ ID NO: 14 - DNA, 929 bp, Glycine tomentella
atattttctttcatgcatgtaacaattcctgttaaataaaaaactaaaaaataaatgtgtttgtttgtctttctttagttttattcaaacaaactagagaaaaaatagcttggattgtattattttatagtttgttatgtttgaaggtttgggactaaaagttagtaataatgtgtagacttggaaccaagttatttggaatgtgcttgagattaaagagaatacattttgcagttaaacttatattactatttttatgtatattatttgtcttcattcttatgaataggaaaaaaatgagttaaggaccttgtctattagcatagactctaaagtaagattggggagcttgaagagcaactcctcaagcaaagaatgtgataacaaatatatgaagtgtcttacaataattgcataagtagttttattattaaggagtctaaattgtcacttgcaaaaacaactggagtgtaagaaaagaaatggattgacttatcctcgcatatcgtgaagtgcacttaattgtggtattgacatattagaacatcttgataatctctctttcctatagaaagggtaataacgatatatgttaatatgaatcattttatgagataacttgtattacatatatcctcttttggacttgtaagttattaaaaaaaaaaaaaaatcttgataatctctctttcctatagaaagggtaataacgatatatgttaatatgaatcattttatgagataacttgtattacatatatcctcttttggacttgtaagttattaaaaaaaaaaaaaatactgttgaatatttctcgtgaacaaaatataatcaaaatttattttcatttatatcatataataatataatgttatggatgattctacgtacgtaccaaaatttatgagtgattcacattcagatcgga

SEQ ID NO: 15 - DNA, 2976 bp, Glycine tomentella
atgtcgggggttgaggttgtagcccctcttgttggagaggtgggagcgcttggggttggagaattacatactaaaattgcatccaaaattgcatcttccagaaaccttgatgacaactacaaaattttgctcaaagacatggagatgctacttgcaataaagaaggataaagagagggaggttcaaagaaacaaccacacagataccactaatgcttacaaactgtggacaaacagggtatcagatgctgcagaagaagtgcagaagctgaaagttaaatacgaagaaaaaatgctaccctggtggcgtattcatcgacgttcacgtctgagtgaagagatggagaagaagtgcaactgtgttcgtgaacttatgaaggtcgaatgtttaagagattttcttgttgataaaccaccagagcctgtcttaaaggagttaaatgtcccacagataagtggatatccaacccttcaaggtgccttggaaaatactctggctttgctaagaaataataagattaaagtcattggagtgtgtggaacaaaaggggtggggaaaacaacaataatgcggaacctaaacaacaatgaagaggttgctaaactgtttgaaattgtcatttttgtgaaagccacaactgatgatcgtaagcttcaagagaaaattgctaatcggttgatgctggacataggaaccaacaaggagcatagtgatgatgttgcaagaagaatacacaaagagctagaaaagaagaagtatttattgattttggatgaggttgaggatgccatcaatttggagcagttgggaattccaagtggcatcaatggcagtaaggttgtaattgccactcgattccctctagtttataagttgaatagggtgcagagggtcatcaaagtcatggagctaactcctgaggaagcatggaagatgttccgagatactgttcatgcctttaatcctaagattgattcccttgacattcaacctatagccaaacttgtatgcaaaaggtgctctcgtcttccacttctcatttacaatatagcgaattcttttaaattgaaagagtctgcttcaagttggtcggtgggacttgaagatcttaaaccttggccagaacttcaaaatcaaggtttagaagagttgtactcatgtctgaaattctgttatgatgaactcaaagataaaaagaagcagaaatgctttctatacacttcactgtatcctgtagatagcaaggtttacactgattatttagtggagtgttgggcagcacaaggtttacttggtgatataaatgacaaaaggtcatatcgaagtgcacgcaattgtggtattgacatattagaacatcttgctaatgtctctttattagagaaaggggaatcaatgatatatgtcaacatgaatcattgtatgagacaacttgcattacacatatcctctaaagatcctgagtgtagcttttatctccaagatggtgaagaatctgaaaatctctcgaattcaaaagcttggcagcagtctaggtgggtctctatgagacaattgcttgatttaccaacacgccaagattgcagcatgattttgacattgttgctgcgaaaaaatccaaaactaactacaataccacaaactttttttgagaacatgagcagtctacttcttttagacttgtatggtagcatgattacacaactgccatcgtctttatcaaaattgactggtctacggggtttattcttgaacagttgcgagcttttggaatcattatcatctgaaattggatcacttcaatttctagaggtccttgacttacgagatactaaagtaactttcatacctctacaaattggatgtttgactaatctaagatgcctgcgaatcccattcgttgcaagtgaagataatgctcaaaatgttcatgtgatttcaaagcttcataggttggaagaattaaccattcaagtcatatcctatgaacaatggtgcaatgatgctgaaaatgttttacaacatgtggcttctttggaaaatgtaacacatctccaatgttgttttccctcgtcaatcattcttggaaaatttctttcaagaagtaaatcatggagttgtaagcaacaaaattcatttagattctttgtgggttgccaaaattcaaggcgacctcaaatacttgaatcttttgaatacaaaattacaaattatttgaggtactgcaatggtggacagaaggatgactcagcaattattgaggtactcccaataactgatgcatttgaattagtttgccataaagatatcaaaaaattgtcaaattttgctggcatagtgtgtttggaacgcattcgtggtcttttgattaaaaaatgcaacaaagttttaacaattgtgtcggccgatacaagtggcaacaccatgaatggagtccaaatagaaacaagagtcatcttaccaaatttggagcaattgtatttggaaaatttactcaatttgaaatgtgtttttagaggtccattgcacagtggaacctttaccaaattacatactttgtcattgaagaattgtccatcacttagtgaaattttcagcaatggagcaattcaacatttttcagaacttcaaaatctgaaacttgaagattgttcaaaaattgaagtacttatcagcaaagacattgaaagagaaagggatgtgcttccaaaactagaaatgcttctgctggttaacttgcctaacttcaatactatatgctcaactcatacattggcttggtcctctttggagctgttaaggatacataactgtcctaagttgaaaactttaccactagacagtgacaatgcagtcaacttaaagtccattaaagggcagcaagagtggtgggatgagttggagtggacaaacaacgatgaggtgtatcagcgattgcaacccatctttgctgcctccgttgagtatttttcttag

SEQ ID NO: 16 - DNA, 1958 bp, Glycine max
gtgattgcggttacatcatgtacggaaaaataattctaatccttgatttaaatttgatcttgactatttatttattctttatttcattttgtaaatcattttatgtatcccctggcaaggcaattttatccaccttgcacccaacacttcgggttcccataaatcaaaccaccttaacttcacacaatgctgtaactcacaccgcccagcatctccaatgtgaaagaagctaaaatttaataaacaatcatacgaagcagtgacaaaataccagatggtattaatgctttgataaaattaattggaaagtataaaatggtaggaaataattaattataattaatttaaataagattaaaaataatttaaaactaaaatgttaaaattttaagaaaattattttaaataatatttaaaaacatttaaaatcattttaaaaaatttatttataggacaattaaatgaatatttcagctaattaaaaacaaaagcttacctagccttagaagacaacttgtccaacaattagatgatacccattgcccttacgttttctttaacatcaattattgtttttgtcaacaagctatcttttagttttattttattggtaaaaaatattgtcgccttcaagttgcatcatttaacacatctcgtcattagaaaaataaaactcttccctaaacgattagtagaaaaaatcattcgataataaataagcaagcaaaattaggaaaaaataacttcattttaaaaaaatcattaaggctatattttttaaatgactaattttatatagactgtaactaaaagtatacaatttattatgctatgtatcttaaagaattacttataaaaatctacggaagaatatcttacaaagtgaaaaacaaatgagaaagaatttagtgggatgattatgattttatttgaaaattgaaaaaataattattaaagactttagtggagtaagaaagctttcctattagtcttttcttatccataaaaaaaaaaaaaaaaatctagcgtgacagcttttccatagattttaataatgtaaaatactggtagcagccgaccgttcaggtaatggacactgtggtcctaacttgcaacgggtgcgggcccaatttaataacgccgtggtaacggataaagccaagcgtgaaggggtgaaggtacatctctgactccgtcaagattacgaaaccgtcaactacgaaggactccccgaaatatcatctgtgtcataaacaccaagtcacaccatacatgggcacgcgtcacaatatgattggagaacggttccaccgcatatgctataaattgcccccacacccctcgaccctaatcgcacttgaattgcaatcaaattagttcattctctttgcgcagttccctacctccccctttcaaggtccgtagattcctcctgtttttttttcttcttctttattgtttgttctacatcagcatgatgttgatttgattgtgttttctatcgtttcatcgattataaattttcataatcagaagattcagcttttattaatgcaagaacgtccttaattgatgattttataaccgtaaattaggtctaattagagtttttttcataaagattttcagatccgtttacaacaagccttaattgttgattctgtagtcgtagattaaggtttttttcatgaactacttcagatccgttaaacaacagccttatttgttgatacttcagtcgtttttcaagaaattgttcagatccgttgataaaagccttattcgttgattctgtatggtatttcaagagatattgctcaggtcctttagcaactaccttatttgttgattctgtggccatagattaggattttttttcacgaaattgcttcttgaaattacgtgatggattttgattctgatttatcttgtgattgttgactctacaggatccaaaa

SEQ ID NO: 17 - DNA, 354 bp, Arabidopsis thaliana
ctgagctcagctttttgtgatctgatgataagtggttggttcgtgtctcatgcacttgggaggtgatctatttcacctggtgtagtttgtgtttccgtcagttggaaaaacttatccctatcgatttcgttttcattttctgcttttcttttatgtaccttcgtttgggcttgtaacgggcctttgtatttcaactctcaataataatccaagtgcatgttaaacaatttgtcatctgtttcggctttgatatactactggtgaagatgggccgtactactgcatcacaacgaaaaataataataagatgaaaaacttgaagtggaaaaaaaaaacttgaatgttcactactac

SEQ ID NO: 18 - DNA, 2976 bp, Glycine tomentella; identical to SEQ ID NO: 15

SEQ ID NO: 19 - DNA, 2515 bp, Medicago truncatula
gttgccatcgtttcatcctagggttttattgttactgttattggcaattagatatctgaaatttggtggcatgcttcagagttagaggatggagttttcaagtttttttggtttttgtttgatgatgttctaagttttttggtttagcttttgctggtctattaatggcatgatgcttcactgatgacaaataacaatgtaatgaagtgtcagttttgattttaagccatattcgtgtattgttaaagcatccaattttgtcaatcaattgatgcttcaagtatttcttttattaatgcaatgaattttcgttttaccttataatccatatgagaactttctttaattttccagttatgtgtatattgattttgtattttgttgtaaagaattaatcatagtgcactgaacctagcaaaacttgggaatttgttgatattgaagctaatttaatcaatagtcttgcttaaatggaataagaatggcgtggtactcttcaaaatatcatgattgcacatttattttccctttaccgcttcacaacatttaattcagcactactatcaattattctctatcaatgcatattcccatgcaccagcaaaagtatgtcatgtaactataaatataggtgcggtgctatcgaaaggcttgccattctcattctaaactcacttagcatcacatgtttgtatcaaaaaatggctttacgtgagtttgagagcttacttgctttgatttgcttgaaaggtcccataatctttgtttattatgtttatggtttatttttatgtgaatatgaaaaccatccagcatcaaaatctaaacgaaggaccgcatattatttaccatcatttttaccaattttcattctcaacaacaccattatttacccaagaaaataattaaacaacaacatattattttccgccaaccgttgctttttctacggacacccaaatgtaaaacacccttaattccaaagatttccaagatataaataaatacaccataaacattcttcttctaacaaagaagacctaaccattgttctaacagtaacacctaaaattcagttacctaacatgtcaaagtgaaaactgagcacaaaaactaaaatcaaaacaccagttaagaaaataattaaacaacaacacaaaattttgcattttgatgtatgaaaagctttaaaaaaagtgactatttctaaaatcacttttaaaaaaagaaacatccaaagtcatgagtgagtcaaaggggttataaacttctgcattaccctaatctttctattcttgaaattccatgagaaaataaacaacagcacataaatgggttaagctttaaaaaaagggataatttgtaaaatcactttttcagacatttttgtttatgcatgtggtaaaagtcatctaaagaacatccaatggaagaatcgtacaaaaaatcattgatctaacagaatggaccaaaacgagattaaaaaaaaacttaaatactcaaacaatcctttttttagttaagaaattaaaacaataccaattaaatatttaaggaaccaaaataacatttaagcctaaattattttgactaacataaatacataattaaaaactattttaaaatttcaatacaacgacacaccttgagagactaaaatgattattattcatattatccattaaaaaggaaaaggagtgcgtgtgaaaagcaggccacacgtatatgggccttgaactcgaattcgaattcgaatcttgtggccacctaaccacttcactaaactcacgaataattggtgaacaattctttacaacgaaactaacgaatatcctaataccagatcctaatgacatttttacccctaaactcttaccctcaacactttcaaaagaatcatcactaaattgtcattttaacacactctagaacctactttgataacgaaaaagtagaaagaaacccgtgctaggtcccacccaatagacaacgcaaaccacaattaccagcgcagtatcacgggtcatgcaccggtcacgtagcgtagataaaacccggaaccaaacttgacctacccccacaaacaagtcattattttattatatttatccttaaaaccctatttctcatttcatttcttctacaaccgtctactctagctcgttagttccgctatcactctactcttctactacttcacttcatcctctttgtttttcagcctagggtggtggtaattattcataactgtttcattatttttccttaatttctcattaattttccgttaatttttcaattagtgtaagctgatctgatttttttcctttgtttttgtttcgaattttgatggatcagccaagatcaagatcgtaatcaacggtaaatattatagttccttcgatctctgttcatttatgcgtcgatcggatttatattttttaatttagtttattttttgttaattttgtttgtaactgataggatttggaagaatcggaaaccggatccaaaa

SEQ ID NO: 20 - DNA, 354 bp, Arabidopsis thaliana; identical to SEQ ID NO: 17

SEQ ID NO: 21 - DNA, 2979 bp, Glycine tomentella
atgtctgggcttgaggttgtagcccctcttgttggagaggtaggagcgcatggggttggagaattacatactacaattgcatctaaaattgcgtcttccagaaaccttgatgacaactacaacattctgctcaaagagatggagatgctacttgcaataaagaaggataaagagagggaggttcaaagaaacaaccacaaagataccactaatgcttacaaactgtggacaaacagggtatcagatgctgcagaagaagtgcagaagctgaaagctaaatacgaagagaaaatgctaccctggtggcgtattcaacgacgttcacatctgagtgaagagatggagaagaagtgcaactgtgttcgtgaacttaagaaggatgaatgtttaagagattttcttgttgataaaccaccagagcctgtcttaaaggagttaaatgtcccacagataagtggatatccaacccttcaaggtgccttggaaaatatgctgggtttgctaaaaaataataagattaaagtcgttggagtgtgtggaacaaaaggggtggggaaaacaacaataatgcagaacctcaacaacaatgaagaggttgctaaactgtttgaaattgtcatttttgtgaaagccacagctgatgatcataagcttcaagagaaaattgttaatcggttgatgctggacatagaaaccgacaaggagcatagcgatgatgttgcaagaagaatacacagagagctagaaaagaagaagtatttattgattttggatgaggttgaggatgccatcaatttggagcagttgggaattcctagtgatgtcaacaatggcagtaaggtggtaattgccactcgactccctcgagtttataagttgaataaggtgcagagggtcatcaaagtcatggagttatctcctgaggaagcatggaagatgttcagagatactgttcatgcctttaatcctaatattgattcccttgacattcaacctatagcaaaacttgtatgcaaaaggtgctctcgtcttccacttctcatttacaatatagcaaattcttttaaattgaaagagtctgcttcaagttggtcggtgggacttgaagatcttaaaccttggccagaacttgaaaatcaaggtttagaagagttgtactcatgcctgaaattctgttacgatgaactcaaagataaaaagaagcagaaatgttttttatacacttcactgtatcctgcaaatagcaaggtttacactgattatttagtggagtgttgggcagcacaaggtttactcggtgatataaatgacaaaaggtcatatcaaagtgcacgcaattgtggtattgacatattagaacatcttgctaatgtctctttactagagaaaggggaatcaatgatatatgtcaacatgaatcattgtatgagacaacttgcattacacatatcctctaaagatcctgaatgtagcttttacctccaagatggtggagaatctgaaaatctctcaaattcaagagcttggcagaaggctaggtgggtctctatgagacaactgcttgattttccaacaagccaagattgcagcatgattttgacattgttgctgagaaaaaatccaaaactaactacaataccacgaactttttttgagaacatgagcagtctacttctgttagacttgtataatagcatgattacacaactgccatcgtctttatcaaaattgacttgtctgcggagtttattcttgaacaattgcgagctcttggaatcattatcatctgaaattggatcacttcaatttctagaggtccttgacatacgagatactaaagtaacattcatacctctacaaattggatgtttgactaatctaagatgcctgcgaatcccattcattgcaagtgaagataatgaagctcaaaatgttcatgtgatttcaaagctgcataggttggaagaattaaccattcaagtcatatcctatgaacaatggtgcaatgatgctgaatttgttttacaacatgtggcttctctggaaaatgtagcacatctcatatgttgttttccctcctcaatcattcttggagaatttctttcaagaagtaaatcatggagttgtaagcagctaaattcatttagattctttgtgggatgccaaaacacaaggcgacctcaaatacttgaatcttttgagtataaaattactaattatatgaggtactgcaatggtggacagaaggatgactcgtcaattattgaggtactaccaaaaactgatgcatttgaattagtttgccataaagatataaaaaaattgacaaattttgctggcatagtgtgtttggaacgcattcgtggtcttttgattacaagatgtaacaaagttttaacaattgtgtcagccgatacaagtagcaacaccatgaatggaatccaaatagaaaaaagagtcatcttaccaaatttggagcaattatatttggaaaatttgctcaatttaagatgtgtttttagaggtcccttgcacagtggaaccttttccaaattacaaattttgtcattgaataattgtccatcactcagtgacattttcagcaatggagcaattcaacatttttcagaacttcaaaatctaaaacttgaagattgttcaaaaattgaagtacttatcggagaaaacattgaaagagaaagggatgtgcttccaaaactagaaatacttctgctggttaacttgcctaacttcaaaactatatgctcaactcatacattggcttggtcctctttggagctgttaaggatacataactgtcctaatttgaaaactttaccactagacagtgaaaatgcagtcaacttaaagtccattaaagggcagcaagagtggtgggatgtgttggagtggacaaacaacgaggtgtatcagcgattgcaatccatctttgctgcctctaatgagtatttttcttag
